United States Patent Application Publication US 2023/0026259 A1 - sequence listing, part 55

SEQ ID NO: 149829 - DNA, 1921 bp, Homo sapiens
  Payload ID: 9598
  Gene Symbol: LHCGR
  Gene Name: luteinizing hormone/choriogonadotropin receptor
  ENST ID: ENST00000403273
  CDS Start-End: 60-1049
ggccgcactcagaggccgtccaagacactggcaagccgcagaagcccagttcgccggccatgaagcagcggttctcggcgctgcagctgctgaagctgctgctgctgctgcagccgccgctgccacgagcgctgcgcgaggcgctctgccctgagccctgcaactgcgtgcccgacggcgccctgcgctgccccggccccacggccggtctcactcgactatcacttgcctacctccctgtcaaagtgatcccatctcaagctttcagaggacttaatgaggtcataaaaattgaaatctctcagattgattccctggaaaggatagaagctaatgcctttgacaacctcctcaatttgtctgaaatactgatccagaacaccaaaaatctgagatacattgagcccggagcatttataaatcttccccgattaaaatacttgagcatctgtaacacaggcatcagaaagtttccagatgttacgaaggtcttctcctctgaatcaaatttcattctggaaatttgtgataacttacacataaccaccataccaggaaatgcttttcaagggatgaataatgaatctgtaacactcaaactatatggaaatggatttgaagaagtacaaagtcatgcattcaatgggacgacactgacttcactggagctaaaggaaaacgtacatctggagaagatgcacaatggagccttccgtggggccacagggccgaaaaccttggatatttcttccaccaaattgcaggccctgccgagctatggcctagagtccattcagaggctaattgccacgtcatcctattctctaaaaaaattgccatcaagagaaacatttgtcaatctcctggaggccacgttgacttaccccagccactgctgtgcttttagaaacttgccaacaaaagaacagaatttttcacattccatttctgaaaacttttccaaacaatgtgaaagcacagtaaggaaagtgaataacaaaacactacttttgcatggggctctatctgctgctcatagcctcagttgattcccaaaccaagggccagtactataaccatgccatagactggcagacagggagtgggtgcagcactgctggctttttcactgtattcgcaagtgaactttctgtctacaccctcaccgtcatcactctagaaagatggcacaccatcacctatgctattcacctggaccaaaagctgcgattaagacatgccattctgattatgcttggaggatggctcttttcttctctaattgctatgttgccccttgtcggtgtcagcaattacatgaaggtcagtatttgcttccccatggatgtggaaaccactctctcacaagtctatatattaaccatcctgattctcaatgtggtggccttcttcataatttgtgcttgctacattaaaatttattttgcagttcgaaacccagaattaatggctaccaataaagatacaaagattgctaagaaaatggcaatcctcatcttcaccgatttcacctgcatggcacctatctctttttttgccatctcagctgccttcaaagtacctcttatcacagtaaccaactctaaagttttactggttcttttttatcccatcaattcttgtgccaatccatttctgtatgcaatattcactaagacattccaaagagatttctttcttttgctgagcaaatttggctgctgtaaacgtcgggctgaactttatagaaggaaagatttttcagcttacacctccaactgcaaaaatggcttcactggatcaaataagccttctcaatccaccttgaagttgtccacattgcactgtcaaggtacagctctcctagacaagactcgctacacagagtgttaactgttacatcagtaactgcattattgaa

SEQ ID NO: 149830 - DNA, 2073 bp, Homo sapiens
  Payload ID: 9598
  Gene Symbol: LHCGR
  Gene Name: luteinizing hormone/choriogonadotropin receptor
  ENST ID: ENST00000405626
  CDS Start-End: 1-2019
atgaagcagcggttctcggcgctgcagctgctgaagctgctgctgctgctgcagccgccgctgccacgagcgctgcgcgaggcgctctgccctgagccctgcaactgcgtgcccgacggcgccctgcgctgccccggccccacggccggtctcactcgactatcacttgcctacctccctgtcaaagtgatcccatctcaagctttcagaggacttaatgaggtcataaaaattgaaatctctcagattgattccctggaaaggatagaagctaatgcctttgacaacctcctcaatttgtctgaaatactgatccagaacaccaaaaatctgagatacattgagcccggagcatttataaatcttccccgattaaaatacttgagcatctgtaacacaggcatcagaaagtttccagatgttacgaaggtcttctcctctgaatcaaatttcattctggaaatttgtgataacttacacataaccaccataccaggaaatgcttttcaagggatgaataatgaatctgtaacactcaaactatatggaaatggatttgaagaagtacaaagtcatgcattcaatgggacgacactgacttcactggagctaaaggaaaacgtacatctggagaagatgcacaatggagccttccgtggggccacagggccgaaaaccttggatatttcttccaccaaattgcaggccctgccgagctatggcctagagtccattcagaggctaattgccacgtcatcctattctctaaaaaaattgccatcaagagaaacatttgtcaatctcctggaggccacgttgacttaccccagccactgctgtgcttttagaaacttgccaacaaaagattattcttccatgcttgctgagagtgaactgagtggctgggactatgaatatggtttctgcttacccaagacaccccgatgtgctcctgaaccagatgcttttaatccctgtgaagatattatgggctatgacttccttagggtcctgatttggctgattaatattctagccatcatgggaaacatgactgttctttttgttctcctgacaagtcgttacaaacttacagtgcctcgttttctcatgtgcaatctctcctttgcagacttttgcatggggctctatctgctgctcatagcctcagttgattcccaaaccaagggccagtactataaccatgccatagactggcagacagggagtgggtgcagcactgctggctttttcactgtattcgcaagtgaactttctgtctacaccctcaccgtcatcactctagaaagatggcacaccatcacctatgctattcacctggaccaaaagctgcgattaagacatgccattctgattatgcttggaggatggctcttttcttctctaattgctatgttgccccttgtcggtgtcagcaattacatgaaggtcagtatttgcttccccatggatgtggaaaccactctctcacaagtctatatattaaccatcctgattctcaatgtggtggccttcttcataatttgtgcttgctacattaaaatttattttgcagttcgaaacccagaattaatggctaccaataaagatacaaagattgctaagaaaatggcaatcctcatcttcaccgatttcacctgcatggcacctatctctttttttgccatctcagctgccttcaaagtacctcttatcacagtaaccaactctaaagttttactggttcttttttatcccatcaattcttgtgccaatccatttctgtatgcaatattcactaagacattccaaagagatttctttcttttgctgagcaaatttggctgctgtaaacgtcgggctgaactttatagaaggaaagatttttcagcttacacctccaactgcaaaaatggcttcactggatcaaataagccttctcaatccaccttgaagttgtccacattgcactgtcaaggtacagctctcctagacaagactcgctacacagagtgttaactgttacatcagtaactgcattattgaattgttcttaaacctgtaaaaaaaaat

SEQ ID NO: 149831 - DNA, 2174 bp, Homo sapiens
  Payload ID: 9598
  Gene Symbol: LHCGR
  Gene Name: luteinizing hormone/choriogonadotropin receptor
  ENST ID: ENST00000428232
  CDS Start-End: 1-528
aactgcgtgcccgacggcgccctgcgctgccccggccccacggccggtctcactcgactatcacttgcctacctccctgtcaaagtgatcccatctcaagctttcagaggacttaatgaggtcataaaaattgaaatctctcagattgattccctggaaaggatagaagctaatgcctttgacaacctcctcaatttgtctgaaatactgatccagaacaccaaaaatctgagatacattgagcccggagcatttataaatcttccccgattaaaatacttgagcatctgtaacacaggcatcagaaagtttccagatgttacgaaggtcttctcctctgaatcaaatttcattctggaaatttgtgataacttacacataaccaccataccaggaaatgcttttcaagggatgaataatgaatctgtaacactcccatggcaaaattgtgatgaggcaataaaggagctcacccttaaagaaaaaagagaaaacatggattggaatgactctgaaatgaagagatagatgtgaagcaaaagaagagatcatctcagaggactctcttttatatcactggattctaaaaattggtatccttggtgcactgcctttgtatagtacttttactttgtgtagatgtaattttacatgtataattgtcatgttacaaagctgtgaccatgtagcttcatctcagattaatgcaatcaaaagaatacagagcagcaaccaaaaataatttcaaaaataacccatactctttacttgcaactctcaaacaccaggaaagagattctgttgatcctagaaatatttctcaacagtctctccactcctgccacttccctcacacaccacagctctaccggctgcttataaagtgttttcaactcaccattgcataatggatctggaactactcattcatcatgtcccccaccaaaaacaaggtattcaacaaacaaattccgaatgaggtgatatcacatgccttaggatttggggtctccccacatgtctatatcaagaacacaaaagacacaggattagattcatgtcctcgagaagttcatagtctcaatgagggggaaaacataaaataataaaataataatacaagctagtagatattcactatgagagtgtgtggtacctagaaataagatcttagagaagtccttttgggctggggaagtcagagaggctttatggtagagctaacagatttgaattagacctcatggaatcagtaacgtttatatgggtaaatgtgaaaatagcagctaatatgtatgtagcccttattaaatacctgcactgtttttaagtactttttaagtcccatagcaaccttatgagataggaactatcaaccctacttttagatgaggagaccaaggcatcaagaggttaagtatctctatctcaggtcaagatttggtcccagacagtatggctccagagtcatgttcttaaccgttatgcggtaccacaacatacagagaaaggcagagtaaggaatccaagtgaagagatggcaggagcaaaagcatggcaggaggagaacaggatgaggctactacttgggagtaaacatgctgtttaaggaatggaaagtgagtttagataactggctgagatggagaggacactgaattgcagagacccttaagtgccaggacaaggagacaggcttggaggtaactctggaaaaagtaataaaataatctattcaatagagtaggctttattcaaagatcacaaatatccatgactcccttcaactttgatctaaatctaaaaataatcagagaccaataggtattcctccgaggtaaatgtacaatgatgggagtggagtgaagtaggaacgaaaaggcagaagacatggaggagggtgaagaagaaaaccaatgttgggataatccataggtaactatgagctcacaagactgggccaccccacgagactcaaagagtaaccaaagattccttctcacacatcatacttcagtatgtgcacagagagcttcatggttttctaatgacagggacattaacttatgttgctcatgattttaagaaaaagagtgcatgccagtagggtgtaatttccccactctgaagttaataaagattgaggctccgtctctcccagagagcctgtggga

SEQ ID NO: 149832 - DNA, 1569 bp, Homo sapiens
  Payload ID: 9599
  Gene Symbol: LYAR
  Gene Name: Ly1 antibody reactive
  Uniprot ID: Q9NX58
  ENST ID: ENST00000343470
  CDS Start-End: 242-1381
cgcgctgggtggttcagaagcgaattctgcaccgcgaagcctgagaggcaggtagctgcggcgctgggctggcggcggcgagtccacgtgctccccgcggccggttgaaaccgttggcgggcgctggctgagaggcaatgtttgctgtcttccattggagtgactgaatttctacatgacggctttttgacaagacttaaaacctgtcttggatagagaatatttagccatttacctaaaaatggtattttttacatgcaatgcatgtggtgaatcagtgaagaaaatacaagtggaaaagcatgtgtctgtttgcagaaactgtgaatgcctttcttgcattgactgcggtaaagatttctggggcgatgactataaaaaccacgtgaaatgcataagtgaagatcagaagtatggtggcaaaggctatgaaggtaaaacccacaaaggcgacatcaaacagcaggcgtggattcagaaaattagtgaattaataaagagacccaatgtcagccccaaagtgagagaacttttagagcaaattagtgcttttgacaacgttcccaggaaaaaggcaaaatttcagaattggatgaagaacagtttaaaagttcataatgaatccattctggaccaggtgtggaatatcttttctgaagcttccaacagcgaaccagtcaataaggaacaggatcaacggccactccacccagtggcaaatccacatgcagaaatctccaccaaggttccagcctccaaagtgaaagacgccgtggaacagcaaggggaggtgaagaagaataaaagagaaagaaaggaagaacggcagaagaaaaggaaaagagaaaagaaagaactaaagttagaaaaccaccaggaaaactcaaggaatcagaagcctaagaagcgcaaaaagggacaggaggctgaccttgaggctggtggggaggaagtccctgaggccaatggctctgcagggaagaggagcaagaagaagaagcagcgcaaggacagcgccagtgaggaagaggcacgcgtgggcgcagggaagaggaagcggaggcactcggaagttgaaacagattctaagaagaaaaagatgaagctcccagagcatcctgagggcggagaaccagaagacgatgaggctcctgcaaaaggtaaattcaactggaagggaactattaaagcaattctgaaacaggccccagacaatgaaataaccatcaaaaagctaaggaaaaaggttttagctcagtactacacagtgacagatgagcatcacagatccgaagaggaactcctggtcatctttaacaagaaaatcagcaagaaccctacctttaagttattaaaggacaaagtcaagcttgtgaaatgaacatttgtgtatttaaaaattgaatccattctgctgacttcttcctttcactgctgtttataaaatgtgtaatgaattctaacaactcaaattttgctttttgaagctgtatttttaagttaagaaaatatatttttggtataacttttatgagaaaaataaaatatattctggtccaaacttctaaa

SEQ ID NO: 149833 - DNA, 1468 bp, Homo sapiens
  Payload ID: 9599
  Gene Symbol: LYAR
  Gene Name: Ly1 antibody reactive
  Uniprot ID: Q9NX58
  ENST ID: ENST00000452476
  CDS Start-End: 144-1283
cccagaggtccgacctgggaggctggggctcagagagcaatgtttgctgtcttccattggagtgactgaatttctacatgacggctttttgacaagacttaaaacctgtcttggatagagaatatttagccatttacctaaaaatggtattttttacatgcaatgcatgtggtgaatcagtgaagaaaatacaagtggaaaagcatgtgtctgtttgcagaaactgtgaatgcctttcttgcattgactgcggtaaagatttctggggcgatgactataaaaaccacgtgaaatgcataagtgaagatcagaagtatggtggcaaaggctatgaaggtaaaacccacaaaggcgacatcaaacagcaggcgtggattcagaaaattagtgaattaataaagagacccaatgtcagccccaaagtgagagaacttttagagcaaattagtgcttttgacaacgttcccaggaaaaaggcaaaatttcagaattggatgaagaacagtttaaaagttcataatgaatccattctggaccaggtgtggaatatcttttctgaagcttccaacagcgaaccagtcaataaggaacaggatcaacggccactccacccagtggcaaatccacatgcagaaatctccaccaaggttccagcctccaaagtgaaagacgccgtggaacagcaaggggaggtgaagaagaataaaagagaaagaaaggaagaacggcagaagaaaaggaaaagagaaaagaaagaactaaagttagaaaaccaccaggaaaactcaaggaatcagaagcctaagaagcgcaaaaagggacaggaggctgaccttgaggctggtggggaggaagtccctgaggccaatggctctgcagggaagaggagcaagaagaagaagcagcgcaaggacagcgccagtgaggaagaggcacgcgtgggcgcagggaagaggaagcggaggcactcggaagttgaaacagattctaagaagaaaaagatgaagctcccagagcatcctgagggcggagaaccagaagacgatgaggctcctgcaaaaggtaaattcaactggaagggaactattaaagcaattctgaaacaggccccagacaatgaaataaccatcaaaaagctaaggaaaaaggttttagctcagtactacacagtgacagatgagcatcacagatccgaagaggaactcctggtcatctttaacaagaaaatcagcaagaaccctacctttaagttattaaaggacaaagtcaagcttgtgaaatgaacatttgtgtatttaaaaattgaatccattctgctgacttcttcctttcactgctgtttataaaatgtgtaatgaattctaacaactcaaattttgctttttgaagctgtatttttaagttaagaaaatatatttttggtataacttttatgagaaaaataaaatatattctggtccaaacttct

SEQ ID NO: 149834 - DNA, 780 bp, Homo sapiens
  Payload ID: 9599
  Gene Symbol: LYAR
  Gene Name: Ly1 antibody reactive
  ENST ID: ENST00000513174
  CDS Start-End: 544-780
gaggtgaggggtggtggcccagaggtccgacctgggaggctggggctcagagagtgagtaggggagggacgggatttccaccgtcagcccctctgggttacgcatggaggaaggagttccattcagatctcactcctgctctggggaagtggcaggagtcctggacttagggtgaccaactcgttttagttttaaaacttaaggtccggcgtcctgggaactccctcgggcctggccaaaccaggacgattggtcaccgcccgactgggcttcaggcttgctgcatgttggagacagggctcttctctgagccttgggagatcagtccctaaagaggaggccttaggatgtagcggtccagagcacatacttaggatcagaataactactgcgtgtgaatctgggttgccactacctggatgtgggatgacctggtgcaatgtttgctgtcttccattggagtgactgaatttctacatgacggctttttgacaagacttaaaacctgtcttggatagagaatatttagccatttacctaaaaatggtattttttacatgcaatgcatgtggtgaatcagtgaagaaaatacaagtggaaaagcatgtgtctgtttgcagaaactgtgaatgcctttcttgcattgactgcggtaaagatttctggggcgatgactataaaaaccacgtgaaatgcataagtgaagatcagaagtatggtggcaaaggctatgaaggtaaaacccacaaaggcgacatcaaacagcaggcgtggattcag

SEQ ID NO: 149835 - DNA, 599 bp, Homo sapiens
  Payload ID: 9600
  Gene Symbol: LYNX1
  Gene Name: Ly6/neurotoxin 1
  Uniprot ID: Q9BZG9
  ENST ID: ENST00000317543
  CDS Start-End: 39-332
cggccagggcgccgacagcccgacctcaccaggagaacatgcagctcggcactgggctcctgctggccgccgtcctgagcctgcagctggctgcagccgaagccatatggtgtcaccagtgcacgggcttcggagggtgctcccatggatccagatgcctgagggactccacccactgtgtcaccactgccacccgggtcctcagcaacaccgaggatttgcctctggtcaccaagatgtgccacataggctgccccgatatccccagcctgggcctgggcccctacgtatccatcgcttgctgccagaccagcctctgcaaccatgactgacggctgccctcctccaggcccccggacgctcagcccccacagcccccacagcctggcgccagggctcacagctgcccctccctcgagactggccagcccacctctcccggcctctgcagccaccgtccagcaccgcttgtcctagggaagtcctgcgtggagtcttgcctcaatctgctgccgtccaagcctggggcccatcgtgcctgccgccccttcaggtcccgacctccccacaataaaatgtgattggatcgtgtggtacaa

SEQ ID NO: 149836 - DNA, 373 bp, Homo sapiens
  Payload ID: 9600
  Gene Symbol: LYNX1
  Gene Name: Ly6/neurotoxin 1
  ENST ID: ENST00000521396
  CDS Start-End: 1-264
ctgctggccgccgtcctgagcctgcagctggctgcagccgaagccatatggtgtcaccagtgcacgggcttcggagggtgctcccatggatccagatgcctgagggactccacccactgtgtcaccactgccacccgcccccggacgctcagcccccacagcccccacagcctggcgccagggctcacagctgcccctccctcgagactggccagcccacctctcccggcctctgcagccaccgtccagcaccgcttgtcctagggaagtcctgcgtggagtcttgcctcaatctgctgccgtccaagcctggggcccatcgtgcctgccgccccttcaggtcccgacctccccacaataaaatgtgattgga

SEQ ID NO: 149837 - DNA, 600 bp, Homo sapiens
  Payload ID: 9600
  Gene Symbol: LYNX1
  Gene Name: Ly6/neurotoxin 1
  ENST ID: ENST00000523332
  CDS Start-End: 65-313
agttggatccagggctagctgctgttgacctccccactcccacgctgccctcctgcctgcagccatgacgcccctgctcaccctgatcctggtggtcctcatgggcttacctctggcccaggccttggactgccacgtgtgtgcctacaacggagacaactgcttcaaccccatgcgctgcccggctatggttgcctactgcatgaccacgcgcacctactacacccccaccaggatgaagctgcagccgaagccatatggtgtcaccagtgcacgggcttcggagggtgctcccatggatccagatgcctgagggactccacccactgtgtcaccactgccacccgcccccggacgctcagcccccacagcccccacagcctggcgccagggctcacagctgcccctccctcgagactggccagcccacctctcccggcctctgcagccaccgtccagcaccgcttgtcctagggaagtcctgcgtggagtcttgcctcaatctgctgccgtccaagcctggggcccatcgtgcctgccgccccttcaggtcccgacctccccacaataaaatgtgattggatcgtgtggtacaagcta

SEQ ID NO: 149838 - DNA, 4708 bp, Homo sapiens
  Payload ID: 9600
  Gene Symbol: LYNX1
  Gene Name: Ly6/neurotoxin 1
  Uniprot ID: Q9BZG9
  ENST ID: ENST00000614491
  CDS Start-End: 388-738
ggggccggggcaggcctggggcggggcctgcggtgagctcgcgctgggcgggctgttccgggggcgggactgggctgggcctgcggtgagcatcaggcgatgcggcacgggtgctgcgggacacacagacacgcctacgattagactcaggcaggcacctaccggcgagcggccgcgggtgactcccaggcgcggcggtacctcacggtggtgaaggtcacagggttgcagcactcccagtagaccaggagctccgggaggcagggccggccccacgtcctctgcgcaccaccctgagttggatcctctgtgcgccacccctgagttggatccagggctagctgctgttgacctccccactcccacgctgccctcctgcctgcagccatgacgcccctgctcaccctgatcctggtggtcctcatgggcttacctctggcccaggccttggactgccacgtgtgtgcctacaacggagacaactgcttcaaccccatgcgctgcccggctatggttgcctactgcatgaccacgcgcacctactacacccccaccaggatgaaggtcagtaagtcctgcgtgccccgctgcttcgagactgtgtatgatggctactccaagcacgcgtccaccacctcctgctgccagtacgacctctgcaacggcaccggccttgccaccccggccaccctggccctggcccccatcctcctggccaccctctggggtctcctctaaagcccccgaggcagacccactcaagaacaaagctctcgagacacactgctacaccctcgcacccagctcaccctgcctcaccctccacactccctgcgacctcctcagccatgcccagggtcaggactgtgggcaagaagacacccgacctcccccaaccaccacacgacctcacttcgaggccttgacctttcgatgctgtgtgggatcccaaaagtgtccggctttgatgggctgatcagcccctcgcctgtccagggctatttatggggaggggcccagtcaggcagggagcactgagcagatgggagctgtggccaagcccaccttctgggaagccctaggagaggcccctgcctcagtctgcccctggtgtgctggggcagggggaagacaaggaatgcccgcaggtggggtggtggggagactcttaggaggaaaggctcctccaggcctagtcacgcttcctactgaggccaggagctgccaggaccggtacgggatcagggctgtgggaggagggcctttggcaccggcccctgtgctaggaagtctgccaggcccgagttggagccaccccctgcaggggagggggcggctctgcctcagcaggccccagggcccccgaagtcacagaagctttttcgggtccagcaaggggtgtgtgtcctctcagtcaaaccccttgacgtttcccaccccctcacggggagggcaccaggcctgaagctggcaggagctagggccatgctatatttggtgggtcctggacgctgacccggccagcgctattctgggcagggagggaaaggggcagagcaggtggtcccccgagtcctggtccccaaccacagcaggacccagccgagcaaggcaaaagacgcaggactgggggatgcgcgcacaggctgggggttgggagcagcctggggccggcgcgggcctgggcgtgggaaggcggagcatgccaccctctcgtggccgtgcgggggcgggagtggggagggtggggtggggagggcggagacccagcccctcccccgcagcgggatgcgcacagtgagtgggtccctccatcaccttccacctggggatgcacccactgggagggcagggtggaagccccagctgggtgtgtggactcccagggaccccaccccaggcctgggaagcaggggtcagcccaacacgcaccaatccatccccgatgcaggtagcccagggagcacctgcccctgctgtgaatggggcattcgggggcgtgagaccttttggtgccagcggtcacgctgcacctgaggcccccacctgaccagtgctcccagctctggtgtcctgagaaacccttcaagccatcccgcatgggcaggatggtgacatatccatgtggtaggattgtcccggccccaaagtatggccctggtcaggggagcccctgctggaaattgcatctccagagctttgatgcaggacccctgggggatcagggaatgagggtctccaccccaggggtctccttgcagtgagtctatatgcaggcctgcgttctgctcctggggctggttctgagtgcccagcttcagtctcctgagaacatgaggatgggagggggcagagtcttgctgagggcacacccagttcccgctggaggaggacagtgccagtcttctgcaaagggaccttgggtgggaacgggcccggagcgggaggaacgtgactccccagagggaagatgggcatcatactgggcccagagctgggaaggagttgctgccagcacagggtgggcctggactcccctcgcccctacccccagtggttgtggctgtagccctaagcctggagagcaggaccggcccggggtgtctgggaggctgccaggtgcctcccagagctcccaagggcccccacctgcaagtgccagcctcagggcagtgcccaaatgaggccctctcagctgcagccagcgatgccttgggatgcttaccgggagggaggcggctttgggctcctaagtccttgggagaggctgggagcagtcactgcgcggcttgcgcaagcccattgtcgggttgggtggcttcctcagccagggctgggagggactccaggatcaggtcctccctgtctcgagtctcagtggggtgatggggaggagacctggccacccatggctcaggggcagctgagaacaaggacctgctggagctggaagtgctgtggtgttgaggggtggggtgggcagcttctcacacctgcctcctgcctccttctgtccacctttccaccaccctgacctgtcccagccccacacatggttctgcctggctggcctgcccttggcacctggcgtagagcacacagaaggcactcagctaatgctgggcaggcccactcatggggagtgcgtggctgtgcagcaccagggaaccggcacagcagcgccggcagaaatcacagcagtaaacttgtccgggttgtatgcatcaaggtggcgatggacgtgggtccccccactgcactgtggccctgagcactgtatagcagcccggcaatgggagccattatcttgcccctttgacagaggaggacacagaggcacagggaggtgaagtagctgccccacactagtgcctcctcgctcactcaccaccccctgcaccacagtgcagccgcttctcccaccagctggggttccttggacccccaagcctgggaagggggaggtgagtttacaaaatggaaagcttaaaaggagaaaagtggaaccagaggtttgagaagccctgagtggtagagtaaggcctccagcgctgcctctgggtgcagggcagagtggcagaggagagggggagaggcactgggcaccatgggggcccagttcccacttcggggatctctctcgcagaaccgagggtccccttcatgggggtagatgcccagggctagctgttgccactgtctgtgtggacctgagtcctggacatgcccgagtgactcaggagtggctgcttgggcgggctctgtcaccctaggatgttatacattctgggaactggacaggagtggctgcttgggcgggctctggcaccctgggatgttatacattctgggaactggacaggagtggctgcttgggtgggctctggcaccctgggatgttatacattctgggaactgcaatcagccactagagaagtcggagctacaggaagtgaccctggggtgggacctggggacatggccaggtcagcatggggacacccggctccagcaggagctctggtctgtcctggggtctttgggggcagggctgcggccctgggcaggcttcctccaggcggaggtcctggggaagtgggggagccaggccagctgccgcctcccccactatgtagcatctgattcgtcatctctcatgaaggcgatttggttcataactctgaaactctgaaaaaggtcaaaagaagcagagaggccctcggtggatatgccagcttttctgccggtgctttctcccactactctgggtggtctgctctcctcttcaaacctcagctcgcagggagggcctgaatctgccagcccctcaggatctccttccctctgggccctccccagccttaaggagcctcccagacagaagggtggacagagccacctgggcagcccgagagacacacgggggtcctccctgtggacagccctgccagcttccgcccagccctgagcttcatttgcatcttgaggagtaaggggtggtgaaatgggaatgctggtctggctcagctggtcgtgggcataagtgcccgctgaatggatggcatctctccctcctgtcttatgttctggggtccaggtgcttcccagggccatgcccctgctgctaatgcttgccctaacccttaccctaaccagcgtccagcgtcgtctcaccgagccgtaaataaatcaacagattcgcattgtc

SEQ ID NO: 149839 - DNA, 4537 bp, Homo sapiens
  Payload ID: 9600
  Gene Symbol: LYNX1
  Gene Name: Ly6/neurotoxin 1
  Uniprot ID: Q9BZG9
  ENST ID: ENST00000621401
  CDS Start-End: 217-567
ggctgccgcgggacgcggtgaagatagcctgcggagtgtccgggctgaacacggttgcagcactcccagtagaccaggagctccgggaggcagggccggccccacgtcctctgcgcaccaccctgagttggatcctctgtgcgccacccctgagttggatccagggctagctgctgttgacctccccactcccacgctgccctcctgcctgcagccatgacgcccctgctcaccctgatcctggtggtcctcatgggcttacctctggcccaggccttggactgccacgtgtgtgcctacaacggagacaactgcttcaaccccatgcgctgcccggctatggttgcctactgcatgaccacgcgcacctactacacccccaccaggatgaaggtcagtaagtcctgcgtgccccgctgcttcgagactgtgtatgatggctactccaagcacgcgtccaccacctcctgctgccagtacgacctctgcaacggcaccggccttgccaccccggccaccctggccctggcccccatcctcctggccaccctctggggtctcctctaaagcccccgaggcagacccactcaagaacaaagctctcgagacacactgctacaccctcgcacccagctcaccctgcctcaccctccacactccctgcgacctcctcagccatgcccagggtcaggactgtgggcaagaagacacccgacctcccccaaccaccacacgacctcacttcgaggccttgacctttcgatgctgtgtgggatcccaaaagtgtccggctttgatgggctgatcagcccctcgcctgtccagggctatttatggggaggggcccagtcaggcagggagcactgagcagatgggagctgtggccaagcccaccttctgggaagccctaggagaggcccctgcctcagtctgcccctggtgtgctggggcagggggaagacaaggaatgcccgcaggtggggtggtggggagactcttaggaggaaaggctcctccaggcctagtcacgcttcctactgaggccaggagctgccaggaccggtacgggatcagggctgtgggaggagggcctttggcaccggcccctgtgctaggaagtctgccaggcccgagttggagccaccccctgcaggggagggggcggctctgcctcagcaggccccagggcccccgaagtcacagaagctttttcgggtccagcaaggggtgtgtgtcctctcagtcaaaccccttgacgtttcccaccccctcacggggagggcaccaggcctgaagctggcaggagctagggccatgctatatttggtgggtcctggacgctgacccggccagcgctattctgggcagggagggaaaggggcagagcaggtggtcccccgagtcctggtccccaaccacagcaggacccagccgagcaaggcaaaagacgcaggactgggggatgcgcgcacaggctgggggttgggagcagcctggggccggcgcgggcctgggcgtgggaaggcggagcatgccaccctctcgtggccgtgcgggggcgggagtggggagggtggggtggggagggcggagacccagcccctcccccgcagcgggatgcgcacagtgagtgggtccctccatcaccttccacctggggatgcacccactgggagggcagggtggaagccccagctgggtgtgtggactcccagggaccccaccccaggcctgggaagcaggggtcagcccaacacgcaccaatccatccccgatgcaggtagcccagggagcacctgcccctgctgtgaatggggcattcgggggcgtgagaccttttggtgccagcggtcacgctgcacctgaggcccccacctgaccagtgctcccagctctggtgtcctgagaaacccttcaagccatcccgcatgggcaggatggtgacatatccatgtggtaggattgtcccggccccaaagtatggccctggtcaggggagcccctgctggaaattgcatctccagagctttgatgcaggacccctgggggatcagggaatgagggtctccaccccaggggtctccttgcagtgagtctatatgcaggcctgcgttctgctcctggggctggttctgagtgcccagcttcagtctcctgagaacatgaggatgggagggggcagagtcttgctgagggcacacccagttcccgctggaggaggacagtgccagtcttctgcaaagggaccttgggtgggaacgggcccggagcgggaggaacgtgactccccagagggaagatgggcatcatactgggcccagagctgggaaggagttgctgccagcacagggtgggcctggactcccctcgcccctacccccagtggttgtggctgtagccctaagcctggagagcaggaccggcccggggtgtctgggaggctgccaggtgcctcccagagctcccaagggcccccacctgcaagtgccagcctcagggcagtgcccaaatgaggccctctcagctgcagccagcgatgccttgggatgcttaccgggagggaggcggctttgggctcctaagtccttgggagaggctgggagcagtcactgcgcggcttgcgcaagcccattgtcgggttgggtggcttcctcagccagggctgggagggactccaggatcaggtcctccctgtctcgagtctcagtggggtgatggggaggagacctggccacccatggctcaggggcagctgagaacaaggacctgctggagctggaagtgctgtggtgttgaggggtggggtgggcagcttctcacacctgcctcctgcctccttctgtccacctttccaccaccctgacctgtcccagccccacacatggttctgcctggctggcctgcccttggcacctggcgtagagcacacagaaggcactcagctaatgctgggcaggcccactcatggggagtgcgtggctgtgcagcaccagggaaccggcacagcagcgccggcagaaatcacagcagtaaacttgtccgggttgtatgcatcaaggtggcgatggacgtgggtccccccactgcactgtggccctgagcactgtatagcagcccggcaatgggagccattatcttgcccctttgacagaggaggacacagaggcacagggaggtgaagtagctgccccacactagtgcctcctcgctcactcaccaccccctgcaccacagtgcagccgcttctcccaccagctggggttccttggacccccaagcctgggaagggggaggtgagtttacaaaatggaaagcttaaaaggagaaaagtggaaccagaggtttgagaagccctgagtggtagagtaaggcctccagcgctgcctctgggtgcagggcagagtggcagaggagagggggagaggcactgggcaccatgggggcccagttcccacttcggggatctctctcgcagaaccgagggtccccttcatgggggtagatgcccagggctagctgttgccactgtctgtgtggacctgagtcctggacatgcccgagtgactcaggagtggctgcttgggcgggctctgtcaccctaggatgttatacattctgggaactggacaggagtggctgcttgggcgggctctggcaccctgggatgttatacattctgggaactggacaggagtggctgcttgggtgggctctggcaccctgggatgttatacattctgggaactgcaatcagccactagagaagtcggagctacaggaagtgaccctggggtgggacctggggacatggccaggtcagcatggggacacccggctccagcaggagctctggtctgtcctggggtctttgggggcagggctgcggccctgggcaggcttcctccaggcggaggtcctggggaagtgggggagccaggccagctgccgcctcccccactatgtagcatctgattcgtcatctctcatgaaggcgatttggttcataactctgaaactctgaaaaaggtcaaaagaagcagagaggccctcggtggatatgccagcttttctgccggtgctttctcccactactctgggtggtctgctctcctcttcaaacctcagctcgcagggagggcctgaatctgccagcccctcaggatctccttccctctgggccctccccagccttaaggagcctcccagacagaagggtggacagagccacctgggcagcccgagagacacacgggggtcctccctgtggacagccctgccagcttccgcccagccctgagcttcatttgcatcttgaggagtaaggggtggtgaaatgggaatgctggtctggctcagctggtcgtgggcataagtgcccgctgaatggatggcatctctccctcctgtcttatgttctggggtccaggtgcttcccagggccatgcccctgctgctaatgcttgccctaacccttaccctaaccagcgtccagcgtcgtctcaccgagccgtaaataaatcaacagattcgcattgtc

SEQ ID NO: 149840 - DNA, 868 bp, Homo sapiens
  Payload ID: 9600
  Gene Symbol: LYNX1
  Gene Name: Ly6/neurotoxin 1
  Uniprot ID: Q9BZG9
  ENST ID: ENST00000620006
  CDS Start-End: 274-624
gagggggttgggaagctcgaagccgcaggcctgactctggcctttggcatcctggggttggcctgggcaaatgtgtcgtgagagacggatttgttgttctcgggaaggcggttgcagcactcccagtagaccaggagctccgggaggcagggccggccccacgtcctctgcgcaccaccctgagttggatcctctgtgcgccacccctgagttggatccagggctagctgctgttgacctccccactcccacgctgccctcctgcctgcagccatgacgcccctgctcaccctgatcctggtggtcctcatgggcttacctctggcccaggccttggactgccacgtgtgtgcctacaacggagacaactgcttcaaccccatgcgctgcccggctatggttgcctactgcatgaccacgcgcacctactacacccccaccaggatgaaggtcagtaagtcctgcgtgccccgctgcttcgagactgtgtatgatggctactccaagcacgcgtccaccacctcctgctgccagtacgacctctgcaacggcaccggccttgccaccccggccaccctggccctggcccccatcctcctggccaccctctggggtctcctctaaagcccccgaggcagacccactcaagaacaaagctctcgagacacactgctacaccctcgcacccagctcaccctgcctcaccctccacactccctgcgacctcctcagccatgcccagggtcaggactgtgggcaagaagacacccgacctcccccaaccaccacacgacctcacttcgaggccttgacctttcgatgctgtgtgggatcccaaaagtgtccggctttgatgggctgatcagcc

SEQ ID NO: 149841 - DNA, 1293 bp, Homo sapiens
  Payload ID: 9600
  Gene Symbol: LYNX1
  Gene Name: Ly6/neurotoxin 1
  Uniprot ID: Q9BZG9
  ENST ID: ENST00000615007
  CDS Start-End: 631-1026
tttagggtagaagaaaaggttttatttttctttctcacattggaaaaaatgaaaactttcggacccatgaaattttattacattttgccaaaaacagaaccaataacataagtattcaaagttatgtaaagataattatttaatatgaacattatgatggtgagagggaccacggagcaaggggctgccttgcaggcctgccttccagctttgctacagggaccagaagcgggagctgagcgcaggggaggcaggcggaggccatgggcagcgaggcgggtgcgccaaagggcgccagttccggagctgctgggcctgggctgcaggagggcggagctggggccgcaaggctggtgccggccgacaaacgacgcggcgcgggcgagtgggcggaggcggctgcggggaaggctgggctgccgcgggacgcggtgaagatagcctgcggagtgtccgggctgaacacggttgcagcactcccagtagaccaggagctccgggaggcagggccggccccacgtcctctgcgcaccaccctgagttggatcctctgtgcgccacccctgagttggatccagggctagctgctgttgacctccccactcccacgctgccctcctgcctgcagccatgacgcccctgctcaccctgatcctggtggtcctcatgggcttacctctggcccaggccttggactgccacgtgtgtgcctacaacggagacaactgcttcaaccccatgcgctgcccggctatggttgcctactgcatgaccacgcgcacctctgcagccgaagccatatggtgtcaccagtgcacgggcttcggagggtgctcccatggatccagatgcctgagggactccacccactgtgtcaccactgccacccgggtcctcagcaacaccgaggatttgcctctggtcaccaagatgtgccacataggctgccccgatatccccagcctgggcctgggcccctacgtatccatcgcttgctgccagaccagcctctgcaaccatgactgacggctgccctcctccaggcccccggacgctcagcccccacagcccccacagcctggcgccagggctcacagctgcccctccctcgagactggccagcccacctctcccggcctctgcagccaccgtccagcaccgcttgtcctagggaagtcctgcgtggagtcttgcctcaatctgctgccgtccaagcctggggcccatcgtgcctgccgccccttcaggtcccgacctccccacaataaaatgtgattggatcgtgtggtacaa

SEQ ID NO: 149842 - DNA, 639 bp, Homo sapiens
  Payload ID: 9600
  Gene Symbol: LYNX1
  Gene Name: Ly6/neurotoxin 1
  ENST ID: ENST00000613110
  CDS Start-End: 388-639
ggggccggggcaggcctggggcggggcctgcggtgagctcgcgctgggcgggctgttccgggggcgggactgggctgggcctgcggtgagcatcaggcgatgcggcacgggtgctgcgggacacacagacacgcctacgattagactcaggcaggcacctaccggcgagcggccgcgggtgactcccaggcgcggcggtacctcacggtggtgaaggtcacagggttgcagcactcccagtagaccaggagctccgggaggcagggccggccccacgtcctctgcgcaccaccctgagttggatcctctgtgcgccacccctgagttggatccagggctagctgctgttgacctccccactcccacgctgccctcctgcctgcagccatgacgcccctgctcaccctgatcctggtggtcctcatgggcttacctctggcccaggccttggactgccacgtgtgtgcctacaacggagacaactgcttcaaccccatgcgctgcccggctatggttgcctactgcatgaccacgcgcacctactacacccccaccaggatgaaggtcagtaagtcctgcgtgccccgctgcttcgagactgtgtatgatggctactccaagcacgcgtccaccacctcc

SEQ ID NO: 149843 - DNA, 563 bp, Homo sapiens
  Payload ID: 9600
  Gene Symbol: LYNX1
  Gene Name: Ly6/neurotoxin 1
  ENST ID: ENST00000614268
  CDS Start-End: 318-563
gacaccccaggagcagagaggaggggaacagcgagaagagacccagcttttgggcccagtcctgccatggccagccatccggcccccagggccctgcttgggatggggctgcagaccacctcccatgggacctctgcaccaaccatcccctggggttgcagcactcccagtagaccaggagctccgggaggcagggccggccccacgtcctctgcgcaccaccctgagttggatcctctgtgcgccacccctgagttggatccagggctagctgctgttgacctccccactcccacgctgccctcctgcctgcagccatgacgcccctgctcaccctgatcctggtggtcctcatgggcttacctctggcccaggccttggactgccacgtgtgtgcctacaacggagacaactgcttcaaccccatgcgctgcccggctatggttgcctactgcatgaccacgcgcacctactacacccccaccaggatgaaggtcagtaagtcctgcgtgccccgctgcttcgagactgtgtatgatggctactccaagcacgcgtccacc

SEQ ID NO: 149844 - DNA, 1033 bp, Homo sapiens
  Payload ID: 9601
  Gene Symbol: LYPD1
  Gene Name: LY6/PLAUR domain containing 1
  Uniprot ID: Q8N2G4
  ENST ID: ENST00000345008
  CDS Start-End: 506-775
gaaatgaaagaagggggagagggagggagggagggagagaaggagcctgaggcagatatggaacgatctctgcagaggaattacaaagaaagtcatttaagcccctttacagaccagctctgctgggaggatgcagaaataaatgatcagcgtcccggcgtgagagagctgcccccagaagtggccgggggagaaaagggtgaagaggagctaaagcttaggaggcgatttccacggaaatggatgctccctaaggatgtgcggaaaggggatgggaatgtgcggattgggggcgggggcaccaacgcactccggcgggcaagcggtctcccgcaccacctgctgcaaggctcgggaaggaaggcgaagatagcaccggggcatccccgggagtccgcaaggctttgcgctgcaaatccagtgctaccagtgtgaagaattccagctgaacaacgactgctcctcccccgagttcattgtgaattgcacggtgaacgttcaagacatgtgtcagaaagaagtgatggagcaaagtgccgggatcatgtaccgcaagtcctgtgcatcatcagcggcctgtctcatcgcctctgccgggtaccagtccttctgctccccagggaaactgaactcagtttgcatcagctgctgcaacacccctctttgtaacgggccaaggcccaagaaaaggggaagttctgcctcggccctcaggccagggctccgcaccaccatcctgttcctcaaattagccctcttctcggcacactgctgaagctgaaggagatgccaccccctcctgcattgttcttccagccctcgcccccaaccccccacctccctgagtgagtttcttctgggtgtccttttattctgggtagggagcgggagtccgtgttctcttttgttcctgtgcaaataatgaaagagctcggtaaagcattctgaataaattcagcctgactgaattttcagtatgtacttgaaggaaggaggtggagtgaaagttcacccccatgtctgtgtaaccgga

SEQ ID NO: 149845 - DNA, 1891 bp, Homo sapiens
  Payload ID: 9601
  Gene Symbol: LYPD1
  Gene Name: LY6/PLAUR domain containing 1
  Uniprot ID: Q8N2G4
  ENST ID: ENST00000397463
  CDS Start-End: 274-699
ccttcagtctcagccgccaactccggaggcgcggtgctcggcccgggagcgcgagcgggaggagcagagacccgcagccgggagcccgagcgcgggcgatgcaggctccgcgagcggcacctgcggctcctctaagctacgaccgtcgtctccgcggcagcagcgcgggccccagcagcctcggcagccacagccgctgcagccggggcagcctccgctgctgtcgcctcctctgatgcgcttgccctctcccggccccgggactccgggagaatgtgggtcctaggcatcgcggcaactttttgcggattgttcttgcttccaggctttgcgctgcaaatccagtgctaccagtgtgaagaattccagctgaacaacgactgctcctcccccgagttcattgtgaattgcacggtgaacgttcaagacatgtgtcagaaagaagtgatggagcaaagtgccgggatcatgtaccgcaagtcctgtgcatcatcagcggcctgtctcatcgcctctgccgggtaccagtccttctgctccccagggaaactgaactcagtttgcatcagctgctgcaacacccctctttgtaacgggccaaggcccaagaaaaggggaagttctgcctcggccctcaggccagggctccgcaccaccatcctgttcctcaaattagccctcttctcggcacactgctgaagctgaaggagatgccaccccctcctgcattgttcttccagccctcgcccccaaccccccacctccctgagtgagtttcttctgggtgtccttttattctgggtagggagcgggagtccgtgttctcttttgttcctgtgcaaataatgaaagagctcggtaaagcattctgaataaattcagcctgactgaattttcagtatgtacttgaaggaaggaggtggagtgaaagttcacccccatgtctgtgtaaccggagtcaaggccaggctggcagagtcagtccttagaagtcactgaggtgggcatctgccttttgtaaagcctccagtgtccattccatccctgatgggggcatagtttgagactgcagagtgagagtgacgttttcttagggctggagggccagttcccactcaaggctccctcgcttgacattcaaacttcatgctcctgaaaaccattctctgcagcagaattggctggtttcgcgcctgagttgggctctagtgactcgagactcaatgactgggacttagactggggctcggcctcgctctgaaaagtgcttaagaaaatcttctcagttctccttgcagaggactggcgccgggacgcgaagagcaacgggcgctgcacaaagcgggcgctgtcggtggtggagtgcgcatgtacgcgcaggcgcttctcgtggttggcgtgctgcagcgacaggcggcagcacagcacctgcacgaacacccgccgaaactgctgcgaggacaccgtgtacaggagcgggttgatgaccgagctgaggtagaaaaacgtctccgagaaggggaggaggatcatgtacgcccggaagtaggacctcgtccagtcgtgcttgggtttggccgcagccatgatcctccgaatctggttgggcatccagcatacggccaatgtcacaacaatcagccctgggcagacacgagcaggagggagagacagagaaaagaaaaacacagcatgagaacacagtaaatgaataaaaccataaaatatttagcccctctgttctgtgcttactggccaggaaatggtaccaatttttcagtgttggacttgacagcttcttttgccacaagcaagagagaatttaacactgtttcaaacccgggggagttggctgtgttaaagaaagaccattaaatgctttagacagtgt

SEQ ID NO: 149846 - DNA, 578 bp, Homo sapiens
  Payload ID: 9601
  Gene Symbol: LYPD1
  Gene Name: LY6/PLAUR domain containing 1
  ENST ID: ENST00000449209
  CDS Start-End: 269-388
agtctcagccgccaactccggaggcgcggtgctcggcccgggagcgcgagcgggaggagcagagacccgcagccgggagcccgagcgcgggcgatgcaggctccgcgagcggcacctgcggctcctctaagctacgaccgtcgtctccgcggcagcagcgcgggccccagcagcctcggcagccacagccgctgcagccggggcagcctccgctgctgtcgcctcctctgatgcgcttgccctctcccggccccgggactccgggagaatgtgggtcctaggcatcgcggcaactttttgcggattgttcttgcttccaggtgagaatacccagaggccagcagccgaggccaggctttgcgctgcaaatccagtgctaccagtgtgaagaattccagctgaacaacgactgctcctcccccgagttcattgtgaattgcacggtgaacgttcaagacatgtgtcagaaagaagtgatggagcaaagtgccgacactaaaagaacaaacaccttgctcttcgagatgagacattttgccaagcagttgaccacttagttctcaagaagcaactatctc

SEQ ID NO: 149847 - DNA, 594 bp, Homo sapiens
  Payload ID: 9602
  Gene Symbol: LYPD2
  Gene Name: LY6/PLAUR domain containing 2
  Uniprot ID: Q6UXB3
  ENST ID: ENST00000359228
  CDS Start-End: 84-461
ccagtctgtcgccacctcacttggtgtctgctgtccccgccaggcaagcctggggtgagagcacagaggagtgggccgggaccatgcgggggacgcggctggcgctcctggcgctggtgctggctgcctgcggagagctggcgccggccctgcgctgctacgtctgtccggagcccacaggagtgtcggactgtgtcaccatcgccacctgcaccaccaacgaaaccatgtgcaagaccacactctactcccgggagatagtgtaccccttccagggggactccacggtgaccaagtcctgtgccagcaagtgtaagccctcggatgtggatggcatcggccagaccctgcccgtgtcctgctgcaatactgagctgtgcaatgtagacggggcgcccgctctgaacagcctccactgcggggccctcacgctcctcccactcttgagcctccgactgtagagtccccgcccacccccatggccctatgcggcccagccccgaatgccttgaagaagtgccccctgcaccaggactcctgagtctcctttctgggcacagacctgccctgctgcatctctgacctcgtcgatgt

SEQ ID NO: 149848 - DNA, 1694 bp, Homo sapiens
  Payload ID: 9603
  Gene Symbol: LYPD3
  Gene Name: LY6/PLAUR domain containing 3
  Uniprot ID: O95274
  ENST ID: ENST00000244333
  CDS Start-End: 90-1130
gcgaggttactcatcctgggctcaggtaagagggcccgagctcggaggcggcacatccaggggggacgccaagggagcaggacggagccatggaccccgccaggaaagcaggtgcccaggccatgatctggactgcaggctggctgctgctgctgctgcttcgcggaggagcgcaggccctggagtgctacagctgcgtgcagaaagcagatgacggatgctccccgaacaagatgaagacagtgaagtgcgcgccgggcgtggacgtctgcaccgaggccgtgggggcggtggagaccatccacggacaattctcgctggcagtgcggggttgcggttcgggactccccggcaagaatgaccgcggcctggatcttcacgggcttctggcgttcatccagctgcagcaatgcgctcaggatcgctgcaacgccaagctcaacctcacctcgcgggcgctcgacccggcaggtaatgagagtgcatacccgcccaacggcgtggagtgctacagctgtgtgggcctgagccgggaggcgtgccagggtacatcgccgccggtcgtgagctgctacaacgccagcgatcatgtctacaagggctgcttcgacggcaacgtcaccttgacggcagctaatgtgactgtgtccttgcctgtccggggctgtgtccaggatgaattctgcactcgggatggagtaacaggcccagggttcacgctcagtggctcctgttgccaggggtcccgctgtaactctgacctccgcaacaagacctacttctcccctcgaatcccaccccttgtccggctgccccctccagagcccacgactgtggcctcaaccacatctgtcaccacttctacctcggccccagtgagacccacatccaccaccaaacccatgccagcgccaaccagtcagactccgagacagggagtagaacacgaggcctcccgggatgaggagcccaggttgactggaggcgccgctggccaccaggaccgcagcaattcagggcagtatcctgcaaaaggggggccccagcagccccataataaaggctgtgtggctcccacagctggattggcagcccttctgttggccgtggctgctggtgtcctactgtgagcttctccacctggaaatttccctctcacctacttctctggccctgggtacccctcttctcatcacttcctgttcccaccactggactgggctggcccagcccctgtttttccaacattccccagtatccccagcttctgctgcgctggtttgcggctttgggaaataaaataccgttgtatatattctgccaggggtgttctagctttttgaggacagctcctgtatccttctcatccttgtctctccgcttgtcctcttgtgatgttaggacagagtgagagaagtcagctgtcacggggaaggtgagagagaggatgctaagcttcctactcactttctcctagccagcctggactttggagcgtggggtgggtgggacaatggctccccactctaagcactgcctcccctactccccgcatctttggggaatcggttccccatatgtcttccttactagactgtgagctcctcgagggcagggaccgtgccttatgtctgtgtgtgatcagtttctggcacataaatgcctcaataaagatttaattactttgtatagtg

SEQ ID NO: 149849 - DNA, 1051 bp, Homo sapiens
  Payload ID: 9604
  Gene Symbol: LYPD4
  Gene Name: LY6/PLAUR domain containing 4
  Uniprot ID: Q6UWN0
  ENST ID: ENST00000343055
  CDS Start-End: 347-982
cttttctgcgggtcttggcacctttcttggccacagatttctgggttacagagcatgtgtgtctgaggcattgcaggcagaaaagggtggccgacgtgacctctagctggactgctgggcaggggagctgtcctagataaaattggaaagcaccttgtccaatgggaggacctaagtgggagagtgagagtcctgctttgagaagctaagatggtggatggtgcagaaacagtgacccagagacaggtggacaaagaattcggggactgatgggaactgagcttgggatccagactgaaactgattccagactgacctctagcacccaggacccagacacagggccatgggaccccagcatttgagacttgtgcagctgttctgccttctaggggccatctccactctgcctcgtatgtcctgtggggctggatgctataagacccagaaagggactgcaaggggagtcgtgggctttaaaggctgcagctcgtcttcgtcttaccctgcgcaaatctcctaccttgtttccccacccggagtgtccattgcctcctacagtcgcgtctgccggtcttatctctgcaacaacctcaccaatttggagccttttgtgaaactcaaggccagcactcctaagtctatcacatctgcgtcctgtagctgcccgacctgtgtgggcgagcacatgaaggattgcctcccaaattttgtcaccactaattcttgccccttggctgcttctacgtgttacagttccaccttaaaatttcaggcagggtttctcaataccaccttcctcctcatggggtgtgctcgtgaacataaccagcttttagcagattttcatcatattgggagcatcaaagtgactgaggtcctcaacatcttagagaagtctcagattgttggtgcagcatcctccaggcaagatcctgcttggggtgtcgtcttaggcctcctgtttgccttcagggactgaccatctagctgcacccgacaagcacccagactctttcacataacaaataaaatagcagagttccctttc

SEQ ID NO: 149850 - DNA, 1076 bp, Homo sapiens
  Payload ID: 9604
  Gene Symbol: LYPD4
  Gene Name: LY6/PLAUR domain containing 4
  Uniprot ID: Q6UWN0
  ENST ID: ENST00000601246
  CDS Start-End: 372-1007
gcccctggggcgttgaccaagcccgcttttctgcgggtcttggcacctttcttggccacagatttctgggttacagagcatgtgtgtctgaggcattgcaggcagaaaagggtggccgacgtgacctctagctggactgctgggcaggggagctgtcctagataaaattggaaagcaccttgtccaatgggaggacctaagtgggagagtgagagtcctgctttgagaagctaagatggtggatggtgcagaaacagtgacccagagacaggtggacaaagaattcggggactgatgggaactgagcttgggatccagactgaaactgattccagactgacctctagcacccaggacccagacacagggccatgggaccccagcatttgagacttgtgcagctgttctgccttctaggggccatctccactctgcctcgtatgtcctgtggggctggatgctataagacccagaaagggactgcaaggggagtcgtgggctttaaaggctgcagctcgtcttcgtcttaccctgcgcaaatctcctaccttgtttccccacccggagtgtccattgcctcctacagtcgcgtctgccggtcttatctctgcaacaacctcaccaatttggagccttttgtgaaactcaaggccagcactcctaagtctatcacatctgcgtcctgtagctgcccgacctgtgtgggcgagcacatgaaggattgcctcccaaattttgtcaccactaattcttgccccttggctgcttctacgtgttacagttccaccttaaaatttcaggcagggtttctcaataccaccttcctcctcatggggtgtgctcgtgaacataaccagcttttagcagattttcatcatattgggagcatcaaagtgactgaggtcctcaacatcttagagaagtctcagattgttggtgcagcatcctccaggcaagatcctgcttggggtgtcgtcttaggcctcctgtttgccttcagggactgaccatctagctgcacccgacaagcacccagactctttcacataacaaataaaatagcagagttccctttc

SEQ ID NO: 149851 - DNA, 2026 bp, Homo sapiens
  Payload ID: 9604
  Gene Symbol: LYPD4
  Gene Name: LY6/PLAUR domain containing 4
  Uniprot ID: Q6UWN0
  ENST ID: ENST00000609812
  CDS Start-End: 1217-1957
ggtctgtgcacgggttgcctcgtttctggccttcccttgccttgtacctcgacttcgcgcgtggcttgtttttgctgagtggaggcctgcgttttctgttatgtctcttccggtgccccacaactcctgagctacccttcttttatgcgttctctcccagcgctgtgattaccgggttgcttaccgggccctccttcctcagattgcacccctttccttgtgtctcttcttgtctttgtgtcggttgtgattttcctaatctctgattttccttttctctcggacgctctccctcttcggacccattttctcccgtgcttcatgccctgatagcctggccccttcccggcttccttcgctaccggggacgcctctagtttttctgaatttctggctggctccaccctccgcgttcatcttcctcaagagttcgcccctctgggggctcctctgtgtaatcgtcgccttctctgggtatttctgtgaactccgtctcacaccatcccgccatcttctctgccttggccccttttctctgtacagccagctctgtgtccttttcttctccccctctaaaatcgactcctcttctccctgagagccccacctttgtgccccactcctcattttcctacgcctccctctctctgctggtcctctctctccctgcaaggttccattccatcaatttgtttgtcttttgtaggggtggcatcccctctgactactgctccatcctttttttttttttttttttttttttttttgcttgaggatttcacttcaatcttttctggttgcgtctccacttgtactcagcttgttaggtccaggtccagttgttctgcatctgaggctggcgtgtgctgtcttctctgattggcctaatctccctcacccccgtgagatctgttgtcagccttcgtttctctttcctgtgtcccagcttttctgcgggtcttggcacctttcttggccacagatttctgggttacagagcatgtgtgtctgaggcattgcaggcagaaaagggtggccgacgtgacctctagctggactgctgggcaggggagctgtcctagataaaattggaaagaaacagtgacccagagacaggtggacaaagaattcggggactgatgggaactgagcttgggatccagactgaaactgattccagactgacctctagcacccaggacccagacacagggccatgggaccccagcatttgagacttgtgcagctgttctgccttctaggggccatctccactctgcctcgggctggagctcttttgtgctatgaagcaacagcctcaagattcagagctgttgctttccataactggaagtggcttctgatgaggaacatggtgtgtaagctgcaagagggctgcgaggagacgctagtgttcattgagacagggactgcaaggggagtcgtgggctttaaaggctgcagctcgtcttcgtcttaccctgcgcaaatctcctaccttgtttccccacccggagtgtccattgcctcctacagtcgcgtctgccggtcttatctctgcaacaacctcaccaatttggagccttttgtgaaactcaaggccagcactcctaagtctatcacatctgcgtcctgtagctgcccgacctgtgtgggcgagcacatgaaggattgcctcccaaattttgtcaccactaattcttgccccttggctgcttctacgtgttacagttccaccttaaaatttcaggcagggtttctcaataccaccttcctcctcatggggtgtgctcgtgaacataaccagcttttagcagattttcatcatattgggagcatcaaagtgactgaggtcctcaacatcttagagaagtctcagattgttggtgcagcatcctccaggcaagatcctgcttggggtgtcgtcttaggcctcctgtttgccttcagggactgaccatctagctgcacccgacaagcacccagactctttcacataacaaataaaatagcagagttccctttc

SEQ ID NO: 149852 - DNA, 2499 bp, Homo sapiens
  Payload ID: 9605
  Gene Symbol: LYPD5
  Gene Name: LY6/PLAUR domain containing 5
  Uniprot ID: Q6UWN5
  ENST ID: ENST00000377950
  CDS Start-End: 82-837
gatgcttaggactcagtaaggagaaccagccaggcagcacatcacagcgggaggagctgtcccaggtggcccagctcagcaatggcaatgggggtccccagagtcattctgctctgcctctttggggctgcgctctgcctgacagggtcccaagccctgcagtgctacagctttgagcacacctactttggcccctttgacctcagggccatgaagctgcccagcatctcctgtcctcatgagtgctttgaggctatcctgtctctggacaccgggtatcgcgcgccggtgaccctggtgcggaagggctgctggaccgggcctcctgcgggccagacgcaatcgaacgcggacgcgctgccgccagactactcggtggtgcgcggctgcacaactgacaaatgcaacgcccacctcatgactcatgacgccctccccaacctgagccaagcacccgacccgccgacgctcagcggcgccgagtgctacgcctgtatcggggtccaccaggatgactgcgctatcggcaggtcccgacgagtccagtgtcaccaggaccagaccgcctgcttccagggcaatggcagaatgacagttggcaatttctcagtccctgtgtacatcagaacctgccaccggccctcctgcaccaccgagggcaccaccagcccctggacagccatcgacctccagggctcctgctgtgaggggtacctctgcaacaggaaatccatgacccagcccttcaccagtgcttcagccaccacccctccccgagcactacaggtcctggccctgctcctcccagtcctcctgctggtggggctctcagcatagaccgcccctccaggatgctggggacagggctcacacacctcattcttgctgcttcagcccctatcacatagctcactggaaaatgatgttaaagtaagaattgcactcctgtccctctggccttccatctctcccgcccttgtgccccacaacctggccaacagtactggaagaaactggacacagtcaccagcatccccggggagggcaaaacagccatgtcgtgccccgatgaagagcaattctgatcacagctgttactcactgagcaccagccaggcaccaggcaccccataacacggcttcctgtgctctccctccagagcctgtcgcagctctaggagggagctatacaatgatgtctttattagtgtcatcatgagaagcccaataagcagtatgccctaacagttagtaggccaggctctggagctaagctgcatgggttcaaatcccagctccaccattcagcctgcagagaccatgagcgagttacttaagccaggctctggagctaagctgcatgggttcaaatcccagctccagcattcagcctacagagaccatgggtgagttacttaagccaggctctggagctaagctgcatgggttcaaatcccagctccaccattcagcctgcagagactgtgggtgagttacttgagctctctgtgccaatattttctcacctataaggtggaggtgaaaataaactctataacatgacaagaactacttcacagtagttgcagtgaggattcaacgagatgaacatttagtacttgggacacagcagtggcccagtgtaaatgggctacttgtcataagccctaagtcacaggtcaacaaactgagaggcaaaagcacttggttgagcttgtgtatctagtgagtatggattcagggaccagattcccagccccacgaactgctaagcaaccccacctcctaaacacatgagtgccgattaacttcacagaaaaacacacaaggcaaagttcagcgaggtgaaattctccaagctataaagatcagggaagacttcctggaggaattcacccttgagcaaaatcctaaaggatcaatagtagctggcaaaaagaagcaggaggaagcgcattctaggtagaggagacagcctggacaaaggtctgagggaggaaggagcacaaggagtgcaggacactttcatgagtgcaggacactttcataactgcatgaacttcatagagatgggatcctttagcatgttctctgtgcacatgcttgaccatgttctttcacatgctttttgccacttgatctttccagcaactcagtgagagaagcaaaaaagtaagttgcatcctgctattgtctgaatgtttgtgtctccccaaaattcatcttttgaaacctaattaccaaagtgatattactgggaggtggggcctttgggaggtggtgagatcatgagggtggagcccccatgaataggattagtgcccttataaaagaggccctggagagctgccttgccccttccaccacatgagaacacagccagcaggtgcctataagcaagaaagtgggttctcaccagccatcgaatctgctggtgcattgattgcagacttcccagactccagagctatgagacataaatttctgttgtgtataagc

SEQ ID NO: 149853 - DNA, 2137 bp, Homo sapiens
  Payload ID: 9605
  Gene Symbol: LYPD5
  Gene Name: LY6/PLAUR domain containing 5
  Uniprot ID: Q6UWN5
  ENST ID: ENST00000414615
  CDS Start-End: 161-787
gattcttgggttccgcgtgtagtttcggaaggagacatcgaagcagggcgaggcgcagagggcgttgcggactcatgccccagtcggcagtgcggggtcccaagccctgcagtgctacagctttgagcacacctactttggcccctttgacctcagggccatgaagctgcccagcatctcctgtcctcatgagtgctttgaggctatcctgtctctggacaccgggtatcgcgcgccggtgaccctggtgcggaagggctgctggaccgggcctcctgcgggccagacgcaatcgaacgcggacgcgctgccgccagactactcggtggtgcgcggctgcacaactgacaaatgcaacgcccacctcatgactcatgacgccctccccaacctgagccaagcacccgacccgccgacgctcagcggcgccgagtgctacgcctgtatcggggtccaccaggatgactgcgctatcggcaggtcccgacgagtccagtgtcaccaggaccagaccgcctgcttccagggcaatggcagaatgacagttggcaatttctcagtccctgtgtacatcagaacctgccaccggccctcctgcaccaccgagggcaccaccagcccctggacagccatcgacctccagggctcctgctgtgaggggtacctctgcaacaggaaatccatgacccagcccttcaccagtgcttcagccaccacccctccccgagcactacaggtcctggccctgctcctcccagtcctcctgctggtggggctctcagcatagaccgcccctccaggatgctggggacagggctcacacacctcattcttgctgcttcagcccctatcacatagctcactggaaaatgatgttaaagtaagaattgcactcctgtccctctggccttccatctctcccgcccttgtgccccacaacctggccaacagtactggaagaaactggacacagtcaccagcatccccggggagggcaaaacagccatgtcgtgccccgatgaagagcaattctgatcacagctgttactcactgagcaccagccaggcaccaggcaccccataacacggcttcctgtgctctccctccagagcctgtcgcagctctaggagggagctatacaatgatgtctttattagtgtcatcatgagaagcccaataagcagtatgccctaacagttagtaggccaggctctggagctaagctgcatgggttcaaatcccagctccaccattcagcctgcagagaccatgagcgagttacttaagccaggctctggagctaagctgcatgggttcaaatcccagctccagcattcagcctacagagaccatgggtgagttacttaagccaggctctggagctaagctgcatgggttcaaatcccagctccaccattcagcctgcagagactgtgggtgagttacttgagctctctgtgccaatattttctcacctataaggtggaggtgaaaataaactctataacatgacaagaactacttcacagtagttgcagtgaggattcaacgagatgaacatttagtacttgggacacagcagtggcccagtgtaaatgggctacttgtcataagccctaagtcacaggtcaacaaactgagaggcaaaagcacttggttgagcttgtgtatctagtgagtatggattcagggaccagattcccagccccacgaactgctaagcaaccccacctcctaaacacatgagtgccgattaacttcacagaaaaacacacaaggcaaagttcagcgaggtgaaattctccaagctataaagatcagggaagacttcctggaggaattcacccttgagcaaaatcctaaaggatcaatagtagctggcaaaaagaagcaggaggaagcgcattctaggtagaggagacagcctggacaaaggtctgagggaggaaggagcacaaggagtgcaggacactttcatgagtgcaggacactttcataactgcatgaacttcatagagatgggatcctttagcatgttctctgtgcacatgcttgaccatgttctttcacatgctttttgccacttgatctttccagcaactcagtgagagaagcaaaaaagtaagttgcatcctg

SEQ ID NO: 149854 - DNA, 569 bp, Homo sapiens
  Payload ID: 9605
  Gene Symbol: LYPD5
  Gene Name: LY6/PLAUR domain containing 5
  ENST ID: ENST00000594049
  CDS Start-End: 187-569
atcgaagcagggcgaggcgcagagggcgttgcggactcatgccccagtcggcagtgcgggtaagggtgggagaagcaatgaggcgaatgcgagcagccgaagaaggcgacagtgtggctggggtcccaagccctgcagtgctacagctttgagcacacctactttggcccctttgacctcagggccatgaagctgcccagcatctcctgtcctcatgagtgctttgaggctatcctgtctctggacaccgggtatcgcgcgccggtgaccctggtgcggaagggctgctggaccgggcctcctgcgggccagacgcaatcgaacgcggacgcgctgccgccagactactcggtggtgcgcggctgcacaactgacaaatgcaacgcccacctcatgactcatgacgccctccccaacctgagccaagcacccgacccgccgacgctcagcggcgccgagtgctacgcctgtatcggggtccaccaggatgactgcgctatcggcaggtcccgacgagtccagtgtcaccaggaccagaccgcctgcttccagggcaatggcagaatgac

SEQ ID NO: 149855 - DNA, 1519 bp, Homo sapiens
  Payload ID: 9605
  Gene Symbol: LYPD5
  Gene Name: LY6/PLAUR domain containing 5
  Uniprot ID: Q6UWN5
  ENST ID: ENST00000594013
  CDS Start-End: 261-887
agagaggtcattactctgccatgagacagacacagctgtgaccagctgcaatagcagcacctggtctctcaaggcgtgtcttccctgggagcagaggggccaggcccgtgtgcctgtcatttgctgggtggagctctgagttcctgggacaggctcacactggccctgctgactctgccacgcctctctccccagggtcccaagccctgcagtgctacagctttgagcacacctactttggcccctttgacctcagggccatgaagctgcccagcatctcctgtcctcatgagtgctttgaggctatcctgtctctggacaccgggtatcgcgcgccggtgaccctggtgcggaagggctgctggaccgggcctcctgcgggccagacgcaatcgaacgcggacgcgctgccgccagactactcggtggtgcgcggctgcacaactgacaaatgcaacgcccacctcatgactcatgacgccctccccaacctgagccaagcacccgacccgccgacgctcagcggcgccgagtgctacgcctgtatcggggtccaccaggatgactgcgctatcggcaggtcccgacgagtccagtgtcaccaggaccagaccgcctgcttccagggcaatggcagaatgacagttggcaatttctcagtccctgtgtacatcagaacctgccaccggccctcctgcaccaccgagggcaccaccagcccctggacagccatcgacctccagggctcctgctgtgaggggtacctctgcaacaggaaatccatgacccagcccttcaccagtgcttcagccaccacccctccccgagcactacaggtcctggccctgctcctcccagtcctcctgctggtggggctctcagcatagaccgcccctccaggatgctggggacagggctcacacacctcattcttgctgcttcagcccctatcacatagctcactggaaaatgatgttaaagtaagaattgcactcctgtccctctggccttccatctctcccgcccttgtgccccacaacctggccaacagtactggaagaaactggacacagtcaccagcatccccggggagggcaaaacagccatgtcgtgccccgatgaagagcaattctgatcacagctgttactcactgagcaccagccaggcaccaggcaccccataacacggcttcctgtgctctccctccagagcctgtcgcagctctaggagggagctatacaatgatgtctttattagtgtcatcatgagaagcccaataagcagtatgccctaacagttagtaggccaggctctggagctaagctgcatgggttcaaatcccagctccaccattcagcctgcagagaccatgagcgagttacttaagccaggctctggagctaagctgcatgggttcaaatcccagctccagcattcagcctacagagaccatgggtgagttacttaagccaggctctggagctaagctgcatgggttcaaatcccagctccaccatt

SEQ ID NO: 149856 - DNA, 607 bp, Homo sapiens
  Payload ID: 9605
  Gene Symbol: LYPD5
  Gene Name: LY6/PLAUR domain containing 5
  ENST ID: ENST00000602179
  CDS Start-End: 267-607
aacttggcttcacctgtcaaaggcgcttttttcgaagacgcccgggagctcttgcttttgcttgagggtctttggtgttgactgagagcgaattaaaaggttctcagctttcgctaaggaacgcattctggagtctagaacaggcgaagatgggactggggtgtctggggacttagacgtgagcgagcaagggaatccgggggtcccaagccctgcagtgctacagctttgagcacacctactttggcccctttgacctcagggccatgaagctgcccagcatctcctgtcctcatgagtgctttgaggctatcctgtctctggacaccgggtatcgcgcgccggtgaccctggtgcggaagggctgctggaccgggcctcctgcgggccagacgcaatcgaacgcggacgcgctgccgccagactactcggtggtgcgcggctgcacaactgacaaatgcaacgcccacctcatgactcatgacgccctccccaacctgagccaagcacccgacccgccgacgctcagcggcgccgagtgctacgcctgtatcggggtccaccaggatgactgcgctatcggcaggtcccgacgagtccagtgtca

SEQ ID NO: 149857 - DNA, 4071 bp, Homo sapiens
  Payload ID: 9606
  Gene Symbol: LYPD6
  Gene Name: LY6/PLAUR domain containing 6
  Uniprot ID: Q86Y78
  ENST ID: ENST00000334166
  CDS Start-End: 258-773
gagtggcgcgcgcgcccctagccgccccccgcctctccccgctgcgctccctcgctccttccctgagctcccgggctccggcagcgggctggcggggcgccgcattgcacactctgggggcgccgcagtgttcgtgggatggggcagcgggctgcagctggcggccggaatccgcgcgcagcccgggtgcaagttctctcctgttgccctgagtgcccactcccaggccctctgtatgagtgacacttcagtctgccatggaacctggccctgctctggcctggctcctgctcctgagcctgctggcggattgtctgaaagctgctcagtcccgagacttcacagtgaaagacattatctacctccatccttcaaccacaccatatcctggtggatttaaatgtttcacctgtgaaaaggcagcagacaattatgagtgcaaccgatgggctccagacatctactgccctcgagagaccagatactgctacactcagcacacaatggaagtcacaggaaacagtatctcagtcaccaaacgctgtgtcccactggaagagtgcttatccactggctgcagagactccgagcatgaaggccacaaggtctgcacttcttgttgtgaaggaaatatctgtaacttgccactgccccgaaatgaaactgatgccacatttgccacgacgtcacctataaatcagacaaatgggcacccacgctgtatgtcagtgatagtgtcctgcttgtggttgtggttagggctcatgttatagtggctcagtggctccatgtgttaatagcgatccatggggatctcgatggtccacagacctgcatgagtcattggcctgacagtaattacacatgtgagacacaacactcttggaggtcatcacagccaagcattgccacttaccatgaggaataaatgttgcttcattgtagccattttgagtctaaccgagactcatcaaagccttctgtcagtacagcccaagttccataccataaacgtttgttttcattccaagaagtagttctgcatttatcgagatctggggttcttaatttggaagaatacatgcatgagatgcagtaggtcctgagactgtaagatattaggagtatgttataggggcatgtatagatgtgggcttttcaggagaaaagtaaccattggtttaaatataatcatgagttcatttgtagctttagaattttaaaacattgactccaaactgaatggactatttccttggaaattctgactgagtccctggaagagtagtaattccaacaattccagccatttgttcaattaattttcccaacattcttctcccagtgctgggaatcacatttcctctgttctgtgcagaagacaaaaaggcaatcataaaagtttgttatatttgtgggggtgcctggaggaggattttcctcaacttaatggagccactgtccataaagtggctgttatcccttcatataattggtgagatcagccttctccttgacttggcacctaattatgcttcatgagatcctagattccacctgagtcaattgtgtccagagccccaaaccaggatggagttgttttccccagatatggggttctattcagccatagataatctagacagaggatttcagaatgaaaggaaaaatgtgtggagattagtcctagttcattctgagggccgactaagtggctcagccagcttcttactccatctgcagttcatactgccaaagagctcccacttccaaatccccagtgactttatggagaagattctgcattaaattgtctttcgaatgatggggaagcaaggcataatatgcgatgatgaggagaaagtagaccagtgaggtgattgcaagactaacaaggagactcaatgggaagtttttctttcttttagatattgcttttgaagtagatggtaaaatttttgtcatccttcttgtattttttgtaccccaagttacaatttttcttcttccttgtaaataatttaaacagtatttatttttgtaaggcataactagaaactaaaatatattctaaaaaattcattattctgaacaaagtgatcaaattagaatacatatttttcaacagtggtagagcttttaatatatgtttattgaaagttatctataatacttgcaccagtgttgaaaaaagttaacatgtaggcaagagcaatatgtttgtctcaaggatttttccatggtttcctcagtgatggtgtcctggaattattcaggtggtgaccatcactggtctaagtttgtgtgcagggttttcagatgtgtttttgtgaaacttggtagaaccatggctaataaagaggacagtgttgtcagggtccatctgccctccatagaaaaatgtctctggctcataaaatgagactccctcagggactaaatatgaactgacagcagtaactctgatacagaataatctaaattgcatcaaatggccttaattcagagtttgttaggcttatcagtatgttgcttttaattggggtgggaaagtagagggagagaaagcaagacatttattaagcacctcgtatgtgccaggcactatgctaagcactttacataagttaggattaatccctgcaagaatcctataaagaatgttactagcatttacacttcccaaatgaaggtaccaaagctcaaacgcaatgttgtgaagctgtttccttcagatttaggttatgtgggatgatgtgggattgaagaggaaagaaaggtgggattatccccctaggaagactttcaggcctgacttcataggaattcatccatcttatcatgtggagtttatctcaccctgctgttgcaggatgctatttgcatgtgtccccaggtgatgttttttctttggggagtaggggtttggcttcctcattcatccctcttgctaaaagaggagatagttgatgttgcatctaaagatgctataagacaatgaaagtttgatgttgtacatacctacaagtaccatttttgtgcatgattacactccactgacatcttccaagtactgcatgtgattgaataagaaacaagaaagtgaccacaccaaagcctccctggctggtgtagagggatcaggtccacagtggtgcagattcaaccaccacccagggagtgcttgcagactctgcatagatgttgctgcatgtgtcccatgtgcctgtcagaatggcagtgtttaattctcttgaaagaaagttatttgctcactatccccagcctcaaggagccaaggaagagtcattcacatggaaggtccgggactggtcagccactctgacttttctaccacattaaattctccattacatctcaatattggtaatggcttaagtgtaaagagccatgatgtgtatattaagctatgtgccacatatttatttttagactctccacagcattcatgtcaatatgggattaatgcctaaactttgtaaatattgtacagtttgtaaatcaatgaataaaggttttgagtgtatcttaccaggctcctccctgcaaatgcacatgtcaatcaatgattaatgcacccaggttatgtacaaggcactgggcttagcaccacagggaacttccttccagaggcttgctttctagttgtgtagacaagaatacatgcatgagaagatacaagacaattcacccatgccaaatgattcatacaggctgtttaagtactgcagaaaataaaagaaggaaaggctaccagacttttcaataaggtctacagcttcccaagagcatgtctttgttaaatcaggaaatataaaaattatgtgtgtatgtgtatgtatatatatataccaccctattaactattttaaaatcgtattctattttgggggttgtgttaatgatgatgaaccagaaaagattttctcttgatggtttcttcaacaggaaacagatattggaatagtgtacatgtcatttttatctatacaatgaatttattatatttttcttagtaaagtgatagacattgaaagcaagcttgaaaaa

SEQ ID NO: 149858 - DNA, 1580 bp, Homo sapiens
  Payload ID: 9606
  Gene Symbol: LYPD6
  Gene Name: LY6/PLAUR domain containing 6
  Uniprot ID: Q86Y78
  ENST ID: ENST00000392854
  CDS Start-End: 493-723
gggcatgaaagaccaaccactctgtaaatgcacataaagaacaacctccttgagcaatctcaagcaagagaaagaagaggcttccgagctccagcaaaacaatgggaaaaaacatacccttatcttttccttctcattttcaaaggtaccgtgaatataagtagaagaaagacaccgtctcttcctttaaggaacttacagtcttatggaagagacacagatggaagtgcacaattaccgaatatcatcaaaaagcctgagaaaaagttatgcaaaagctactgtgtgagcacagaggctgtaaacctaatcctaagttgcagggtgagcaacaaggcactattttggaagcagagaacagccctcaccagacacggaatctgctggtgccctgatcttggaattcccaccgtctagaactgtgcaagttctctcctgttgccctgagtgcccactcccaggccctctgtatgagtgacacttcagtctgccatggaacctggccctgctctggcctggctcctgctcctgagcctgctggcggattgtctgaaagctgctcagtcccgagacttcacagtgaaagacattatctacctccatccttcaaccacaccatatcctggtggatttaaatgtttcacctgtgaaaaggcagcagacaattatgagtgcaaccgatgggctccagacatctactgccctcgaggaaccatgatctagaagaaaagccagatatcccaaatgagaaagttaagaaggactaagacaacatggagaagagagaagattagcattgacctggttgggaggaagatcaggaagatttcacagaatttatcacatttggattgagccttgaagaatatcaggtgtccaggagtagaagataggaaaaaatatgcagaccatgctaaggatgcacatttttcatcgtgcatggtcaaaagttgtggtactatgtctcaaggtatatacgaggcaatgaggagacagtttggagcctccatcaaggagaaccagaccagatactgctacactcagcacacaatggaagtcacaggaaacagtatctcagtcaccaaacgctgtgtcccactggaagagtgcttatccactggctgcagagactccgagcatgaaggccacaaggtctgcacttcttgttgtgaaggaaatatctgtaacttgccactgccccgaaatgaaactgatgccacatttgccacgacgtcacctataaatcagacaaatgggcacccacgctgtatgtcagtgatagtgtcctgcttgtggttgtggttagggctcatgttatagtggctcagtggctccatgtgttaatagcgatccatggggatctcgatggtccacagacctgcatgagtcattggcctgacagtaattacacatgtgagacacaacactcttggaggtcatcacagccaagcattgccacttaccatgaggaataaatgttgcttcattgtagccattttgagtctaaccgagactcatcaaagccttctgtcagtacagcccaagttccataccataaacgtttgttttcattccaagaa

SEQ ID NO: 149859 - DNA, 3578 bp, Homo sapiens
  Payload ID: 9606
  Gene Symbol: LYPD6
  Gene Name: LY6/PLAUR domain containing 6
  Uniprot ID: Q86Y78
  ENST ID: ENST00000409381
  CDS Start-End: 290-805
actgcaaacgtcaagtggtctccgccttccctgggttcggagcttcacttgctcttgagctctgcggtccggcggatttcgcggggcccaggggatggcggggagtgagatttggccagggtcatttcacactgccgggcctgcagccacgcacgcagctgctggcccggctgaggctggcggctagggagaggcgccagggggtcgcgcacaggaaggtgcaagttctctcctgttgccctgagtgcccactcccaggccctctgtatgagtgacacttcagtctgccatggaacctggccctgctctggcctggctcctgctcctgagcctgctggcggattgtctgaaagctgctcagtcccgagacttcacagtgaaagacattatctacctccatccttcaaccacaccatatcctggtggatttaaatgtttcacctgtgaaaaggcagcagacaattatgagtgcaaccgatgggctccagacatctactgccctcgagagaccagatactgctacactcagcacacaatggaagtcacaggaaacagtatctcagtcaccaaacgctgtgtcccactggaagagtgcttatccactggctgcagagactccgagcatgaaggccacaaggtctgcacttcttgttgtgaaggaaatatctgtaacttgccactgccccgaaatgaaactgatgccacatttgccacgacgtcacctataaatcagacaaatgggcacccacgctgtatgtcagtgatagtgtcctgcttgtggttgtggttagggctcatgttatagtggctcagtggctccatgtgttaatagcgatccatggggatctcgatggtccacagacctgcatgagtcattggcctgacagtaattacacatgtgagacacaacactcttggaggtcatcacagccaagcattgccacttaccatgaggaataaatgttgcttcattgtagccattttgagtctaaccgagactcatcaaagccttctgtcagtacagcccaagttccataccataaacgtttgttttcattccaagaagtagttctgcatttatcgagatctggggttcttaatttggaagaatacatgcatgagatgcagtaggtcctgagactgtaagatattaggagtatgttataggggcatgtatagatgtgggcttttcaggagaaaagtaaccattggtttaaatataatcatgagttcatttgtagctttagaattttaaaacattgactccaaactgaatggactatttccttggaaattctgactgagtccctggaagagtagtaattccaacaattccagccatttgttcaattaattttcccaacattcttctcccagtgctgggaatcacatttcctctgttctgtgcagaagacaaaaaggcaatcataaaagtttgttatatttgtgggggtgcctggaggaggattttcctcaacttaatggagccactgtccataaagtggctgttatcccttcatataattggtgagatcagccttctccttgacttggcacctaattatgcttcatgagatcctagattccacctgagtcaattgtgtccagagccccaaaccaggatggagttgttttccccagatatggggttctattcagccatagataatctagacagaggatttcagaatgaaaggaaaaatgtgtggagattagtcctagttcattctgagggccgactaagtggctcagccagcttcttactccatctgcagttcatactgccaaagagctcccacttccaaatccccagtgactttatggagaagattctgcattaaattgtctttcgaatgatggggaagcaaggcataatatgcgatgatgaggagaaagtagaccagtgaggtgattgcaagactaacaaggagactcaatgggaagtttttctttcttttagatattgcttttgaagtagatggtaaaatttttgtcatccttcttgtattttttgtaccccaagttacaatttttcttcttccttgtaaataatttaaacagtatttatttttgtaaggcataactagaaactaaaatatattctaaaaaattcattattctgaacaaagtgatcaaattagaatacatatttttcaacagtggtagagcttttaatatatgtttattgaaagttatctataatacttgcaccagtgttgaaaaaagttaacatgtaggcaagagcaatatgtttgtctcaaggatttttccatggtttcctcagtgatggtgtcctggaattattcaggtggtgaccatcactggtctaagtttgtgtgcagggttttcagatgtgtttttgtgaaacttggtagaaccatggctaataaagaggacagtgttgtcagggtccatctgccctccatagaaaaatgtctctggctcataaaatgagactccctcagggactaaatatgaactgacagcagtaactctgatacagaataatctaaattgcatcaaatggccttaattcagagtttgttaggcttatcagtatgttgcttttaattggggtgggaaagtagagggagagaaagcaagacatttattaagcacctcgtatgtgccaggcactatgctaagcactttacataagttaggattaatccctgcaagaatcctataaagaatgttactagcatttacacttcccaaatgaaggtaccaaagctcaaacgcaatgttgtgaagctgtttccttcagatttaggttatgtgggatgatgtgggattgaagaggaaagaaaggtgggattatccccctaggaagactttcaggcctgacttcataggaattcatccatcttatcatgtggagtttatctcaccctgctgttgcaggatgctatttgcatgtgtccccaggtgatgttttttctttggggagtaggggtttggcttcctcattcatccctcttgctaaaagaggagatagttgatgttgcatctaaagatgctataagacaatgaaagtttgatgttgtacatacctacaagtaccatttttgtgcatgattacactccactgacatcttccaagtactgcatgtgattgaataagaaacaagaaagtgaccacaccaaagcctccctggctggtgtagagggatcaggtccacagtggtgcagattcaaccaccacccagggagtgcttgcagactctgcatagatgttgctgcatgtgtcccatgtgcctgtcagaatggcagtgtttaattctcttgaaagaaagttatttgctcactatccccagcctcaaggagccaaggaagagtcattcacatggaaggtccgggactggtcagccactctgacttttctaccacattaaattctccattacatctcaatattggtaatggcttaagtgtaaagagccatgatgtgtatattaagctatgtgccacatatttatttttagactctccacagcattcatgtcaatatgggattaatgcctaaactttgtaaatattgtacagtttgtaaatcaatgaataaaggttttgagtgt

SEQ ID NO: 149860 - DNA, 565 bp, Homo sapiens
  Payload ID: 9606
  Gene Symbol: LYPD6
  Gene Name: LY6/PLAUR domain containing 6
  ENST ID: ENST00000414420
  CDS Start-End: 406-565
agcactgtgcagggcatgaaagaccaaccactctgtaaatgcacataaagaacaacctccttgagcaatctcaagcaagagaaagaagaggcttccgagctccagcaaaacaatgggaaaaaacatacccttatcttttccttctcattttcaaaggtaccgtgaatataagtagaagaaagacaccgtctcttcctttaaggaacttacagtcttatggaagagacacagatggaagtgcacaattaccgaatatcatcaaaaagcctgagaaaaagttatgcaaaagctactgtgtgagcacagaggctgtaaacctaatcctaagttgcaggtgcaagttctctcctgttgccctgagtgcccactcccaggccctctgtatgagtgacacttcagtctgccatggaacctggccctgctctggcctggctcctgctcctgagcctgctggcggattgtctgaaagctgctcagtcccgagacttcacagtgaaagacattatctacctccatccttcaaccacaccatatcctggtggatttaaatgtttcacctgtgaaa

SEQ ID NO: 149861 - DNA, 1204 bp, Homo sapiens
  Payload ID: 9606
  Gene Symbol: LYPD6
  Gene Name: LY6/PLAUR domain containing 6
  Uniprot ID: Q86Y78
  ENST ID: ENST00000418762
  CDS Start-End: 132-362
agtgttcgtgggatggggcagcgggctgcagctggcggccggaatccgcgcgcagcccgggtgcaagttctctcctgttgccctgagtgcccactcccaggccctctgtatgagtgacacttcagtctgccatggaacctggccctgctctggcctggctcctgctcctgagcctgctggcggattgtctgaaagctgctcagtcccgagacttcacagtgaaagacattatctacctccatccttcaaccacaccatatcctggtggatttaaatgtttcacctgtgaaaaggcagcagacaattatgagtgcaaccgatgggctccagacatctactgccctcgaggaaccatgatctagaagaaaagccagatatcccaaatgagaaagttaagaaggactaagacaacatggagaagagagaagattagcattgacctggttgggaggaagatcaggaagatttcacagaatttatcacatttggattgagccttgaagaatatcaggtgtccaggagtagaagataggaaaaaatatgcagaccatgctaaggatgcacatttttcatcgtgcatggtcaaaagttgtggtactatgtctcaaggtatatacgaggcaatgaggagacagtttggagcctccatcaaggagaaccagaccagatactgctacactcagcacacaatggaagtcacaggaaacagtatctcagtcaccaaacgctgtgtcccactggaagagtgcttatccactggctgcagagactccgagcatgaaggccacaaggtctgcacttcttgttgtgaaggaaatatctgtaacttgccactgccccgaaatgaaactgatgccacatttgccacgacgtcacctataaatcagacaaatgggcacccacgctgtatgtcagtgatagtgtcctgcttgtggttgtggttagggctcatgttatagtggctcagtggctccatgtgttaatagcgatccatggggatctcgatggtccacagacctgcatgagtcattggcctgacagtaattacacatgtgagacacaacactcttggaggtcatcacagccaagcattgccacttaccatgaggaataaatgttgcttcattgtagccattttgagtctaaccgagactcatcaaagccttctgtcagtacagcccaagttccataccataaacgtttg

SEQ ID NO: 149862 - DNA, 1100 bp, Homo sapiens
  Payload ID: 9607
  Gene Symbol: LYPD6B
  Gene Name: LY6/PLAUR domain containing 6B
  ENST ID: ENST00000280115
  CDS Start-End: 1-552
atgcgatataagagttcggaccgcccagcacacaaggtcagcatgctgctcctctgtcacgctctcgctatagctgttgtccagatcgttatcttctcagaaagctgggcatttgccaagaacatcaacttctataatgtgaggcctcctctcgaccctacaccatttccaaatagcttcaagtgctttacttgtgaaaacgcaggggataattataactgcaatcgatgggcagaagacaaatggtgtccacaaaatacacagtactgtttgacagttcatcacttcaccagccacggaagaagcacatccatcaccaaaaagtgtgcctccagaagtgaatgtcattttgtcggttgccaccacagccgagattctgaacatacggagtgtaggtcttgctgtgaaggaatgatctgcaatgtagaattacccaccaatcacactaatgcagtgtttgccgtaatgcacgctcagagaacatctggcagcagtgcccccacactctacctaccagtgcttgcctgggtctttgtgcttccattgctgtgatgccaccattcctaggagaggcagagaccagcctctaaagcacaagccaaaaactgtgtgaacggtgaactttggagtgaagatcaatcttgcacttggtgaagagtgcacattggacctcaaggcgaaagccagtggtttgcttggataaaatgttcccgcatgaggccacaggactgaggatgggaatttggcagggcctgagaagatggtctgacttccaggcttcctggtcaaagagagctacgtttgggcagttctgcagagaggatcctggcaactagtcccacctgactaggcctttagctgaaaggatttcttgacctccttgactgcctcagaggctgccaggtcaaaccctcttgtttatgtgattagctcagagcatctctatgaaatctaacccttcccctcatgagaaagcagttttccccaccaacagcatagtcaatgagaaaggcaactgtacgaagaaaacttccagtggaactaatatgaaatctatttgcaaattatggggggaaataaagcttttaaattatacaatg

SEQ ID NO: 149863 - DNA, 1248 bp, Homo sapiens
  Payload ID: 9607
  Gene Symbol: LYPD6B
  Gene Name: LY6/PLAUR domain containing 6B
  Uniprot ID: Q8NI32
  ENST ID: ENST00000409876
  CDS Start-End: 151-702
cgccggccccaggcgggtgcgctgggagcctgggccgggagccgggtgagggcgccgagaggctcggtgggcgcgggcggcgagatatgccacacttctgcctgctgttggcaaccctcctggactaggctgctcttgttaatcacatggatgttatataagagttcggaccgcccagcacacaaggtcagcatgctgctcctctgtcacgctctcgctatagctgttgtccagatcgttatcttctcagaaagctgggcatttgccaagaacatcaacttctataatgtgaggcctcctctcgaccctacaccatttccaaatagcttcaagtgctttacttgtgaaaacgcaggggataattataactgcaatcgatgggcagaagacaaatggtgtccacaaaatacacagtactgtttgacagttcatcacttcaccagccacggaagaagcacatccatcaccaaaaagtgtgcctccagaagtgaatgtcattttgtcggttgccaccacagccgagattctgaacatacggagtgtaggtcttgctgtgaaggaatgatctgcaatgtagaattacccaccaatcacactaatgcagtgtttgccgtaatgcacgctcagagaacatctggcagcagtgcccccacactctacctaccagtgcttgcctgggtctttgtgcttccattgctgtgatgccaccattcctaggagaggcagagaccagcctctaaagcacaagccaaaaactgtgtgaacggtgaactttggagtgaagatcaatcttgcacttggtgaagagtgcacattggacctcaaggcgaaagccagtggtttgcttggataaaatgttcccgcatgaggccacaggactgaggatgggaatttggcagggcctgagaagatggtctgacttccaggcttcctggtcaaagagagctacgtttgggcagttctgcagagaggatcctggcaactagtcccacctgactaggcctttagctgaaaggatttcttgacctccttgactgcctcagaggctgccaggtcaaaccctcttgtttatgtgattagctcagagcatctctatgaaatctaacccttcccctcatgagaaagcagttttccccaccaacagcatagtcaatgagaaaggcaactgtacgaagaaaacttccagtggaactaatatgaaatctatttgcaaattatggggggaaataaagcttttaaattatacaa

SEQ ID NO: 149864 - DNA, 1306 bp, Homo sapiens
  Payload ID: 9607
  Gene Symbol: LYPD6B
  Gene Name: LY6/PLAUR domain containing 6B
  Uniprot ID: Q8NI32
  ENST ID: ENST00000409029
  CDS Start-End: 203-754
ctctgctggagcaggacttcagagtgtttgttttcagcctgcttttaaagtgatttgaagagagtggctttgaagattatcgcggaacacctgcccattaatcttgaccctgttaaaacaataactgcctatccagatatgccacacttctgcctgctgttggcaaccctcctggactaggctgctcttgttaatcacatggatgttatataagagttcggaccgcccagcacacaaggtcagcatgctgctcctctgtcacgctctcgctatagctgttgtccagatcgttatcttctcagaaagctgggcatttgccaagaacatcaacttctataatgtgaggcctcctctcgaccctacaccatttccaaatagcttcaagtgctttacttgtgaaaacgcaggggataattataactgcaatcgatgggcagaagacaaatggtgtccacaaaatacacagtactgtttgacagttcatcacttcaccagccacggaagaagcacatccatcaccaaaaagtgtgcctccagaagtgaatgtcattttgtcggttgccaccacagccgagattctgaacatacggagtgtaggtcttgctgtgaaggaatgatctgcaatgtagaattacccaccaatcacactaatgcagtgtttgccgtaatgcacgctcagagaacatctggcagcagtgcccccacactctacctaccagtgcttgcctgggtctttgtgcttccattgctgtgatgccaccattcctaggagaggcagagaccagcctctaaagcacaagccaaaaactgtgtgaacggtgaactttggagtgaagatcaatcttgcacttggtgaagagtgcacattggacctcaaggcgaaagccagtggtttgcttggataaaatgttcccgcatgaggccacaggactgaggatgggaatttggcagggcctgagaagatggtctgacttccaggcttcctggtcaaagagagctacgtttgggcagttctgcagagaggatcctggcaactagtcccacctgactaggcctttagctgaaaggatttcttgacctccttgactgcctcagaggctgccaggtcaaaccctcttgtttatgtgattagctcagagcatctctatgaaatctaacccttcccctcatgagaaagcagttttccccaccaacagcatagtcaatgagaaaggcaactgtacgaagaaaacttccagtggaactaatatgaaatctatttgcaaattatggggggaaataaagcttttaaattatacaatgtaaa

SEQ ID NO: 149865 - DNA, 1577 bp, Homo sapiens
  Payload ID: 9607
  Gene Symbol: LYPD6B
  Gene Name: LY6/PLAUR domain containing 6B
  Uniprot ID: Q8NI32
  ENST ID: ENST00000409642
  CDS Start-End: 402-1025
acttcctgagccgggctggctgggtgggaacaggctccttgccgcctccccagcgctggccactaccacactgccgcccgcctgggcctcctttcaacctcgtggtggagccctgcggtttcccagcggagccgggcccggggctgctccctcgcgggcgaggctcacctgtcccggcccggccccctcccgcgccccaggtggttcagggcagggaggagccgcgccccgccccgcgcggtagcagccaacgccggccccaggcgggtgcgctgggagcctgggccgggagccgggtgagggcgccgagaggctcggtgggcgcgggcggcgagatatgccacacttctgcctgctgttggcaaccctcctggactaggctgctcttgttaatcacatggatgttgctgattactctgagtgcaaaccttttcactgttccagagaggagcctgacaaccacattctccttctcaagatataagagttcggaccgcccagcacacaaggtcagcatgctgctcctctgtcacgctctcgctatagctgttgtccagatcgttatcttctcagaaagctgggcatttgccaagaacatcaacttctataatgtgaggcctcctctcgaccctacaccatttccaaatagcttcaagtgctttacttgtgaaaacgcaggggataattataactgcaatcgatgggcagaagacaaatggtgtccacaaaatacacagtactgtttgacagttcatcacttcaccagccacggaagaagcacatccatcaccaaaaagtgtgcctccagaagtgaatgtcattttgtcggttgccaccacagccgagattctgaacatacggagtgtaggtcttgctgtgaaggaatgatctgcaatgtagaattacccaccaatcacactaatgcagtgtttgccgtaatgcacgctcagagaacatctggcagcagtgcccccacactctacctaccagtgcttgcctgggtctttgtgcttccattgctgtgatgccaccattcctaggagaggcagagaccagcctctaaagcacaagccaaaaactgtgtgaacggtgaactttggagtgaagatcaatcttgcacttggtgaagagtgcacattggacctcaaggcgaaagccagtggtttgcttggataaaatgttcccgcatgaggccacaggactgaggatgggaatttggcagggcctgagaagatggtctgacttccaggcttcctggtcaaagagagctacgtttgggcagttctgcagagaggatcctggcaactagtcccacctgactaggcctttagctgaaaggatttcttgacctccttgactgcctcagaggctgccaggtcaaaccctcttgtttatgtgattagctcagagcatctctatgaaatctaacccttcccctcatgagaaagcagttttccccaccaacagcatagtcaatgagaaaggcaactgtacgaagaaaacttccagtggaactaatatgaaatctatttgcaaattatggggggaaataaagcttttaaattatacaatgtaaa

SEQ ID NO: 149866 - DNA, 528 bp, Homo sapiens
  Payload ID: 9607
  Gene Symbol: LYPD6B
  Gene Name: LY6/PLAUR domain containing 6B
  ENST ID: ENST00000437627
  CDS Start-End: 213-365
gtgctggggctggggcggctacatagctgtgactaccagggggtgcagtctctggggaccaccactaccgaggctgggtaccatgattatcgcggaacacctgcccattaatcttgaccctgttaaaacaataactgcctatccagatatgccacacttctgcctgctgttggcaaccctcctggactaggctgctcttgttaatcacatggatgttatgtgaaaggcattgtacagaagaagatgagaatcacagtaaaccaaacaaaggaaatgcagaagagatattttcagctgaatattggaaagtaagattccctgcgagcaggatctcaggcaacgtcaatgaacaacatgaagcctgacacattctaattagtctaaggaaaatggtgacagaggatatattccgtaacgtctcaggaggtcgcctggctccagagagtgtaaaatgccacacgttggatgagatgattatccgagctcagacttgggaaatagtcatgcttctggaccaagtgccaggta

SEQ ID NO: 149867 - DNA, 515 bp, Homo sapiens
  Payload ID: 9607
  Gene Symbol: LYPD6B
  Gene Name: LY6/PLAUR domain containing 6B
  ENST ID: ENST00000442722
  CDS Start-End: 128-292
attatcgcggaacacctgcccattaatcttgaccctgttaaaacaataactgcctatccagatatgccacacttctgcctgctgttggcaaccctcctggactaggctgctcttgttaatcacatggatgttatataagagttcggaccgcccagcacacaaggtcagcatgctgctcctctgtcacgctctcgctatagctgttgtccagatcgttatcttctcagaaagctgggcatttgccaagaacatcaacttctataatgtgaggcctcctctcgaccacaagtaaaacgtctttgatatactttattagagagtgattcttataaataaaaaattatttggtatacatgtgggtacctgtagttcccacgcctggaagagtatcagaatcatgatgaaaggatttttaactgcatatccctaatcacttctccagagatttaacagtcaagaggctacaccatttccaaatagcttcaagtgctttacttgtgaaaacgcaggggata

SEQ ID NO: 149868 - DNA, 484 bp, Homo sapiens
  Payload ID: 9607
  Gene Symbol: LYPD6B
  Gene Name: LY6/PLAUR domain containing 6B
  ENST ID: ENST00000450639
  CDS Start-End: 198-422
cggctacatagctgtgactaccagggggtgcagtctctggggaccaccactaccgaggctgggtaccatgattatcgcggaacacctgcccattaatcttgaccctgttaaaacaataactgcctatccagatatgccacacttctgcctgctgttggcaaccctcctggactaggctgctcttgttaatcacatggatgttgctgattactctgagtgcaaaccttttcactgttccagagaggagcctgacaaccacattctccttctcaagatgtgaaaggcattgtacagaagaagatgagaatcacagtaaaccaaacaaaggaaatgcagaagagatattttcagctgaatattggaaagtaagattccctgcgagcaggatctcaggcaacgtcaatgaacaacatgaagcctgacacattgtaggtgccccgtaaatattggttgagtaactgaataaacgtatttagtaacttaa

SEQ ID NO: 149869 - DNA, 1233 bp, Homo sapiens
  Payload ID: 9608
  Gene Symbol: LYPD8
  Gene Name: LY6/PLAUR domain containing 8
  ENST ID: ENST00000566597
  CDS Start-End: 1-164
accctcccctgaagaacgtgtccagcaacgcagagtgccctgcttgttatgaatctaatggaacttcctgtcatgggaagccctggaaatgctatgaagaagaacagtgtgtctttctagttgcagaacttaagaatggaacaccaggtgatggtgcagattgagctgtagactcacctagacaaatacccccttggggttcacttcctacccaagaagctggatgaggcagtggctgaagtccacctgcacaggctaaatgtgaagttgaccaagctgactgagaagcaggcccagtacctgggcatgtcctgtgatggccccttcaaactggatgactaccactactgagaaccaggcctgcccttcacctaccagctgctgtccttgccctggccctgcctcccctaagagcaaatgacaccaactttgtgattgttttcagtgtcccccattgactccctggggctggtcacttaggttttggcctctactgcatccctcatactgttgcaagtgtggcagggggaattgaaaagccccccccccctcaagctctggtcatgatgaaggtacaagggagacatccacagggaaccatgagctcagtggtcttggaattgctcactaagtcagtccttccttagcctggaagttggtcatggagtcacaaagcccatgtactttaccatctaggccttcacctggtctgtggacttacacccgtgtgcttggtttactggttcagtagttcctcagaccatgacaaatggaaggagctatactgaagaacaatgaggaactctttgaattttcctgagcacgtgacttactgctgggccttcccttaaacatcagaacaatgagatttgtccctattttacaggggttagaatagactattaagggacaactgagaaaggacagagaagtgacagccagaggttgagaggggccataaaaacatacaatcagacatatatctgctaccactttgtagcaagatggttcctatcataactctgggtcaaaaagatagtaatttggtttataatgttgaaagaaagcagaaagagatggggtctcactgtcgttctggagtgtagtggttcaatcatctctcactgcagccttgaacccctaggctcaaaggatcctcccacctcagcctcctgaatagctgggactagaggcatgagccactatgtcttgctgattaaaaattgtttttgc

SEQ ID NO: 149870 - DNA, 1142 bp, Homo sapiens
  Payload ID: 9608
  Gene Symbol: LYPD8
  Gene Name: LY6/PLAUR domain containing 8
  ENST ID: ENST00000590317
  CDS Start-End: 233-946
cttctgtaggacagtcaccaggccagatccagaagcctctctaggctccagctttctctgtggaagatgacagcaattatagcaggaccctgccaggctgtcgaaaagattccgcaataaaactttgccagtgggaagtacctagtgaaacggcctaagatgccacttcttctcatgtcccaggcttgaggccctgtggtccccatccttgggagaagtcagctccagcaccatgaagggcatcctcgttgctggtatcactgcagtgcttgttgcagctgtagaatctctgagctgcgtgcagtgtaattcatgggaaaaatcctgtgtcaacagcattgcctctgaatgtccctcacatgccaacaccagctgtatcagctcctcagccagctcctctctagagacaccagtcagattataccagaatatgttctgctcagcggagaactgcagtgaggagacacacattacagccttcactgtccacgtgtctgctgaagaacactttcattttgtaagccagtgctgccaaggaaaggaatgcagcaacaccagcgatgccctggaccctcccctgaagaacgtgtccagcaacgcagagtgccctgcttgttatgaatctaatggaacttcctgtcatgggaagccctggaaatgctatgaagaagaacagtgtgtctttctagttgcagaacttaagaatgacattgagtctaagagtctcgtgctgaaaggctgttccaacgtcagtaacgccacctgtcagttcctgtctggtgaaaacaagactcttggaggagtcatctttcgaaagtttgagtgtgcaaatgtaaacagcttaacccccacgtctgcaccaaccacttcccacaacgtgggctccaaagcttccctctacctcttggcccttgccagcctccttcttcggggactgctgccctgaggtcctggggctgcactttgcccagcaccccatttctgcttctctgaggtccagagcaccccctgcggtgctgacaccctctttccctgctctgccccgtttaactgcccagtaagtgggagtcacaggtctccaggcaatgccgacagctgccttgttcttcattattaaagcactggttcattcactgcccaaa

SEQ ID NO: 149871 - DNA, 5482 bp, Homo sapiens
  Payload ID: 9609
  Gene Symbol: LY75-CD302
  Gene Name: LY75-CD302 readthrough
  ENST ID: ENST00000505052
  CDS Start-End: 29-5482
ccggccggaaggcttgcgccagctcaggatgaggacaggctgggcgacccctcgccgcccggcggggctcctcatgctgctcttctggttcttcgatctcgcggagccctctggccgcgcagctaatgaccccttcaccatcgtccatggaaatacgggcaagtgcatcaagccagtgtatggctggatagtagcagacgactgtgatgaaactgaggacaagttatggaagtgggtgtcccagcatcggctctttcatttgcactcccaaaagtgccttggcctcgatattaccaaatcggtaaatgagctgagaatgttcagctgtgactccagtgccatgctgtggtggaaatgtgagcaccactctctgtacggagctgcccggtaccggctggctctgaaggatggacatggcacagcaatctcaaatgcatctgatgtctggaagaaaggaggctcagaggaaagcctttgtgaccagccttatcatgagatctataccagagatgggaactcttatgggagaccttgtgaatttccattcttaattgatgggacctggcatcatgattgcattcttgatgaagatcatagtgggccatggtgtgccaccaccttaaattatgaatatgaccgaaagtggggcatctgcttaaagcctgaaaacggttgtgaagataattgggaaaagaacgagcagtttggaagttgctaccaatttaatactcagacggctctttcttggaaagaagcttatgtttcatgtcagaatcaaggagctgatttactgagcatcaacagtgctgctgaattaacttaccttaaagaaaaagaaggcattgctaagattttctggattggtttaaatcagctatactctgctagaggctgggaatggtcagaccacaaaccattaaactttctcaactgggatccagacaggcccagtgcacctactataggtggctccagctgtgcaagaatggatgctgagtctggtctgtggcagagcttttcctgtgaagctcaactgccctatgtctgcaggaaaccattaaataatacagtggagttaacagatgtctggacatactcagatacccgctgtgatgcaggctggctgccaaataatggattttgctatctgctggtaaatgaaagtaattcctgggataaggcacatgcgaaatgcaaagccttcagtagtgacctaatcagcattcattctctagcagatgtggaggtggttgtcacaaaactccataatgaggatatcaaagaagaagtgtggataggccttaagaacataaacataccaactttatttcagtggtcagatggtactgaagttactctaacatattgggatgagaatgagccaaatgttccctacaataagacgcccaactgtgtttcctacttaggagagctaggtcagtggaaagtccaatcatgtgaggagaaactaaaatatgtatgcaagagaaagggagaaaaactgaatgacgcaagttctgataagatgtgtcctccagatgagggctggaagagacatggagaaacctgttacaagatttatgaggatgaggtcccttttggaacaaactgcaatctgactatcactagcagatttgagcaagaatacctaaatgatttgatgaaaaagtatgataaatctctaagaaaatacttctggactggcctgagagatgtagattcttgtggagagtataactgggcaactgttggtggaagaaggcgggctgtaaccttttccaactggaattttcttgagccagcttccccgggcggctgcgtggctatgtctactggaaagtctgttggaaagtgggaggtgaaggactgcagaagcttcaaagcactttcaatttgcaagaaaatgagtggaccccttgggcctgaagaagcatcccctaagcctgatgacccctgtcctgaaggctggcagagtttccccgcaagtctttcttgttataaggtattccatgcagaaagaattgtaagaaagaggaactgggaagaagctgaacgattctgccaagcccttggagcacacctttctagcttcagccatgtggatgaaataaaggaatttcttcactttttaacggaccagttcagtggccagcattggctgtggattggtttgaataaaaggagcccagatttacaaggatcctggcaatggagtgatcgtacaccagtgtctactattatcatgccaaatgagtttcagcaggattatgacatcagagactgtgctgctgtcaaggtatttcataggccatggcgaagaggctggcatttctatgatgatagagaatttatttatttgaggccttttgcttgtgatacaaaacttgaatgggtgtgccaaattccaaaaggccgtactccaaaaacaccagactggtacaatccagaccgtgctggaattcatggacctccacttataattgaaggaagtgaatattggtttgttgctgatcttcacctaaactatgaagaagccgtcctgtactgtgccagcaatcacagctttcttgcaactataacatcttttgtgggactaaaagccatcaaaaacaaaatagcaaatatatctggtgatggacagaagtggtggataagaattagcgagtggccaatagatgatcattttacatactcacgatatccatggcaccgctttcctgtgacatttggagaggaatgcttgtacatgtctgccaagacttggcttatcgacttaggtaaaccaacagactgtagtaccaagttgcccttcatctgtgaaaaatataatgtttcttcgttagagaaatacagcccagattctgcagctaaagtgcaatgttctgagcaatggattccttttcagaataagtgttttctaaagatcaaacccgtgtctctcacattttctcaagcaagcgatacctgtcactcctatggtggcacccttccttcagtgttgagccagattgaacaagactttattacatccttgcttccggatatggaagctactttatggattggtttgcgctggactgcctatgaaaagataaacaaatggacagataacagagagctgacgtacagtaactttcacccattattggttagtgggaggctgagaataccagaaaatttttttgaggaagagtctcgctaccactgtgccctaatactcaacctccaaaaatcaccgtttactgggacgtggaattttacatcctgcagtgaacgccactttgtgtctctctgtcagaaatattcagaagttaaaagcagacagacgttgcagaatgcttcagaaactgtaaagtatctaaataatctgtacaaaataatcccaaagactctgacttggcacagtgctaaaagggagtgtctgaaaagtaacatgcagctggtgagcatcacggacccttaccagcaggcattcctcagtgtgcaggcgctccttcacaactcttccttatggatcggactcttcagtcaagatgatgaactcaactttggttggtcagatgggaaacgtcttcattttagtcgctgggctgaaactaatgggcaactcgaagactgtgtagtattagacactgatggattctggaaaacagttgattgcaatgacaatcaaccaggtgctatttgctactattcaggaaatgagactgaaaaagaggtcaaaccagttgacagtgttaaatgtccatctcctgttctaaatactccgtggataccatttcagaactgttgctacaatttcataataacaaagaataggcatatggcaacaacacaggatgaagttcatactaaatgccagaaactgaatccaaaatcacatattctgagtattcgagatgaaaaggagaataactttgttcttgagcaactgctgtacttcaattatatggcttcatgggtcatgttaggaataacttatagaaataagtctcttatgtggtttgataagaccccactgtcatatacacattggagagcaggaagaccaactataaaaaatgagaagtttttggctggtttaagtactgacggcttctgggatattcaaacctttaaagttattgaagaagcagtttattttcaccagcacagcattcttgcttgtaaaattgaaatggttgactacaaagaagaatataatactacactgccacagtttatgccatatgaagatggtatttacagtgttattcaaaaaaaggtaacatggtatgaagcattaaacatgtgttctcaaagtggaggtcacttggcaagcgttcacaaccaaaatggccagctctttctggaagatattgtaaaacgtgatggatttccactatgggttgggctctcaagtcatgatggaagtgaatcaagttttgaatggtctgatggtagtacatttgactatatcccatggaaaggccaaacatctcctggaaattgtgttctcttggatccaaaaggaacttggaaacatgaaaaatgcaactctgttaaggatggtgctatttgttataaacctacaaaatctaaaaagctgtcccgtcttacatattcatcaagatgtccagcagcaaaagagaatgggtcacggtggatccagtacaagggtcactgttacaagtctgatcaggcattgcacagtttttcagaggccaaaaaattgtgttcaaaacatgatcactctgcaactatcgtttccataaaagatgaagatgagaataaatttgtgagcagactgatgagggaaaataataacattaccatgagagtttggcttggattatctcaacattctgttgactgtccttcatctacttggattcagttccaagacagttgttacatttttctccaagaagccatcaaagtagaaagcatagaggatgtcagaaatcagtgtactgaccatggagcggacatgataagcatacataatgaagaagaaaatgcttttatactggatactttgaaaaagcaatggaaaggcccagatgatatcctactaggcatgttttatgacacagatgatgcgagtttcaagtggtttgataattcaaatatgacatttgataagtggacagaccaagatgatgatgaggatttagttgacacctgtgcttttctgcacatcaagacaggtgaatggaaaaaaggaaattgtgaagtttcttctgtggaaggaacactatgcaaaacagctatcccatacaaaaggaaatatttatcagataaccacattttaatatcagcattggtgattgctagcacggtaattttgacagttttgggagcaatcatttggttcctgtacaaaaaacattctgattctcgtttcaccacagttttttcaaccgcaccccaatcaccttataatgaagactgtgttttggtagttggagaagaaaatgaatatcctgttcaatttgactaa

SEQ ID NO: 149872 - DNA, 5650 bp, Homo sapiens
  Payload ID: 9609
  Gene Symbol: LY75-CD302
  Gene Name: LY75-CD302 readthrough
  ENST ID: ENST00000504764
  CDS Start-End: 29-5650
ccggccggaaggcttgcgccagctcaggatgaggacaggctgggcgacccctcgccgcccggcggggctcctcatgctgctcttctggttcttcgatctcgcggagccctctggccgcgcagctaatgaccccttcaccatcgtccatggaaatacgggcaagtgcatcaagccagtgtatggctggatagtagcagacgactgtgatgaaactgaggacaagttatggaagtgggtgtcccagcatcggctctttcatttgcactcccaaaagtgccttggcctcgatattaccaaatcggtaaatgagctgagaatgttcagctgtgactccagtgccatgctgtggtggaaatgtgagcaccactctctgtacggagctgcccggtaccggctggctctgaaggatggacatggcacagcaatctcaaatgcatctgatgtctggaagaaaggaggctcagaggaaagcctttgtgaccagccttatcatgagatctataccagagatgggaactcttatgggagaccttgtgaatttccattcttaattgatgggacctggcatcatgattgcattcttgatgaagatcatagtgggccatggtgtgccaccaccttaaattatgaatatgaccgaaagtggggcatctgcttaaagcctgaaaacggttgtgaagataattgggaaaagaacgagcagtttggaagttgctaccaatttaatactcagacggctctttcttggaaagaagcttatgtttcatgtcagaatcaaggagctgatttactgagcatcaacagtgctgctgaattaacttaccttaaagaaaaagaaggcattgctaagattttctggattggtttaaatcagctatactctgctagaggctgggaatggtcagaccacaaaccattaaactttctcaactgggatccagacaggcccagtgcacctactataggtggctccagctgtgcaagaatggatgctgagtctggtctgtggcagagcttttcctgtgaagctcaactgccctatgtctgcaggaaaccattaaataatacagtggagttaacagatgtctggacatactcagatacccgctgtgatgcaggctggctgccaaataatggattttgctatctgctggtaaatgaaagtaattcctgggataaggcacatgcgaaatgcaaagccttcagtagtgacctaatcagcattcattctctagcagatgtggaggtggttgtcacaaaactccataatgaggatatcaaagaagaagtgtggataggccttaagaacataaacataccaactttatttcagtggtcagatggtactgaagttactctaacatattgggatgagaatgagccaaatgttccctacaataagacgcccaactgtgtttcctacttaggagagctaggtcagtggaaagtccaatcatgtgaggagaaactaaaatatgtatgcaagagaaagggagaaaaactgaatgacgcaagttctgataagatgtgtcctccagatgagggctggaagagacatggagaaacctgttacaagatttatgaggatgaggtcccttttggaacaaactgcaatctgactatcactagcagatttgagcaagaatacctaaatgatttgatgaaaaagtatgataaatctctaagaaaatacttctggactggcctgagagatgtagattcttgtggagagtataactgggcaactgttggtggaagaaggcgggctgtaaccttttccaactggaattttcttgagccagcttccccgggcggctgcgtggctatgtctactggaaagtctgttggaaagtgggaggtgaaggactgcagaagcttcaaagcactttcaatttgcaagaaaatgagtggaccccttgggcctgaagaagcatcccctaagcctgatgacccctgtcctgaaggctggcagagtttccccgcaagtctttcttgttataaggtattccatgcagaaagaattgtaagaaagaggaactgggaagaagctgaacgattctgccaagcccttggagcacacctttctagcttcagccatgtggatgaaataaaggaatttcttcactttttaacggaccagttcagtggccagcattggctgtggattggtttgaataaaaggagcccagatttacaaggatcctggcaatggagtgatcgtacaccagtgtctactattatcatgccaaatgagtttcagcaggattatgacatcagagactgtgctgctgtcaaggtatttcataggccatggcgaagaggctggcatttctatgatgatagagaatttatttatttgaggccttttgcttgtgatacaaaacttgaatgggtgtgccaaattccaaaaggccgtactccaaaaacaccagactggtacaatccagaccgtgctggaattcatggacctccacttataattgaaggaagtgaatattggtttgttgctgatcttcacctaaactatgaagaagccgtcctgtactgtgccagcaatcacagctttcttgcaactataacatcttttgtgggactaaaagccatcaaaaacaaaatagcaaatatatctggtgatggacagaagtggtggataagaattagcgagtggccaatagatgatcattttacatactcacgatatccatggcaccgctttcctgtgacatttggagaggaatgcttgtacatgtctgccaagacttggcttatcgacttaggtaaaccaacagactgtagtaccaagttgcccttcatctgtgaaaaatataatgtttcttcgttagagaaatacagcccagattctgcagctaaagtgcaatgttctgagcaatggattccttttcagaataagtgttttctaaagatcaaacccgtgtctctcacattttctcaagcaagcgatacctgtcactcctatggtggcacccttccttcagtgttgagccagattgaacaagactttattacatccttgcttccggatatggaagctactttatggattggtttgcgctggactgcctatgaaaagataaacaaatggacagataacagagagctgacgtacagtaactttcacccattattggttagtgggaggctgagaataccagaaaatttttttgaggaagagtctcgctaccactgtgccctaatactcaacctccaaaaatcaccgtttactgggacgtggaattttacatcctgcagtgaacgccactttgtgtctctctgtcagaaatattcagaagttaaaagcagacagacgttgcagaatgcttcagaaactgtaaagtatctaaataatctgtacaaaataatcccaaagactctgacttggcacagtgctaaaagggagtgtctgaaaagtaacatgcagctggtgagcatcacggacccttaccagcaggcattcctcagtgtgcaggcgctccttcacaactcttccttatggatcggactcttcagtcaagatgatgaactcaactttggttggtcagatgggaaacgtcttcattttagtcgctgggctgaaactaatgggcaactcgaagactgtgtagtattagacactgatggattctggaaaacagttgattgcaatgacaatcaaccaggtgctatttgctactattcaggaaatgagactgaaaaagaggtcaaaccagttgacagtgttaaatgtccatctcctgttctaaatactccgtggataccatttcagaactgttgctacaatttcataataacaaagaataggcatatggcaacaacacaggatgaagttcatactaaatgccagaaactgaatccaaaatcacatattctgagtattcgagatgaaaaggagaataactttgttcttgagcaactgctgtacttcaattatatggcttcatgggtcatgttaggaataacttatagaaataagtctcttatgtggtttgataagaccccactgtcatatacacattggagagcaggaagaccaactataaaaaatgagaagtttttggctggtttaagtactgacggcttctgggatattcaaacctttaaagttattgaagaagcagtttattttcaccagcacagcattcttgcttgtaaaattgaaatggttgactacaaagaagaatataatactacactgccacagtttatgccatatgaagatggtatttacagtgttattcaaaaaaaggtaacatggtatgaagcattaaacatgtgttctcaaagtggaggtcacttggcaagcgttcacaaccaaaatggccagctctttctggaagatattgtaaaacgtgatggatttccactatgggttgggctctcaagtcatgatggaagtgaatcaagttttgaatggtctgatggtagtacatttgactatatcccatggaaaggccaaacatctcctggaaattgtgttctcttggatccaaaaggaacttggaaacatgaaaaatgcaactctgttaaggatggtgctatttgttataaacctacaaaatctaaaaagctgtcccgtcttacatattcatcaagatgtccagcagcaaaagagaatgggtcacggtggatccagtacaagggtcactgttacaagtctgatcaggcattgcacagtttttcagaggccaaaaaattgtgttcaaaacatgatcactctgcaactatcgtttccataaaagatgaagatgagaataaatttgtgagcagactgatgagggaaaataataacattaccatgagagtttggcttggattatctcaacattctgttgaccagtcttggagttggttagatggatcagaagtgacatttgtcaaatgggaaaataaaagtaagagtggtgttggaagatgtagcatgttgatagcttcaaatgaaacttggaaaaaagttgaatgtgaacatggttttggaagagttgtctgcaaagtgcctctggactgtccttcatctacttggattcagttccaagacagttgttacatttttctccaagaagccatcaaagtagaaagcatagaggatgtcagaaatcagtgtactgaccatggagcggacatgataagcatacataatgaagaagaaaatgcttttatactggatactttgaaaaagcaatggaaaggcccagatgatatcctactaggcatgttttatgacacagatgatgcgagtttcaagtggtttgataattcaaatatgacatttgataagtggacagaccaagatgatgatgaggatttagttgacacctgtgcttttctgcacatcaagacaggtgaatggaaaaaaggaaattgtgaagtttcttctgtggaaggaacactatgcaaaacagctatcccatacaaaaggaaatatttatcagataaccacattttaatatcagcattggtgattgctagcacggtaattttgacagttttgggagcaatcatttggttcctgtacaaaaaacattctgattctcgtttcaccacagttttttcaaccgcaccccaatcaccttataatgaagactgtgttttggtagttggagaagaaaatgaatatcctgttcaatttgactaa

SEQ ID NO: 149873 - DNA, 3273 bp, Homo sapiens
  Payload ID: 9610
  Gene Symbol: LYVE1
  Gene Name: lymphatic vessel endothelial hyaluronan receptor 1
  Uniprot ID: Q9Y5Y7
  ENST ID: ENST00000256178
  CDS Start-End: 160-1128
agcagggaaatccggatgtctcggttatgaagtggagcagtgagtgtgagcctcaacatagttccagaactctccatccggactagttattgagcatctgcctctcatatcaccagtggccatctgaggtgtttccctggctctgaaggggtaggcacgatggccaggtgcttcagcctggtgttgcttctcacttccatctggaccacgaggctcctggtccaaggctctttgcgtgcagaagagctttccatccaggtgtcatgcagaattatggggatcacccttgtgagcaaaaaggcgaaccagcagctgaatttcacagaagctaaggaggcctgtaggctgctgggactaagtttggccggcaaggaccaagttgaaacagccttgaaagctagctttgaaacttgcagctatggctgggttggagatggattcgtggtcatctctaggattagcccaaaccccaagtgtgggaaaaatggggtgggtgtcctgatttggaaggttccagtgagccgacagtttgcagcctattgttacaactcatctgatacttggactaactcgtgcattccagaaattatcaccaccaaagatcccatattcaacactcaaactgcaacacaaacaacagaatttattgtcagtgacagtacctactcggtggcatccccttactctacaatacctgcccctactactactcctcctgctccagcttccacttctattccacggagaaaaaaattgatttgtgtcacagaagtttttatggaaactagcaccatgtctacagaaactgaaccatttgttgaaaataaagcagcattcaagaatgaagctgctgggtttggaggtgtccccacggctctgctagtgcttgctctcctcttctttggtgctgcagctggtcttggattttgctatgtcaaaaggtatgtgaaggccttcccttttacaaacaagaatcagcagaaggaaatgatcgaaaccaaagtagtaaaggaggagaaggccaatgatagcaaccctaatgaggaatcaaagaaaactgataaaaacccagaagagtccaagagtccaagcaaaactaccgtgcgatgcctggaagctgaagtttagatgagacagaaatgaggagacacacctgaggctggtttctttcatgctccttaccctgccccagctggggaaatcaaaagggccaaagaaccaaagaagaaagtccacccttggttcctaactggaatcagctcaggactgccattggactatggagtgcaccaaagagaatgcccttctccttattgtaaccctgtctggatcctatcctcctacctccaaagcttcccacggcctttctagcctggctatgtcctaataatatcccactgggagaaaggagttttgcaaagtgcaaggacctaaaacatctcatcagtatccagtggtaaaaaggcctcctggctgtctgaggctaggtgggttgaaagccaaggagtcactgagaccaaggctttctctactgattccgcagctcagaccctttcttcagctctgaaagagaaacacgtatcccacctgacatgtccttctgagcccggtaagagcaaaagaatggcagaaaagtttagcccctgaaagccatggagattctcataacttgagacctaatctctgtaaagctaaaataaagaaatagaacaaggctgaggatacgacagtacactgtcagcagggactgtaaacacagacagggtcaaagtgttttctctgaacacattgagttggaatcactgtttagaacacacacacttactttttctggtctctaccactgctgatattttctctaggaaatatacttttacaagtaacaaaaataaaaactcttataaatttctatttttatctgagttacagaaatgattactaaggaagattactcagtaatttgtttaaaaagtaataaaattcaacaaacatttgctgaatagctactatatgtcaagtgctgtgcaaggtattacactctgtaattgaatattattcctcaaaaaattgcacatagtagaacgctatctgggaagctatttttttcagttttgatatttctagcttatctacttccaaactaatttttatttttgctgagactaatcttattcattttctctaatatggcaaccattataaccttaatttattattaacatacctaagaagtacattgttacctctatataccaaagcacattttaaaagtgccattaacaaatgtatcactagccctcctttttccaacaagaagggactgagagatgcagaaatatttgtgacaaaaaattaaagcatttagaaaacttctttgctttcttatttacgtagatgcattatacctttcatgtaaaattaaagtgaggaccagatcatatcatattgtttgcaaaaataaaagggacaatgttggttgttaaaatacaagcatatgtcaaccaaacagcatatatcatatggggctattcatgctccaaacattttattttgagttggccaagtacatacacattaaacagtcctttactagagatgctggccctccatttccatccatttcagaattcaccagggagccagagatccaggatggctcattcgtctcacttttgaccgccctgcttctctagttttctctttccctcccgcttagactgctaattgtcttcttcccctcaccagtgaccccacagctccgtggttccttcggcccagatgccacaacctgctggcataatcttttccggttggcccacggagtataatcttaaaatttgatttcatttccaggcattaaaaatcaagagatttcacatggttacatttctgggttccctctaaaaatggaaagatctggaagtaaagaacccatgttccctcatagcaatcattatctgatactgagtagcagctgtcccctttcaatggggtctgctctttttgtttcaccacagtcctcatgactctctgttgcacactcatgccaaagtaaaggtgccctttcctatgaactttgtaacactgtggccttttcttcacacccagcccacgtccctcatatatatcacctgcctgccccagtaggtctatgagtttgaaactggtttgtcagtccttaagctttatcagcttcatccatttctcagggagtaaagaagaaaagagggaaagcgcctaagtagtgatcttccctctgtgtgttagctgaaa

SEQ ID NO: 149874 - DNA, 1823 bp, Homo sapiens
  Payload ID: 9610
  Gene Symbol: LYVE1
  Gene Name: lymphatic vessel endothelial hyaluronan receptor 1
  ENST ID: ENST00000438354
  CDS Start-End: 187-402
gtgaccttgacaagtcagaagcttgaaagcagggaaatccggatgtctcggttatgaagtggagcagtgagtgtgagcctcaacatagttccagaactctccatccggactagttattgagcatctgcctctcatatcaccagtggccatctgaggtgtttccctggctctgaaggggtaggcacgatggccaggtgcttcagcctggtgttgcttctcacttccatctggaccacgaggctcctggtccaaggctctttgcgtgcagaaggtagttcttttttagctctgtgttcttgttcagcaatagagatgaagccttctaatcatttttctgttcaactagtgtgtattcttttacagctatggctgggttggagatggattcgtggtcatctctaggattagcccaaaccccaagtgtgggaaaaatggggtgggtgtcctgatttggaaggttccagtgagccgacagtttgcagcctattgttacaactcatctgatacttggactaactcgtgcattccagaaattatcaccaccaaagatcccatattcaacactcaaactgcaacacaaacaacagaatttattgtcagtgacagtacctactcggtggcatccccttactctacaatacctgcccctactactactcctcctgctccagcttccacttctattccacggagaaaaaaattgatttgtgtcacagaagtttttatggaaactagcaccatgtctacagaaactgaaccatttgttgaaaataaagcagcattcaagaatgaagctgctgggtttggaggtgtccccacggctctgctagtgcttgctctcctcttctttggtgctgcagctggtcttggattttgctatgtcaaaaggtatgtgaaggccttcccttttacaaacaagaatcagcagaaggaaatgatcgaaaccaaagtagtaaaggaggagaaggccaatgatagcaaccctaatgaggaatcaaagaaaactgataaaaacccagaagagtccaagagtccaagcaaaactaccgtgcgatgcctggaagctgaagtttagatgagacagaaatgaggagacacacctgaggctggtttctttcatgctccttaccctgccccagctggggaaatcaaaagggccaaagaaccaaagaagaaagtccacccttggttcctaactggaatcagctcaggactgccattggactatggagtgcaccaaagagaatgcccttctccttattgtaaccctgtctggatcctatcctcctacctccaaagcttcccacggcctttctagcctggctatgtcctaataatatcccactgggagaaaggagttttgcaaagtgcaaggacctaaaacatctcatcagtatccagtggtaaaaaggcctcctggctgtctgaggctaggtgggttgaaagccaaggagtcactgagaccaaggctttctctactgattccgcagctcagaccctttcttcagctctgaaagagaaacacgtatcccacctgacatgtccttctgagcccggtaagagcaaaagaatggcagaaaagtttagcccctgaaagccatggagattctcataacttgagacctaatctctgtaaagctaaaataaagaaatagaacaaggctgaggatacgacagtacactgtcagcagggactgtaaacacagacagggtcaaagtgttttctctgaacacattgagttggaatcactgtttagaacacacacacttactttttctggtctctaccactgctgatattttctctaggaaatatactttta

SEQ ID NO: 149875 - DNA, 936 bp, Homo sapiens
  Payload ID: 9610
  Gene Symbol: LYVE1
  Gene Name: lymphatic vessel endothelial hyaluronan receptor 1
  ENST ID: ENST00000529598
  CDS Start-End: 46-702
agtggccatctgaggtgtttccctggctctgaaggggtaggcacgatggccaggtgcttcagcctggtgttgcttctcacttccatctggaccacgaggctcctggtccaaggctctttgcgtgcagaagatacttggactaactcgtgcattccagaaattatcaccaccaaagatcccatattcaacactcaaactgcaacacaaacaacagaatttattgtcagtgacagtacctactcggtggcatccccttactctacaatacctgcccctactactactcctcctgctccagcttccacttctattccacggagaaaaaaattgatttgtgtcacagaagtttttatggaaactagcaccatgtctacagaaactgaaccatttgttgaaaataaagcagcattcaagaatgaagctgctgggtttggaggtgtccccacggctctgctagtgcttgctctcctcttctttggtgctgcagctggtcttggattttgctatgtcaaaaggtatgtgaaggccttcccttttacaaacaagaatcagcagaaggaaatgatcgaaaccaaagtagtaaaggaggagaaggccaatgatagcaaccctaatgaggaatcaaagaaaactgataaaaacccagaagagtccaagagtccaagcaaaactaccgtgcgatgcctggaagctgaagtttagatgagacagaaatgaggagacacacctgaggctggtttctttcatgctccttaccctgccccagctggggaaatcaaaagggccaaagaaccaaagaagaaagtccacccttggttcctaactggaatcagctcaggactgccattggactatggagtgcaccaaagagaatgcccttctccttattgtaaccctgtctggatcctatcctcctacctccaaagcttcccacgg

SEQ ID NO: 149876 - DNA, 1490 bp, Homo sapiens
  Payload ID: 9611
  Gene Symbol: LYL1
  Gene Name: lymphoblastic leukemia associated hematopoiesis regulator 1
  Uniprot ID: P12980
  ENST ID: ENST00000264824
  CDS Start-End: 362-1204
cagcctggcccttatctgcactgggccagcatcctccggccgctgcgccgccaggggtgagagggaggaaaccgggccgccgggggcggggagaaggcgggccggcccgggagccgctcactttccctgggggggacctacgcggagacctcggctatcctggccttccgaggcccacgaggaggcgcggcccaacgccggggcctggagcattgaggccggaccctcgcgagacagcagagcctggcctgacgctggaaaccacaccctggcccagactgccagccctgacgggacagagccagggcactcaccaggctgcaagaacagtgctggggtgagtacccccacgtcggggtccatgtgcccgcctcaggcacaggcagaggtgggccccaccatgactgagaaggcagagatggtgtgtgcccccagcccagcgcctgccccaccccctaagcctgcctcgcctgggcccccgcaggtggaggaggtgggccaccgaggaggctcctcgccccccaggctgccacctggtgtaccagtgatcagcctgggccacagcaggcccccaggggtagccatgcccaccacagagctgggcactctgcggcccccgctgctgcaactctccaccctgggaactgccccgcccactttggccctgcactaccaccctcaccccttcctcaacagtgtctacattgggccagcaggaccttttagcatcttccctagcagccggttgaagcggagaccaagccactgtgagctggacctggctgaggggcaccagccccagaaggtggcccggcgcgtgttcaccaacagccgggagcgctggcggcagcagaacgttaacggcgccttcgccgagctgaggaagctgctgccgacgcacccgcccgaccggaagctgagcaagaacgaggtgctccgcctagccatgaagtacatcggcttcctggtgcggctgctgcgcgaccaagccgcagctctggccgcaggccccacccctcccgggcctcgcaaacggccggtgcaccgggtcccagacgacggcgcccgccggggatccggacgcagggccgaggcggcagcgcgctcgcagcccgcgcccccggccgaccccgacggcagccccggtggagcggcccggcccatcaagatggagcaaaccgctttgagcccagaggtgcggtgaccgcacgcggcagcacctctgagccggagggcaccagggactcggcccagggccgtcaaggaaagggcagtggacgtgctgcgcatgttcgggagcgaactcccccgaagaaggaccagtgaagacgtcaggggcaaggtctcgggggtccggaagggtgatcatcgacccccaagggacccgcagacccttaaaaaaatcacccacaaccctctggaagtggccttgcccggtccccttcccaggggcgaggtcggcaaagcaacatggcagagcagtcatagga

SEQ ID NO: 149877 - DNA, 902 bp, Homo sapiens
  Payload ID: 9611
  Gene Symbol: LYL1
  Gene Name: lymphoblastic leukemia associated hematopoiesis regulator 1
  ENST ID: ENST00000590974
  CDS Start-End: 731-902
gggagtgtgcaaagccaaagggcagactcggacataagaggaggcagcttccctgcctcagtttaccccctgcgtgcatccaggcacctccctccccggctgccctggggcccgggtccccagaggcccggggtccctacagtggctgggggagcggaaggcgaagccctgaggggtggcggaccgagtcctgccagcgccggctgggggcggggccgggaggcccgcgctgctaggtccccgcccgctggtttcctccggggtcagccaggctccttatcaggcgcggccaggcagcctggcccttatctgcactgggccagcatcctccggccgctgcgccgccaggggtgagagggaggaaaccgggccgccgggggcggggagaaggcgggccggcccgggagccgctcactttccctgggggggacctacgcggagacctcggctatcctggccttccgaggcccacgaggaggcgcggcccaacgccggggcctggagcattgaggccggaccctcgcgagacagcagagcctggcctgacgctggaaaccacaccctggcccagactgccagccctgacgggacagagccagggcactcaccaggctgcaagaacagtgctggggtggaggaggtgggccaccgaggaggctcctcgccccccaggctgccacctggtgtaccagtgatcagcctgggccacagcaggcccccaggggtagccatgcccaccacagagctgggcactctgcggcccccgctgctgcaactctccaccctgggaactgccccgcccactttggccctgcactaccaccctcaccccttcctcaacagtgtctacattgggccagcaggaccttttagcatcttccctagcagccggttgaagcgga

SEQ ID NO: 149878 - DNA, 804 bp, Homo sapiens
  Payload ID: 9612
  Gene Symbol: LY6D
  Gene Name: lymphocyte antigen 6 complex, locus D
  Uniprot ID: Q14210
  ENST ID: ENST00000301263
  CDS Start-End: 77-463
gcccacccccgcccagcccgtgcctataaggccttggcaatgcaggggcccgcactgctcccagacgacatcagagatgaggacagcattgctgctccttgcagccctggctgtggctacagggccagcccttaccctgcgctgccacgtgtgcaccagctccagcaactgcaagcattctgtggtctgcccggccagctctcgcttctgcaagaccacgaacacagtggagcctctgagggggaatctggtgaagaaggactgtgcggagtcgtgcacacccagctacaccctgcaaggccaggtcagcagcggcaccagctccacccagtgctgccaggaggacctgtgcaatgagaagctgcacaacgctgcacccacccgcaccgccctcgcccacagtgccctcagcctggggctggccctgagcctcctggccgtcatcttagcccccagcctgtgaccttccccccagggaaggcccctcatgcctttccttccctttctctggggattccacacctctcttccccagccgcaacgggggtgccaggagccccaggctgagggcttccccgaaagtctgggaccaggtccaggtgggcatggaatgctgatgacttggagcaggccccacagaccccacagaggatgaagccaccccacagaggatgcagcccccagctgcatggaaggtggaggacagaagccctgtggatccccggatttcacactccttctgttttgttgccgtttatttttgtactcaaatctctacatggagataaatgatttaaaccagtg

SEQ ID NO: 149879 - DNA, 1181 bp, Homo sapiens
  Payload ID: 9613
  Gene Symbol: LY6E
  Gene Name: lymphocyte antigen 6 complex, locus E
  Uniprot ID: Q16553
  ENST ID: ENST00000292494
  CDS Start-End: 163-558
cccggggccgcgcggctgcctgggaggctccgggccagccgcggtccagagcgcgcgaggttcggggagctcggccaggctgctggtacctgcgtccgcccggcgagcaggacaggctgctttggtttgtgacctccaggcaggacggccatcctctccagaatgaagatcttcttgccagtgctgctggctgcccttctgggtgtggagcgagccagctcgctgatgtgcttctcctgcttgaaccagaagagcaatctgtactgcctgaagccgaccatctgctccgaccaggacaactactgcgtgactgtgtctgctagtgccggcattgggaatctcgtgacatttggccacagcctgagcaagacctgttccccggcctgccccatcccagaaggcgtcaatgttggtgtggcttccatgggcatcagctgctgccagagctttctgtgcaatttcagtgcggccgatggcgggctgcgggcaagcgtcaccctgctgggtgccgggctgctgctgagcctgctgccggccctgctgcggtttggcccctgaccgcccagaccctgtcccccgatcccccagctcaggaaggaaagcccagccctttctggatcccacagtgtatgggagcccctgactcctcacgtgcctgatctgtgcccttggtcccaggtcaggcccaccccctgcacctccacctgccccagcccctgcctctgccccaagtggggccagctgccctcacttctggggtggatgatgtgaccttccttgggggaccgcggaagggacgagggttccctggagtcttacggtccaacatcaggaccaagtcccatggacatgctgacagggtccccagggagaccgtgtcagtagggatgtgtgcctggctgtgtacgtgggtgtgcagtgcacgtgagagcacgtggcggcttctgggggccatgtttggggagggaggtgtgccagcagcctggagagcctcagtccctgtagccccctgccctggcacagctgcatgcacttcaagggcagcctttgggggttggggtttctgccacttccgggtctaggccctgccccaaatccagccagtcctgccccagcccacccccacattggagccctcctgctgctttggtgcctcaaataaatacagatgtcccccagct

SEQ ID NO: 149880 - DNA, 1173 bp, Homo sapiens
  Payload ID: 9613
  Gene Symbol: LY6E
  Gene Name: lymphocyte antigen 6 complex, locus E
  Uniprot ID: Q16553
  ENST ID: ENST00000429120
  CDS Start-End: 157-552
ccggggccgcgcggctgcctgggaggctccgggccagccgcggtccagagcgcgcgaggttcggggagctcggccaggctgctggtacctgcgtccgcccggcggacaggctgctttggtttgtgacctccaggcaggacggccatcctctccagaatgaagatcttcttgccagtgctgctggctgcccttctgggtgtggagcgagccagctcgctgatgtgcttctcctgcttgaaccagaagagcaatctgtactgcctgaagccgaccatctgctccgaccaggacaactactgcgtgactgtgtctgctagtgccggcattgggaatctcgtgacatttggccacagcctgagcaagacctgttccccggcctgccccatcccagaaggcgtcaatgttggtgtggcttccatgggcatcagctgctgccagagctttctgtgcaatttcagtgcggccgatggcgggctgcgggcaagcgtcaccctgctgggtgccgggctgctgctgagcctgctgccggccctgctgcggtttggcccctgaccgcccagaccctgtcccccgatcccccagctcaggaaggaaagcccagccctttctggatcccacagtgtatgggagcccctgactcctcacgtgcctgatctgtgcccttggtcccaggtcaggcccaccccctgcacctccacctgccccagcccctgcctctgccccaagtggggccagctgccctcacttctggggtggatgatgtgaccttccttgggggaccgcggaagggacgagggttccctggagtcttacggtccaacatcaggaccaagtcccatggacatgctgacagggtccccagggagaccgtgtcagtagggatgtgtgcctggctgtgtacgtgggtgtgcagtgcacgtgagagcacgtggcggcttctgggggccatgtttggggagggaggtgtgccagcagcctggagagcctcagtccctgtagccccctgccctggcacagctgcatgcacttcaagggcagcctttgggggttggggtttctgccacttccgggtctaggccctgccccaaatccagccagtcctgccccagcccacccccacattggagccctcctgctgctttggtgcctcaaataaatacagatgtcccccag

SEQ ID NO: 149881 - DNA, 1256 bp, Homo sapiens
  Payload ID: 9613
  Gene Symbol: LY6E
  Gene Name: lymphocyte antigen 6 complex, locus E
  Uniprot ID: Q16553
  ENST ID: ENST00000521699
  CDS Start-End: 239-634
cagccgcggtccagagcgcgcgaggttcggggagctcggccaggctgctggtacctgcgtccgcccggcgggtctcactctgttgcccaggctgcagtgcagtggcatgatcatagttcacttcagtcttgaactccctggctcaagagatcctcccacctcagcctcccaagtagctgaccacaggacaggctgctttggtttgtgacctccaggcaggacggccatcctctccagaatgaagatcttcttgccagtgctgctggctgcccttctgggtgtggagcgagccagctcgctgatgtgcttctcctgcttgaaccagaagagcaatctgtactgcctgaagccgaccatctgctccgaccaggacaactactgcgtgactgtgtctgctagtgccggcattgggaatctcgtgacatttggccacagcctgagcaagacctgttccccggcctgccccatcccagaaggcgtcaatgttggtgtggcttccatgggcatcagctgctgccagagctttctgtgcaatttcagtgcggccgatggcgggctgcgggcaagcgtcaccctgctgggtgccgggctgctgctgagcctgctgccggccctgctgcggtttggcccctgaccgcccagaccctgtcccccgatcccccagctcaggaaggaaagcccagccctttctggatcccacagtgtatgggagcccctgactcctcacgtgcctgatctgtgcccttggtcccaggtcaggcccaccccctgcacctccacctgccccagcccctgcctctgccccaagtggggccagctgccctcacttctggggtggatgatgtgaccttccttgggggaccgcggaagggacgagggttccctggagtcttacggtccaacatcaggaccaagtcccatggacatgctgacagggtccccagggagaccgtgtcagtagggatgtgtgcctggctgtgtacgtgggtgtgcagtgcacgtgagagcacgtggcggcttctgggggccatgtttggggagggaggtgtgccagcagcctggagagcctcagtccctgtagccccctgccctggcacagctgcatgcacttcaagggcagcctttgggggttggggtttctgccacttccgggtctaggccctgccccaaatccagccagtcctgccccagcccacccccacattggagccctcctgctgctttggtgcctcaaataaatacagatgtcccccagc

SEQ ID NO: 149882 - DNA, 857 bp, Homo sapiens
  Payload ID: 9613
  Gene Symbol: LY6E
  Gene Name: lymphocyte antigen 6 complex, locus E
  Uniprot ID: Q16553
  ENST ID: ENST00000522971
  CDS Start-End: 69-464
ttcggggagctcggccaggctgctggtacctgcgtccgcccggcggcaggacggccatcctctccagaatgaagatcttcttgccagtgctgctggctgcccttctgggtgtggagcgagccagctcgctgatgtgcttctcctgcttgaaccagaagagcaatctgtactgcctgaagccgaccatctgctccgaccaggacaactactgcgtgactgtgtctgctagtgccggcattgggaatctcgtgacatttggccacagcctgagcaagacctgttccccggcctgccccatcccagaaggcgtcaatgttggtgtggcttccatgggcatcagctgctgccagagctttctgtgcaatttcagtgcggccgatggcgggctgcgggcaagcgtcaccctgctgggtgccgggctgctgctgagcctgctgccggccctgctgcggtttggcccctgaccgcccagaccctgtcccccgatcccccagctcaggaaggaaagcccagccctttctggatcccacagtgtatgggagcccctgactcctcacgtgcctgatctgtgcccttggtcccaggtcaggcccaccccctgcacctccacctgccccagcccctgcctctgccccaagtggggccagctgccctcacttctggggtggatgatgtgaccttccttgggggaccgcggaagggacgagggttccctggagtcttacggtccaacatcaggaccaagtcccatggacatgctgacagggtccccagggagaccgtgtcagtagggatgtgtgcctggctgtgtacgtgggtgtgcagtgcacgtgagagcacgtggcggcttctggggg

SEQ ID NO: 149883 - DNA, 740 bp, Homo sapiens
  Payload ID: 9613
  Gene Symbol: LY6E
  Gene Name: lymphocyte antigen 6 complex, locus E
  Uniprot ID: Q16553
  ENST ID: ENST00000521003
  CDS Start-End: 232-627
agagcgcgcgaggttcggggagctcggccaggctgctggtacctgcgtccgcccggcgggtctcactctgttgcccaggctgcagtgcagtggcatgatcatagttcacttcagtcttgaactccctggctcaagagatcctcccacctcagcctcccaagtagctgaccacagagcaggacaggctgctttggtttgtgacctccaggcaggacggccatcctctccagaatgaagatcttcttgccagtgctgctggctgcccttctgggtgtggagcgagccagctcgctgatgtgcttctcctgcttgaaccagaagagcaatctgtactgcctgaagccgaccatctgctccgaccaggacaactactgcgtgactgtgtctgctagtgccggcattgggaatctcgtgacatttggccacagcctgagcaagacctgttccccggcctgccccatcccagaaggcgtcaatgttggtgtggcttccatgggcatcagctgctgccagagctttctgtgcaatttcagtgcggccgatggcgggctgcgggcaagcgtcaccctgctgggtgccgggctgctgctgagcctgctgccggccctgctgcggtttggcccctgaccgcccagaccctgtcccccgatcccccagctcaggaaggaaagcccagccctttctggatcccacagtgtatgggagcccctgactcctcacgtgcctgatctgtgcccttg

SEQ ID NO: 149884 - DNA, 606 bp, Homo sapiens
  Payload ID: 9613
  Gene Symbol: LY6E
  Gene Name: lymphocyte antigen 6 complex, locus E
  ENST ID: ENST00000522528
  CDS Start-End: 111-236
agagcgcgcgaggttcggggagctcggccaggctgctggtacctgcgtccgcccggcggacaggctgctttggtttgtgacctccaggcaggacggccatcctctccagaatgaagatcttcttgccagtgctgctggctgcccttctgggtgtggagcgagaagagcaatctgtactgcctgaagccgaccatctgctccgaccaggacaactactgcgtgactgtgtctgctagtgccggcattgggaatctcgtgacatttggccacagcctgagcaagacctgttccccggcctgccccatcccagaaggcgtcaatgttggtgtggcttccatgggcatcagctgctgccagagctttctgtgcaatttcagtgcggccgatggcgggctgcgggcaagcgtcaccctgctgggtgccgggctgctgctgagcctgctgccggccctgctgcggtttggcccctgaccgcccagaccctgtcccccgatcccccagctcaggaaggaaagcccagccctttctggatcccacagtgtatgggagcccctgactcctcacgtgcctgatctgtgcccttggtcccaggtcaggcccaccccc

SEQ ID NO: 149885 - DNA, 1335 bp, Homo sapiens
  Payload ID: 9613
  Gene Symbol: LY6E
  Gene Name: lymphocyte antigen 6 complex, locus E
  ENST ID: ENST00000517503
  CDS Start-End: 36-479
gaacagcccagcctggagcgggaagcagggacaagatgacctcaggaatcccaggctgcgggggtgcctgcgtcctcccctcccgagctccactccgcaggcgagacccccaacactgctccccgacactctccgaggcacccctcctccgtgctcacacccaaacacgtctgctcacccgtgggcttcccaccccgaacacaacgaggactgtccaggtgtcagtgacggtcaccccgacctggtcccctgtccggcctcgccaggacaggctgctttggtttgtgacctccaggcaggacggccatcctctccagaatgaagatcttcttgccagtgctgctggctgcccttctgggtgtggagcgagccagctcgctgatgtgcttctcctgcttgaaccagaagagcaatctgtactgcctgaagccgaccatctgctccgaccaggacaactactgcgtgactgtgtctgctagtgccggcattgggaatctcgtgacatttggccacagcctgagcaagacctgttccccggcctgccccatcccagaaggcgtcaatgttggtgtggcttccatgggcatcagctgctgccagagctttctgtgcaatttcagtgcggccgatggcgggctgcgggcaagcgtcaccctgctgggtgccgggctgctgctgagcctgctgccggccctgctgcggtttggcccctgaccgcccagaccctgtcccccgatcccccagctcaggaaggaaagcccagccctttctggatcccacagtgtatgggagcccctgactcctcacgtgcctgatctgtgcccttggtcccaggtcaggcccaccccctgcacctccacctgccccagcccctgcctctgccccaagtggggccagctgccctcacttctggggtggatgatgtgaccttccttgggggaccgcggaagggacgagggttccctggagtcttacggtccaacatcaggaccaagtcccatggacatgctgacagggtccccagggagaccgtgtcagtagggatgtgtgcctggctgtgtacgtgggtgtgcagtgcacgtgagagcacgtggcggcttctgggggccatgtttggggagggaggtgtgccagcagcctggagagcctcagtccctgtagccccctgccctggcacagctgcatgcacttcaagggcagcctttgggggttggggtttctgccacttccgggtctaggccctgccccaaatccagccagtcctgccccagcccacccccacattggagccctcctgctgctttggtgcctcaaataaatacagatgtcccccag

SEQ ID NO: 149886 - DNA, 868 bp, Homo sapiens
  Payload ID: 9613
  Gene Symbol: LY6E
  Gene Name: lymphocyte antigen 6 complex, locus E
  Uniprot ID: Q16553
  ENST ID: ENST00000522024
  CDS Start-End: 370-765
caggctgctggtacctgcgtccgcccggcggcctccccgaatgtttccaaagatctggggcgggagcgggcggagactgccgccaggagcctcccggccgccccagggctgcgcagccactggagcccatcacccaactccagacgctcctggctcctctacgtgggccgggagggacagccttgaggactaggggagggggcacgggaccttgcagagctcctggccggaaagggaggattgaccgcccccggcatatcaccccggagcactggaacccgcccccgcttcttgttttggcactggtggtgcttgcggacaggctgctttggtttgtgacctccaggcaggacggccatcctctccagaatgaagatcttcttgccagtgctgctggctgcccttctgggtgtggagcgagccagctcgctgatgtgcttctcctgcttgaaccagaagagcaatctgtactgcctgaagccgaccatctgctccgaccaggacaactactgcgtgactgtgtctgctagtgccggcattgggaatctcgtgacatttggccacagcctgagcaagacctgttccccggcctgccccatcccagaaggcgtcaatgttggtgtggcttccatgggcatcagctgctgccagagctttctgtgcaatttcagtgcggccgatggcgggctgcgggcaagcgtcaccctgctgggtgccgggctgctgctgagcctgctgccggccctgctgcggtttggcccctgaccgcccagaccctgtcccccgatcccccagctcaggaaggaaagcccagccctttctggatcccacagtgtatgggagcccctgactcctcacgtgcctgatc

SEQ ID NO: 149887 - DNA, 971 bp, Homo sapiens
  Payload ID: 9613
  Gene Symbol: LY6E
  Gene Name: lymphocyte antigen 6 complex, locus E
  ENST ID: ENST00000519546
  CDS Start-End: 93-293
tcggccaggctgctggtacctgcgtccgcccggcgagcaggacaggctgctttggtttgtgacctccaggcaggacggccatcctctccagaatgaagatcttcttgccagtgctgctggctgcccttctgggtgtggagcgagccagctcgctgatgtgcttctcctgcttgaaccagaagagcaatctgtactgcctgaagccgaccatctgctccgaccaggacaactactgcgtgactgtgtctgctagtgccggcattgcctcatttcccatgcagggaatctcgtgacatttggccacagcctgagcaagacctgttccccggcctgccccatcccagaaggcgtcaatgttggtgtggcttccatgggcatcagctgctgccagagctttctgtgcaatttcagtgcggccgatggcgggctgcgggcaagcgtcaccctgctgggtgccgggctgctgctgagcctgctgccggccctgctgcggtttggcccctgaccgcccagaccctgtcccccgatcccccagctcaggaaggaaagcccagccctttctggatcccacagtgtatgggagcccctgactcctcacgtgcctgatctgtgcccttggtcccaggtcaggcccaccccctgcacctccacctgccccagcccctgcctctgccccaagtggggccagctgccctcacttctggggtggatgatgtgaccttccttgggggaccgcggaagggacgagggttccctggagtcttacggtccaacatcaggaccaagtcccatggacatgctgacagggtccccagggagaccgtgtcagtagggatgtgtgcctggctgtgtacgtgggtgtgcagtgcacgtgagagcacgtggcggcttctgggggccatgtttggggagggaggtgtgccagcagcctggagagcctcagtccctgtagccccctgccctggcacagc

SEQ ID NO: 149888 - DNA, 1419 bp, Homo sapiens
  Payload ID: 9613
  Gene Symbol: LY6E
  Gene Name: lymphocyte antigen 6 complex, locus E
  Uniprot ID: Q16553
  ENST ID: ENST00000520466
  CDS Start-End: 404-799
cagagcgcgcgaggttcggggagctcggccaggctgctggtacctgcgtccgcccggcggcctccccgaatgtttccaaagatctggggcgggagcgggcggagactgccgccaggagcctcccggccgccccagggctgcgcagccactggagcccatcacccaactccagacgctcctggctcctctacgtgggccgggagggacagccttgaggactaggggagggggcacgggaccttgcagagctcctggccggaaagggaggattgaccgcccccggcatatcaccccggagcactggaacccgcccccgcttcttgttttggcactggtggtgcttgcgagcaggacaggctgctttggtttgtgacctccaggcaggacggccatcctctccagaatgaagatcttcttgccagtgctgctggctgcccttctgggtgtggagcgagccagctcgctgatgtgcttctcctgcttgaaccagaagagcaatctgtactgcctgaagccgaccatctgctccgaccaggacaactactgcgtgactgtgtctgctagtgccggcattgggaatctcgtgacatttggccacagcctgagcaagacctgttccccggcctgccccatcccagaaggcgtcaatgttggtgtggcttccatgggcatcagctgctgccagagctttctgtgcaatttcagtgcggccgatggcgggctgcgggcaagcgtcaccctgctgggtgccgggctgctgctgagcctgctgccggccctgctgcggtttggcccctgaccgcccagaccctgtcccccgatcccccagctcaggaaggaaagcccagccctttctggatcccacagtgtatgggagcccctgactcctcacgtgcctgatctgtgcccttggtcccaggtcaggcccaccccctgcacctccacctgccccagcccctgcctctgccccaagtggggccagctgccctcacttctggggtggatgatgtgaccttccttgggggaccgcggaagggacgagggttccctggagtcttacggtccaacatcaggaccaagtcccatggacatgctgacagggtccccagggagaccgtgtcagtagggatgtgtgcctggctgtgtacgtgggtgtgcagtgcacgtgagagcacgtggcggcttctgggggccatgtttggggagggaggtgtgccagcagcctggagagcctcagtccctgtagccccctgccctggcacagctgcatgcacttcaagggcagcctttgggggttggggtttctgccacttccgggtctaggccctgccccaaatccagccagtcctgccccagcccacccccacattggagccctcctgctgctttggtgcctcaaataaatacagatgtccccca

SEQ ID NO: 149889 - DNA, 490 bp, Homo sapiens
  Payload ID: 9613
  Gene Symbol: LY6E
  Gene Name: lymphocyte antigen 6 complex, locus E
  ENST ID: ENST00000520531
  CDS Start-End: 112-333
cagagcgcgcgaggttcggggagctcggccaggctgctggtacctgcgtccgcccggcggacaggctgctttggtttgtgacctccaggcaggacggccatcctctccagaatgaagatcttcttgccagtgctgctggctgcccttctgggtgtggagcgagccagctcgctgatgtgcttctcctgcttgaaccagaagagcaatctgtactgcctgaagccgaccatctgctccgaccaggacaactactgcgtgactgtgtctgctagtgccggcattggtgagtgccaggcctcagaccgtgccttcctcccctggccatctccctagcccgggccggggctcagcagaggccattgctgtctgtctgcagccgtctgtctctcccctgacagcctcatttcccatgcagggaatctcgtgacatttggccacagcctgagcaagacctgttccccggcctgccccatcccagaaggcgtcaatg

SEQ ID NO: 149890 - DNA, 427 bp, Homo sapiens
  Payload ID: 9613
  Gene Symbol: LY6E
  Gene Name: lymphocyte antigen 6 complex, locus E
  ENST ID: ENST00000523847
  CDS Start-End: 92-292
cggccaggctgctggtacctgcgtccgcccggcgagcaggacaggctgctttggtttgtgacctccaggcaggacggccatcctctccagaatgaagatcttcttgccagtgctgctggctgcccttctgggtgtggagcgagccagctcgctgatgtgcttctcctgcttgaaccagaagagcaatctgtactgcctgaagccgaccatctgctccgaccaggacaactactgcgtgactgtgtctgctagtgccggcattggtggctttgctggagggacagacagttgatcatagtggagctggtgagaggaagctgcacccaaaagccatggccgggaacctggatctgactgcagggaaacagaagcgtggtgggcgctgggcgatgatggaatttctaacaaatgctttgtttctgctaaa

SEQ ID NO: 149891 - DNA, 1079 bp, Homo sapiens
  Payload ID: 9613
  Gene Symbol: LY6E
  Gene Name: lymphocyte antigen 6 complex, locus E
  ENST ID: ENST00000521182
  CDS Start-End: 99-224
gggagctcggccaggctgctggtacctgcgtccgcccggcgagcaggacaggctgctttggtttgtgacctccaggcaggacggccatcctctccagaatgaagatcttcttgccagtgctgctggctgcccttctgggtgtggagcgagaagagcaatctgtactgcctgaagccgaccatctgctccgaccaggacaactactgcgtgactgtgtctgctagtgccggcattgggaatctcgtgacatttggccacagcctgagcaagacctgttccccggcctgccccatcccagaaggcgtcaatgttggtgtggcttccatgggcatcagctgctgccagagctttctgtgcaatttcagtgcggccgatggcgggctgcgggcaagcgtcaccctgctgggtgccgggctgctgctgagcctgctgccggccctgctgcggtttggcccctgaccgcccagaccctgtcccccgatcccccagctcaggaaggaaagcccagccctttctggatcccacagtgtatgggagcccctgactcctcacgtgcctgatctgtgcccttggtcccaggtcaggcccaccccctgcacctccacctgccccagcccctgcctctgccccaagtggggccagctgccctcacttctggggtggatgatgtgaccttccttgggggaccgcggaagggacgagggttccctggagtcttacggtccaacatcaggaccaagtcccatggacatgctgacagggtccccagggagaccgtgtcagtagggatgtgtgcctggctgtgtacgtgggtgtgcagtgcacgtgagagcacgtggcggcttctgggggccatgtttggggagggaggtgtgccagcagcctggagagcctcagtccctgtagccccctgccctggcacagctgcatgcacttcaagggcagcctttgggggttggggtttctgccacttccgggtctaggccctgccccaaatccagccagtcctgccccagcccacccccacattggagccctcctgctgctttggtgcctcaaataaatacagatgtccccca

SEQ ID NO: 149892 - DNA, 635 bp, Homo sapiens
  Payload ID: 9613
  Gene Symbol: LY6E
  Gene Name: lymphocyte antigen 6 complex, locus E
  ENST ID: ENST00000519611
  CDS Start-End: 212-412
cggggagctcggccaggctgctggtacctgcgtccgcccggcgggtctcactctgttgcccaggctgcagtgcagtggcatgatcatagttcacttcagtcttgaactccctggctcaagagatcctcccacctcagcctcccaagtagctgaccacaggacaggctgctttggtttgtgacctccaggcaggacggccatcctctccagaatgaagatcttcttgccagtgctgctggctgcccttctgggtgtggagcgagccagctcgctgatgtgcttctcctgcttgaaccagaagagcaatctgtactgcctgaagccgaccatctgctccgaccaggacaactactgcgtgactgtgtctgctagtgccggcattgcctcatttcccatgcagggaatctcgtgacatttggccacagcctgagcaagacctgttccccggcctgccccatcccagaaggcgtcaatgttggtgtggcttccatgggcatcagctgctgccagagctttctgtgcaatttcagtgcggccgatggcgggctgcgggcaagcgtcaccctgctgggtgccgggctgctgctgagcctgctgccggccctgctgcggtttggcccctgaccgcccagacc

SEQ ID NO: 149893 - DNA, 1181 bp, Homo sapiens; identical to SEQ ID NO: 149879
  Payload ID: 9613
  Gene Symbol: LY6E
  Gene Name: lymphocyte antigen 6 complex, locus E
  Uniprot ID: Q16553
  ENST ID: ENST00000619718
  CDS Start-End: 163-558

SEQ ID NO: 149894 - DNA, 740 bp, Homo sapiens; identical to SEQ ID NO: 149883
  Payload ID: 9613
  Gene Symbol: LY6E
  Gene Name: lymphocyte antigen 6 complex, locus E
  Uniprot ID: Q16553
  ENST ID: ENST00000632516
  CDS Start-End: 232-627

SEQ ID NO: 149895 - DNA, 971 bp, Homo sapiens; identical to SEQ ID NO: 149887
  Payload ID: 9613
  Gene Symbol: LY6E
  Gene Name: lymphocyte antigen 6 complex, locus E
  ENST ID: ENST00000632618
  CDS Start-End: 93-293

SEQ ID NO: 149896 - DNA, 490 bp, Homo sapiens; identical to SEQ ID NO: 149889
  Payload ID: 9613
  Gene Symbol: LY6E
  Gene Name: lymphocyte antigen 6 complex, locus E
  ENST ID: ENST00000633934
  CDS Start-End: 112-333

SEQ ID NO: 149897 - DNA, 635 bp, Homo sapiens; identical to SEQ ID NO: 149892
  Payload ID: 9613
  Gene Symbol: LY6E
  Gene Name: lymphocyte antigen 6 complex, locus E
  ENST ID: ENST00000632902
  CDS Start-End: 212-412

SEQ ID NO: 149898 - DNA, 1335 bp, Homo sapiens; identical to SEQ ID NO: 149885
  Payload ID: 9613
  Gene Symbol: LY6E
  Gene Name: lymphocyte antigen 6 complex, locus E
  ENST ID: ENST00000633898
  CDS Start-End: 36-479

SEQ ID NO: 149899 - DNA, 1079 bp, Homo sapiens; identical to SEQ ID NO: 149891
  Payload ID: 9613
  Gene Symbol: LY6E
  Gene Name: lymphocyte antigen 6 complex, locus E
  ENST ID: ENST00000632978
  CDS Start-End: 99-224

SEQ ID NO: 149900 - DNA, 1173 bp, Homo sapiens; identical to SEQ ID NO: 149880
  Payload ID: 9613
  Gene Symbol: LY6E
  Gene Name: lymphocyte antigen 6 complex, locus E
  Uniprot ID: Q16553
  ENST ID: ENST00000632424
  CDS Start-End: 157-552

SEQ ID NO: 149901 - DNA, 1256 bp, Homo sapiens; identical to SEQ ID NO: 149881
  Payload ID: 9613
  Gene Symbol: LY6E
  Gene Name: lymphocyte antigen 6 complex, locus E
  Uniprot ID: Q16553
  ENST ID: ENST00000632519
  CDS Start-End: 239-634

SEQ ID NO: 149902 - DNA, 1419 bp, Homo sapiens; identical to SEQ ID NO: 149888
  Payload ID: 9613
  Gene Symbol: LY6E
  Gene Name: lymphocyte antigen 6 complex, locus E
  Uniprot ID: Q16553
  ENST ID: ENST00000632812
  CDS Start-End: 404-799

SEQ ID NO: 149903 - DNA, 868 bp, Homo sapiens; identical to SEQ ID NO: 149886
  Payload ID: 9613
  Gene Symbol: LY6E
  Gene Name: lymphocyte antigen 6 complex, locus E
  Uniprot ID: Q16553
  ENST ID: ENST00000633451
  CDS Start-End: 370-765

SEQ ID NO: 149904 - DNA, 427 bp, Homo sapiens; identical to SEQ ID NO: 149890
  Payload ID: 9613
  Gene Symbol: LY6E
  Gene Name: lymphocyte antigen 6 complex, locus E
  ENST ID: ENST00000633551
  CDS Start-End: 92-292

SEQ ID NO: 149905 - DNA, 606 bp, Homo sapiens; identical to SEQ ID NO: 149884
  Payload ID: 9613
  Gene Symbol: LY6E
  Gene Name: lymphocyte antigen 6 complex, locus E
  ENST ID: ENST00000632232
  CDS Start-End: 111-236

SEQ ID NO: 149906 - DNA, 857 bp, Homo sapiens; identical to SEQ ID NO: 149882
  Payload ID: 9613
  Gene Symbol: LY6E
  Gene Name: lymphocyte antigen 6 complex, locus E
  Uniprot ID: Q16553
  ENST ID: ENST00000631568
  CDS Start-End: 69-464

SEQ ID NO: 149907 - DNA, 2654 bp, Homo sapiens
  Payload ID: 9614
  Gene Symbol: LY6G5B
  Gene Name: lymphocyte antigen 6 complex, locus G5B
  Uniprot ID: Q8NDX9
  ENST ID: ENST00000375864
  CDS Start-End: 785-1390
accaggacagatttgtgctcagtggattgggtggtgtttttagtatggagcagaacagaattcctaggactgcgtgtgatgaaatgcaaggtcaaaaggaaaagacaaagcatatttcaaagatgagaaatatttgtttggatatctatgactgtctgtttatactgtaaggggcttaatcagcagctccatcttttagttttagttctaaaggaaaagtagcctaaagtcagtataactaaagggtggaacgaggtgggacaaggtccggaattgctgctcagtgatgtgtgtgtgcctgccgctggtggagctgagactgctcatctcagaaggatggggatgcttgatttcctggccaggttgtcccagcacagtggggattggccctgttgtatgacgaagacagcacatggtggcagagatagatactaacccatggactttccaagggagggaataggtctttggagggtatgcaagacaaaggtagacactggataaagaacccggtagtgcccaggtattaccccatctgggccattactcccacactcaggaaccagacgttgtgggtgaggacatgctgtccctcctgccaagtaataacttccttcccagccaggatcctgccccaagtaggaatatagctctgcatttacagcagctcctgctcagaccttgtcaaaaccaccctgcagcttaggattaaggagcatggtcacaggaaggtggggtttcagggcatcccctcaggaactgcccatctccccagaattccaaaatgaaggtccatatgcttgtaggtgtgctggtcatggtgggcttcacagtaggaaaggttcctgttcccgacatccggacgtgccacttctgcctcgtagaagacccttctgtaggatgcatttcaggctcagagaagtgtaccatcagcagctcatccctgtgcatggtgatcaccatctattatgatgtcaaggttcgcttcatcgttcgaggctgtggacagtacatttcctaccgctgccaagaaaaacgcaacacctactttgcagagtactggtatcaggcccagtgctgtcagtacgattattgcaactcctggtcaagcccccaactccagagctctctgccggagccccatgacaggcccctggccctgcctctgtctgactcccagattcagtggttctaccaggccctgaacctctccctgcccctccccaatttccatgctgggacggagcctgatggcctggaccccatggtcacactgtccctgaacctgggcttgtcttttgctgagctgcgccgcatgtacttgttcctcaatagttcaggacttttggttcttccccaggctggactcttgacacctcacccttcctgaattccacagtgcaaatatctttctgtaacaccctcagcatcctgcactgccctctctgaaaacacccacattctttggtcactgtgatttcttaggcctccgtctgttgtaccactagcatctatatgacttttgtgtaattttctctcttgaactctggtgctgtttttttgtttgtttgagacaaagtctcgctctgtcacccagggtggagtgcagtggcatgatctctgctcactacaacctccacctcccgggttccagcgattctcctgcctcagcctcccgagtagctgggactacaggcgtgcaccaccacgcctggctaattttttgtatttttagtagagacggggtttcaccatgttggtcaggctggtctcgaactcctgacctcgtaatctgccctcctcgacctcccaaagtgccgggattacaggtgtgagccactgtgcctgtctgagctctggtgctgttcttccccctagaaaagaatctctagtgtggattctgcccagacaggctgacctgagaaaggcacagtggttcctccattccttccccatcatctgagtgttccagtatcccccatccctctcaatccagtcacctgcctattgacatctagctctgtttcccctgtcttgtccatgtctctaagacccagtaccagactgaactagcagcaagaaggacgaggaggccgggcatggtggctcacgccggtaatcccagcactttgggaggccgaggtgggcggatcacttgagattgggagtttgagaccagcctggccaacatggtaaaacccgctctctattaaaaatagaaaaatcagctgggtgtggtggcacacctctgtaatcccagctactcaggaggctgagacaggagaatcacttgaacccgggaggcagaggttgcagtgagccgagatcgcgccactgcactccagcctgggtgacacagtgagactccgtctccaaaaaaaaggatgaggaatagaattctgtgcagatgtcctgacttggcaattttgtgtccctgcctcactgtctccaccaacccccgcctgtcctagtgttgttctgcctcctgtcctctcttgctctcttgtcagtctctggcttcctcggccccatttcacttcactgagtcctgacacccatctccctaggggcctgtgagaggagagggaagggtctgttctgctcagctccatgtcccccattttcctccacaataaactgggactgggctaaaa

SEQ ID NO: 149908 - DNA, 1903 bp, Homo sapiens
  Payload ID: 9614
  Gene Symbol: LY6G5B
  Gene Name: lymphocyte antigen 6 complex, locus G5B
  ENST ID: ENST00000383429
  CDS Start-End: 1-639
gactttggttactgtcctcgtgtgtactgtgagaaccagccaatgcttcccattggtgtgctggtcatggtgggcttcacagtaggaaaggttcctgttcccgacatccggacgtgccacttctgcctcgtagaagacccttctgtaggatgcatttcaggctcagagaagtgtaccatcagcagctcatccctgtgcatggtgatcaccatctattatgatgtcaaggttcgcttcatcgttcgaggctgtggacagtacatttcctaccgctgccaagaaaaacgcaacacctactttgcagagtactggtatcaggcccagtgctgtcagtacgattattgcaactcctggtcaagcccccaactccagagctctctgccggagccccatgacaggcccctggccctgcctctgtctgactcccagattcagtggttctaccaggccctgaacctctccctgcccctccccaatttccatgctgggacggagcctgatggcctggaccccatggtcacactgtccctgaacctgggcttgtcttttgctgagctgtgccgcatgtacttgttcctcaatagttcaggacttttggttcttccccaggctggactcttgacacctcacccttcctgaattccacagtgcaaatatctttctgtaacaccctcagcatcctgcactgccctctctgaaaacacccacattctttggtcactgtgatttcttaggcctccgtctgttgtaccactagcatctatatgacttttgtgtaattttctctcttgaactctggtgctgtttttttgtttgtttgagacaaagtctcgctctgtcacccagggtggagtgcagtggcatgatctctgctcactacaacctccacctcccgggttccagcgattctcctgcctcagcctcccgagtagctgggactacaggcgtgcaccaccacgcctggctaattttttgtatttttagtagagacggggtttcaccatgttggtcaggctggtctcgaactcctgacctcgtaatctgccctcctcgacctcccaaagtgccgggattacaggtgtgagccactgtgcctggctgagctctggtgctgttcttccccctagaaaagaatctctagtgtggattctgcccagacaggctgacctgagaaaggcacagtggttcctccattccttccccatcatctgagtgttccagtatcccccatccctctcaatccagtcacctgcctattgacatctagctctgtttcccctgtcttgtccatgtctctaagacccagtaccagactgaactagcagcaagaaggacgaggaggccgggcatggtggctcacgccggtaatcccagcactttgggaggccgaggtgggcggatcacttgagattgggagtttgagaccagcctggccaacatggtaaaacccgctctctattaaaaatagaaaaatcagctgggtgtggtggcacacctctgtaatcccagctactcaggaggctgagacaggagaatcacttgaacccgggaggcagaggttgcagtgagccgagatcgcgccactgcactccagcctgggtgacacagtgagactccgtctccaaaaaaaaggatgaggaatagaattctgtgcagatgtcctgacttggcaattttgtgtccctgcctcactgtctccaccaacccccgcctgtcctagtgttgttctgcctcctgtcctctcttgctctcttgtcagtctctggcttcctcggccccatttcacttcactgagtcctgacacccatctccctaggggcctgtgagaggagagggaagggtctgttctgctcagctccatgtcccccattttcctccacaataaactgggactgggctaaaa

SEQ ID NO: 149909 - DNA, 1505 bp, Homo sapiens
  Payload ID: 9614
  Gene Symbol: LY6G5B
  Gene Name: lymphocyte antigen 6 complex, locus G5B
  Uniprot ID: Q8NDX9
  ENST ID: ENST00000409525
  CDS Start-End: 885-1325
ggaaaagtagcctaaagtcagtataactaaagggtggaacgaggtgggacaaggtccggaattgctgctcagtgatgtgtgtgtgcctgccgctggtggagctgagactgctcatctcagaaggatggggatgcttgatttcctggccaggttgtcccagcacagtggggattggccctgttgtatgacgaagacagcacatggtggcagagatagatactaacccatggactttccaagggagggaataggtctttggagggtatgcaagacaaaggtagacactggataaagaacccggtagtgcccaggtattaccccatctgggccattactcccacactcaggaaccagacgttgtgggtgaggacatgctgtccctcctgccaagtaataacttccttcccagccaggatcctgccccaagtaggaatatagctctgcatttacagcagctcctgctcagaccttgtcaaaaccaccctgcagcttaggattaaggagcatggtcacaggaaggtggggtttcagggcatcccctcaggaactgcccatctccccagaattccaaaatgaaggtccatatgcttgtaggtgtgctggtcatggtgggcttcacagtaggaaagggtaagtggggcccaggggcagggagggaggaaggggtaactgagtccaggaagggggtggagcgtggccatggataatcgggcttcctactggcccagggtatttgagagtgacccagtgcctccatccctccttctgcctccccagttcctgttcccgacatccggacgtgccacttctgcctcgtagaagacccttctgtaggatgcatttcaggctcagagaagtgtaccatcagcagctcatccctgtgcatggtgatcaccatctattatgatgtcaaggttcgcttcatcgttcgaggctgtggacagtacatttcctaccgctgccaagaaaaacgcaacacctactttgcagagtactggtatcaggcccagtgctgtcagtacgattattgcaactcctggtcaagcccccaactccagagctctctgccggagccccatgacaggcccctggccctgcctctgtctgactcccagattcagtggttctaccaggccctgaacctctccctgcccctccccaatttccatgctgggacggagcctgatggcctggaccccatggtcacactgtccctgaacctgggcttgtcttttgctgagctgcgccgcatgtacttgttcctcaatagttcaggacttttggttcttccccaggctggactcttgacacctcacccttcctgaattccacagtgcaaatatctttctgtaacaccctcagcatcctgcactgccctctctgaaaacacccacattctttggtcactgtgatttcttaggcctccgtctgttgtaccactagcatctatatgacttttgtgtaattttctctcttgaactctggtgctgtttttttgtttgttt

SEQ ID NO: 149910 - DNA, 1903 bp, Homo sapiens; identical to SEQ ID NO: 149908
  Payload ID: 9614
  Gene Symbol: LY6G5B
  Gene Name: lymphocyte antigen 6 complex, locus G5B
  ENST ID: ENST00000456439
  CDS Start-End: 1-639

SEQ ID NO: 149911 - DNA, 1903 bp, Homo sapiens
  Payload ID: 9614
  Gene Symbol: LY6G5B
  Gene Name: lymphocyte antigen 6 complex, locus G5B
  ENST ID: ENST00000437674
  CDS Start-End: 1-639
gactttggttactgtcctcgtgtgtactgtgagaaccagccaatgcttcccattggtgtgctggtcatggtgggcttcacagtaggaaaggttcctgttcccgacatccggacgtgccacttctgcctcgtagaagacccttctgtaggatgcatttcaggctcagagaagtgtaccatcagcagctcatccctgtgcatggtgatcaccatctattatgatgtcaaggttcgcttcatcgttcgaggctgtggacagtacatttcctaccgctgccaagaaaaacgcaacacctactttgcagagtactggtatcaggcccagtgctgtcagtacgattattgcaactcctggtcaagcccccaactccagagctctctgccggagccccatgacaggcccctggccctgcctctgtctgactcccagattcagtggttctaccaggccctgaacctctccctgcccctccccaatttccatgctgggacggagcctgatggcctggaccccatggtcacactgtccctgaacctgggcttgtcttttgctgagctgcgccgcatgtacttgttcctcaatagttcaggacttttggttcttccccaggctggactcttgacacctcacccttcctgaattccacagtgcaaatatctttctgtaacaccctcagcatcctgcactgccctctctgaaaacacccacattctttggtcactgtgatttcttaggcctccgtctgttgtaccactagcatctatatgacttttgtgtaattttctctcttgaactctggtgctgtttttttgtttgtttgagacaaagtctcgctctgtcacccagggtggagtgcagtggcatgatctctgctcactacaacctccacctcccgggttccagcgattctcctgcctcagcctcccgagtagctgggactacaggcgtgcaccaccacgcctggctaattttttgtatttttagtagagacggggtttcaccatgttggtcaggctggtctcgaactcctgacctcgtaatctgccctcctcgacctcccaaagtgccgggattacaggtgtgagccactgtgcctgtctgagctctggtgctgttcttccccctagaaaagaatctctagtgtggattctgcccagacaggctgacctgagaaaggcacagtggttcctccattccttccccatcatctgagtgttccagtatcccccatccctctcaatccagtcacctgcctattgacatctagctctgtttcccctgtcttgtccatgtctctaagacccagtaccagactgaactagcagcaagaaggacgaggaggccgggcatggtggctcacgccggtaatcccagcactttgggaggccgaggtgggcggatcacttgagattgggagtttgagaccagcctggccaacatggtaaaacccgctctctattaaaaatagaaaaatcagctgggtgtggtggcacacctctgtaatcccagctactcaggaggctgagacaggagaatcacttgaacccgggaggcagaggttgcagtgagccgagatcgcgccactgcactccagcctgggtgacacagtgagactccgtctccaaaaaaaaggatgaggaatagaattctgtgcagatgtcctgacttggcaattttgtgtccctgcctcactgtctccaccaacccccgcctgtcctggtgttgttctgcctcctgtcctctcttgctctcttgtcagtctctggcttcctcggccccatttcacttcactgagtcctgacacccatctccctaggggcctgtgagaggagagggaagggtctgttctgctcagctccatgtcccccattttcctccacaataaactgggactgggctaaaa

SEQ ID NO: 149912 - DNA, 1903 bp, Homo sapiens
  Payload ID: 9614
  Gene Symbol: LY6G5B
  Gene Name: lymphocyte antigen 6 complex, locus G5B
  ENST ID: ENST00000455499
  CDS Start-End: 1-639
gactttggttactgtcctcgtgtgtactgtgagaaccagccaatgcttcccattggtgtgctggtcatggtgggcttcacagtaggaaaggttcctgttcccgacatccggacgtgccacttctgcctcgtagaagacccttctgtaggatgcatttcaggctcagagaagtgtaccatcagcagctcatccctgtgcatggtgatcaccatctattatgatgtcaaggttcgcttcatcgttcgaggctgtggacagtacatttcctaccgctgccaagaaaaacgcaacacctactttgcagagtactggtatcaggcccagtgctgtcagtacgattattgcaactcctggtcaagcccccaactccagagctctctgccggagccccatgacaggcccctggccctgcctctgtctgactcccagattcagtggttctaccaggccctgaacctctccctgcccctccccaatttccatgctgggacggagcctgatggcctggaccccatggtcacactgtccctgaacctgggcttgtcttttgctgagctgcgccgcatgtacttgttcctcaatagttcaggacttttggttcttccccaggctggactcttgacacctcacccttcctgaattccacagtgcaaatatctttctgtaacaccctcagcatcctgcactgccctctctgaaaacacccacattctttggtcactgtgatttcttaggcctccgtctgttgtaccactagcatctatatgacttttgtgtaattttctctcttgaactctggtgctgtttttttgtttgtttgagacaaagtctcgctctgtcacccagggtggagtgcagtggcatgatctctgctcactacaacctccacctcccgggttccagcgattctcctgcctcagcctcccgagtagctgggactacaggcgtgcaccaccacgcctggctaattttttgtatttttagtagagacggggtttcaccatgttggtcaggctggtctcgaactcctgacctcgtaatctgccctcctcgacctcccaaagtgccgggattacaggtgtgagccactgtgcctggctgagctctggtgctgttcttccccctagaaaagaatctctagtgtggattctgcccagacaggctgacctgagaaaggcacagtggttcctccattccttccccatcatctgagtgttccagtatcccccatccctctcaatccagtcacctgcctattgacatctagctctgtttcccctgtcttgtccatgtctctaagacccagtaccagactgaactagcagcaagaaggacgaggaggccgggcatggtggctcacgccggtaatcccagcactttgggaggccgaggtgggcggatcacttgagattgggagtttgagaccagcctggccaacatggtaaaacccgctctctattaaaaatagaaaaatcagctgggtgtggtggcacacctctgtaatcccagctactcaggaggctgagacaggagaatcacttgaacccgggaggcagaggttgcagtgagccgagatcgcgccactgcactccagcctgggtgacacagtgagactccgtctccaaaaaaaaggatgaggaatagaattctgtgcagatgtcctgacttggcaattttgtgtccctgcctcactgtctccaccaacccccgcctgtcctagtgttgttctgcctcctgtcctctcttgctctcttgtcagtctctggcttcctcggccccatttcacttcactgagtcctgacacccatctccctaggggcctgtgagaggagagggaagggtctgttctgctcagctccatgtcccccattttcctccacaataaactgggactgggctaaaa

SEQ ID NO: 149913 - DNA, 1870 bp, Homo sapiens
  Payload ID: 9614
  Gene Symbol: LY6G5B
  Gene Name: lymphocyte antigen 6 complex, locus G5B
  Uniprot ID: Q8NDX9
  ENST ID: ENST00000471674
  CDS Start-End: 1-606
atgaaggtccatatgcttgtaggtgtgctggtcatggtgggcttcacagtaggaaaggttcctgttcccgacatccggacgtgccacttctgcctcgtagaagacccttctgtaggatgcatttcaggctcagagaagtgtaccatcagcagctcatccctgtgcatggtgatcaccatctattatgatgtcaaggttcgcttcatcgttcgaggctgtggacagtacatttcctaccgctgccaagaaaaacgcaacacctactttgcagagtactggtatcaggcccagtgctgtcagtacgattattgcaactcctggtcaagcccccaactccagagctctctgccggagccccatgacaggcccctggccctgcctctgtctgactcccagattcagtggttctaccaggccctgaacctctccctgcccctccccaatttccatgctgggacggagcctgatggcctggaccccatggtcacactgtccctgaacctgggcttgtcttttgctgagctgcgccgcatgtacttgttcctcaatagttcaggacttttggttcttccccaggctggactcttgacacctcacccttcctgaattccacagtgcaaatatctttctgtaacaccctcagcatcctgcactgccctctctgaaaacacccacattctttggtcactgtgatttcttaggcctccgtctgttgtaccactagcatctatatgacttttgtgtaattttctctcttgaactctggtgctgtttttttgtttgtttgagacaaagtctcgctctgtcacccagggtggagtgcagtggcatgatctctgctcactacaacctccacctcccgggttccagcgattctcctgcctcagcctcccgagtagctgggactacaggcgtgcaccaccacgcctggctaattttttgtatttttagtagagacggggtttcaccatgttggtcaggctggtctcgaactcctgacctcgtaatctgccctcctcgacctcccaaagtgccgggattacaggtgtgagccactgtgcctgtctgagctctggtgctgttcttccccctagaaaagaatctctagtgtggattctgcccagacaggctgacctgagaaaggcacagtggttcctccattccttccccatcatctgagtgttccagtatcccccatccctctcaatccagtcacctgcctattgacatctagctctgtttcccctgtcttgtccatgtctctaagacccagtaccagactgaactagcagcaagaaggacgaggaggccgggcatggtggctcacgccggtaatcccagcactttgggaggccgaggtgggcggatcacttgagattgggagtttgagaccagcctggccaacatggtaaaacccgctctctattaaaaatagaaaaatcagctgggtgtggtggcacacctctgtaatcccagctactcaggaggctgagacaggagaatcacttgaacccgggaggcagaggttgcagtgagccgagatcgcgccactgcactccagcctgggtgacacagtgagactccgtctccaaaaaaaaggatgaggaatagaattctgtgcagatgtcctgacttggcaattttgtgtccctgcctcactgtctccaccaacccccgcctgtcctggtgttgttctgcctcctgtcctctcttgctctcttgtcagtctctggcttcctcggccccatttcacttcactgagtcctgacacccatctccctaggggcctgtgagaggagagggaagggtctgttctgctcagctccatgtcccccattttcctccacaataaactgggactgggctaaaa

SEQ ID NO: 149914 - DNA, 1870 bp, Homo sapiens
  Payload ID: 9614
  Gene Symbol: LY6G5B
  Gene Name: lymphocyte antigen 6 complex, locus G5B
  Uniprot ID: Q8NDX9
  ENST ID: ENST00000480530
  CDS Start-End: 1-606
atgaaggtccatatgcttgtaggtgtgctggtcatggtgggcttcacagtaggaaaggttcctgttcccgacatccggacgtgccacttctgcctcgtagaagacccttctgtaggatgcatttcaggctcagagaagtgtaccatcagcagctcatccctgtgcatggtgatcaccatctattatgatgtcaaggttcgcttcatcgttcgaggctgtggacagtacatttcctaccgctgccaagaaaaacgcaacacctactttgcagagtactggtatcaggcccagtgctgtcagtacgattattgcaactcctggtcaagcccccaactccagagctctctgccggagccccatgacaggcccctggccctgcctctgtctgactcccagattcagtggttctaccaggccctgaacctctccctgcccctccccaatttccatgctgggacggagcctgatggcctggaccccatggtcacactgtccctgaacctgggcttgtcttttgctgagctgcgccgcatgtacttgttcctcaatagttcaggacttttggttcttccccaggctggactcttgacacctcacccttcctgaattccacagtgcaaatatctttctgtaacaccctcagcatcctgcactgccctctctgaaaacacccacattctttggtcactgtgatttcttaggcctccgtctgttgtaccactagcatctatatgacttttgtgtaattttctctcttgaactctggtgctgtttttttgtttgtttgagacaaagtctcgctctgtcacccagggtggagtgcagtggcatgatctctgctcactacaacctccacctcccgggttccagcgattctcctgcctcagcctcccgagtagctgggactacaggcgtgcaccaccacgcctggctaattttttgtatttttagtagagacggggtttcaccatgttggtcaggctggtctcgaactcctgacctcgtaatctgccctcctcgacctcccaaagtgccgggattacaggtgtgagccactgtgcctggctgagctctggtgctgttcttccccctagaaaagaatctctagtgtggattctgcccagacaggctgacctgagaaaggcacagtggttcctccattccttccccatcatctgagtgttccagtatcccccatccctctcaatccagtcacctgcctattgacatctagctctgtttcccctgtcttgtccatgtctctaagacccagtaccagactgaactagcagcaagaaggacgaggaggccgggcatggtggctcacgccggtaatcccagcactttgggaggccgaggtgggcggatcacttgagattgggagtttgagaccagcctggccaacatggtaaaacccgctctctattaaaaatagaaaaatcagctgggtgtggtggcacacctctgtaatcccagctactcaggaggctgagacaggagaatcacttgaacccgggaggcagaggttgcagtgagccgagatcgcgccactgcactccagcctgggtgacacagtgagactccgtctccaaaaaaaaggatgaggaatagaattctgtgcagatgtcctgacttggcaattttgtgtccctgcctcactgtctccaccaacccccgcctgtcctagtgttgttctgcctcctgtcctctcttgctctcttgtcagtctctggcttcctcggccccatttcacttcactgagtcctgacacccatctccctaggggcctgtgagaggagagggaagggtctgttctgctcagctccatgtcccccattttcctccacaataaactgggactgggctaaaa

SEQ ID NO: 149915 - DNA, 1870 bp, Homo sapiens
  Payload ID: 9614
  Gene Symbol: LY6G5B
  Gene Name: lymphocyte antigen 6 complex, locus G5B
  Uniprot ID: Q8NDX9
  ENST ID: ENST00000480515
  CDS Start-End: 1-606
atgaaggtccatatgcttgtaggtgtgctggtcatggtgggcttcacagtaggaaaggttcctgttcccgacatccggacgtgccacttctgcctcgtagaagacccttctgtaggatgcatttcaggctcagagaagtgtaccatcagcagctcatccctgtgcatggtgatcaccatctattatgatgtcaaggttcgcttcatcgttcgaggctgtggacagtacatttcctaccgctgccaagaaaaacgcaacacctactttgcagagtactggtatcaggcccagtgctgtcagtacgattattgcaactcctggtcaagcccccaactccagagctctctgccggagccccatgacaggcccctggccctgcctctgtctgactcccagattcagtggttctaccaggccctgaacctctccctgcccctccccaatttccatgctgggacggagcctgatggcctggaccccatggtcacactgtccctgaacctgggcttgtcttttgctgagctgcgccgcatgtacttgttcctcaatagttcaggacttttggttcttccccaggctggactcttgacacctcacccttcctgaattccacagtgcaaatatctttctgtaacaccctcagcatcctgcactgccctctctgaaaacacccacattctttggtcactgtgatttcttaggcctccgtctgttgtaccactagcatctatatgacttttgtgtaattttctctcttgaactctggtgctgtttttttgtttgtttgagacaaagtctcgctctgtcacccagggtggagtgcagtggcatgatctctgctcactacaacctccacctcccgggttccagcgattctcctgcctcagcctcccgagtagctgggactacaggcgtgcaccaccacgcctggctaattttttgtatttttagtagagacggggtttcaccatgttggtcaggctggtctcgaactcctgacctcgtaatctgccctcctcgacctcccaaagtgccgggattacaggtgtgagccactgtgcctgtctgagctctggtgctgttcttccccctagaaaagaatctctagtgtggattctgcccagacaggctgacctgagaaaggcacagtggttcctccattccttccccatcatctgagtgttccagtatcccccatccctctcaatccagtcacctgcctattgacatctagctctgtttcccctgtcttgtccatgtctctaagacccagtaccagactgaactagcagcaagaaggacgaggaggccgggcatggtggctcacgccggtaatcccagcactttgggaggccgaggtgggcggatcacttgagattgggagtttgagaccagcctggccaacatggtaaaacccgctctctattaaaaatagaaaaatcagctgggtgtggtggcacacctctgtaatcccagctactcaggaggctgagacaggagaatcacttgaacccgggaggcagaggttgcagtgagccgagatcgcgccactgcactccagcctgggtgacacagtgagactccgtctccaaaaaaaaggatgaggaatagaattctgtgcagatgtcctgacttggcaattttgtgtccctgcctcactgtctccaccaacccccgcctgtcctagtgttgttctgcctcctgtcctctcttgctctcttgtcagtctctggcttcctcggccccatttcacttcactgagtcctgacacccatctccctaggggcctgtgagaggagagggaagggtctgttctgctcagctccatgtcccccattttcctccacaataaactgggactgggctaaaa

SEQ ID NO: 149916 - DNA, 1870 bp, Homo sapiens
  Payload ID: 9614
  Gene Symbol: LY6G5B
  Gene Name: lymphocyte antigen 6 complex, locus G5B
  Uniprot ID: Q8NDX9
  ENST ID: ENST00000490011
  CDS Start-End: 1-606
atgaaggtccatatgcttgtaggtgtgctggtcatggtgggcttcacagtaggaaaggttcctgttcccgacatccggacgtgccacttctgcctcgtagaagacccttctgtaggatgcatttcaggctcagagaagtgtaccatcagcagctcatccctgtgcatggtgatcaccatctattatgatgtcaaggttcgcttcatcgttcgaggctgtggacagtacatttcctaccgctgccaagaaaaacgcaacacctactttgcagagtactggtatcaggcccagtgctgtcagtacgattattgcaactcctggtcaagcccccaactccagagctctctgccggagccccatgacaggcccctggccctgcctctgtctgactcccagattcagtggttctaccaggccctgaacctctccctgcccctccccaatttccatgctgggacggagcctgatggcctggaccccatggtcacactgtccctgaacctgggcttgtcttttgctgagctgtgccgcatgtacttgttcctcaatagttcaggacttttggttcttccccaggctggactcttgacacctcacccttcctgaattccacagtgcaaatatctttctgtaacaccctcagcatcctgcactgccctctctgaaaacacccacattctttggtcactgtgatttcttaggcctccgtctgttgtaccactagcatctatatgacttttgtgtaattttctctcttgaactctggtgctgtttttttgtttgtttgagacaaagtctcgctctgtcacccagggtggagtgcagtggcatgatctctgctcactacaacctccacctcccgggttccagcgattctcctgcctcagcctcccgagtagctgggactacaggcgtgcaccaccacgcctggctaattttttgtatttttagtagagacggggtttcaccatgttggtcaggctggtctcgaactcctgacctcgtaatctgccctcctcgacctcccaaagtgccgggattacaggtgtgagccactgtgcctggctgagctctggtgctgttcttccccctagaaaagaatctctagtgtggattctgcccagacaggctgacctgagaaaggcacagtggttcctccattccttccccatcatctgagtgttccagtatcccccatccctctcaatccagtcacctgcctattgacatctagctctgtttcccctgtcttgtccatgtctctaagacccagtaccagactgaactagcagcaagaaggacgaggaggccgggcatggtggctcacgccggtaatcccagcactttgggaggccgaggtgggcggatcacttgagattgggagtttgagaccagcctggccaacatggtaaaacccgctctctattaaaaatagaaaaatcagctgggtgtggtggcacacctctgtaatcccagctactcaggaggctgagacaggagaatcacttgaacccgggaggcagaggttgcagtgagccgagatcgcgccactgcactccagcctgggtgacacagtgagactccgtctccaaaaaaaaggatgaggaatagaattctgtgcagatgtcctgacttggcaattttgtgtccctgcctcactgtctccaccaacccccgcctgtcctagtgttgttctgcctcctgtcctctcttgctctcttgtcagtctctggcttcctcggccccatttcacttcactgagtcctgacacccatctccctaggggcctgtgagaggagagggaagggtctgttctgctcagctccatgtcccccattttcctccacaataaactgggactgggctaaaa

SEQ ID NO: 149917 - DNA, 1870 bp, Homo sapiens; identical to SEQ ID NO: 149916
  Payload ID: 9614
  Gene Symbol: LY6G5B
  Gene Name: lymphocyte antigen 6 complex, locus G5B
  Uniprot ID: Q8NDX9
  ENST ID: ENST00000462244
  CDS Start-End: 1-606

SEQ ID NO: 149918 - DNA, 1870 bp, Homo sapiens; identical to SEQ ID NO: 149915
  Payload ID: 9614
  Gene Symbol: LY6G5B
  Gene Name: lymphocyte antigen 6 complex, locus G5B
  Uniprot ID: Q8NDX9
  ENST ID: ENST00000484964
  CDS Start-End: 1-606

SEQ ID NO: 149919 - DNA, 730 bp, Homo sapiens
  Payload ID: 9615
  Gene Symbol: LY6G5C
  Gene Name: lymphocyte antigen 6 complex, locus G5C
  Uniprot ID: Q5SRR4
  ENST ID: ENST00000324540
  CDS Start-End: 5-457
agtcatgcgttttatggcaggccctgcagggagccagagtctgggtcccctgtgcttccacagcagcccccaagccctctacacggtcctcttaatagtgctggtcatgatgagcttggtgtttggtaagtttgttcctgtcaattgggaaccccctcaaccacttccattccccaaatacctgcgctgctaccgatgcctcttggagaccaaggagttagggtgccttctgggatctgacatctgcctcaccccagctggcagcagctgcatcactctccacaaaaagaacagcagcggttctgacgtcatggtgagtgactgccgaagtaaggagcagatgagtgattgttcaaatacccgaacttctccggtgtctggcttctggatattctctcaatactgcttcctggatttctgcaatgaccctcaaaacagagggctctatactccttagtgtgactgcagcaaactttggtgtaaaattccaccagtttccagccaccttcctgacttctatctgggcttggccaggacttctagtccctcacaccagccctccttgcctccctccagccactggaccccagccttggctcttcctcttggttgacgcccttcagcacacttactgctactctgtacccccagccctactgcccaccaggtttcctctcttgtcccctagtccctggatgtttctcccaaataaatttgtgtgtaaactgtt

SEQ ID NO: 149920 - DNA, 950 bp, Homo sapiens
  Payload ID: 9615
  Gene Symbol: LY6G5C
  Gene Name: lymphocyte antigen 6 complex, locus G5C
  ENST ID: ENST00000375863
  CDS Start-End: 1-677
atgcagaccttcccagttgctggggcgctggaccctgctatactggacacaaggtaggagcactcagaagggacaccgtcatctgctgctgtcgccatggcgattattcaacgccctgcctcttcaccccaggaaaaccttcgcggaacccgtcaccatggaaacgaactctctggactcttagcgcgccctgggctggccctgctgggtggacaggagaggagcaaaacgcaacaaagacgggattaattactcggaggccgcgccccctccgaagaaggccccaccctgccccggcctcacccctccccgaaataattcgaggaaatattccgcgaatgctgggtaagtttgttcctgtcaattgggaaccccctcaaccacttccattccccaaatacctgcgctgctaccgatgcctcttggagaccaaggagttagggtgccttctgggatctgacatctgcctcaccccagctggcagcagctgcatcactctccacaaaaagaacagcagcggttctgacgtcatggtgagtgactgccgaagtaaggagcagatgagtgattgttcaaatacccgaacttctccggtgtctggcttctggatattctctcaatactgcttcctggatttctgcaatgaccctcaaaacagagggctctatactccttagtgtgactgcagcaaactttggtgtaaaattccaccagtttccagccaccttcctgacttctatctgggcttggccaggacttctagtccctcataccagccctccttgcctccctccagccactggaccccagccttggctcttcctcttggttgacgcccttcagcacacttactgctactctgtacccccagccctactgcccaccaggtttcctctcttgtcccctagtccctggatgtttctcccaaataaatttgtgtgtaaactgtt

SEQ ID NO: 149921 - DNA, 674 bp, Homo sapiens
  Payload ID: 9615
  Gene Symbol: LY6G5C
  Gene Name: lymphocyte antigen 6 complex, locus G5C
  Uniprot ID: Q5SRR4
  ENST ID: ENST00000383237
  CDS Start-End: 5-457
agtcatgcgttttatggcaggccctgcagggagccagagtctgggtcccctgtgcttccacagcagcccccaagccctctacacggtcctcttaatagtgctggtcatgatgagcttggtgtttggtaagtttgttcctgtcaattgggaaccccctcaaccacttccattccccaaatacctgcgctgctaccgatgcctcttggagaccaaggagttagggtgccttctgggatctgacatctgcctcaccccagctggcagcagctgcatcactctccacaaaaagaacagcagcggttctgacgtcatggtgagtgactgccgaagtaaggagcagatgagtgattgttcaaatacccgaacttctccggtgtctggcttctggatattctctcaatactgcttcctggatttctgcaatgaccctcaaaacagagggctctatactccttagtgtgactgcagcaaactttggtgtaaaattccaccagtttccagccaccttcctgacttctatctgggcttggccaggacttctagtccctcataccagccctccttgcctccctccagccactggaccccagccttggctcttcctcttggttgacgcccttcagcacacttactgctactctgtacccccagccctactgcccaccaggtttcct

SEQ ID NO: 149922 - DNA, 730 bp, Homo sapiens; identical to SEQ ID NO: 149919
  Payload ID: 9615
  Gene Symbol: LY6G5C
  Gene Name: lymphocyte antigen 6 complex, locus G5C
  Uniprot ID: Q5SRR4
  ENST ID: ENST00000383425
  CDS Start-End: 5-457

SEQ ID NO: 149923 - DNA, 950 bp, Homo sapiens; identical to SEQ ID NO: 149920
  Payload ID: 9615
  Gene Symbol: LY6G5C
  Gene Name: lymphocyte antigen 6 complex, locus G5C
  ENST ID: ENST00000449871
  CDS Start-End: 1-677

SEQ ID NO: 149924 - DNA, 730 bp, Homo sapiens
  Payload ID: 9615
  Gene Symbol: LY6G5C
  Gene Name: lymphocyte antigen 6 complex, locus G5C
  Uniprot ID: Q5SRR4
  ENST ID: ENST00000418117
  CDS Start-End: 5-457
agtcatgcgttttatggcaggccctgcagggagccagagtctgggtcccctgtgcttccacagcagcccccaagccctctacacggtcctcttaatagtgctggtcatgatgagcttggtgtttggtaagtttgttcctgtcaattgggaaccccctcaaccacttccattccccaaatacctgcgctgctaccgatgcctcttggagaccaaggagttagggtgccttctgggatctgacatctgcctcaccccagctggcagcagctgcatcactctccacaaaaagaacagcagcggttctgacgtcatggtgagtgactgccgaagtaaggagcagatgagtgattgttcaaatacccgaacttctccggtgtctggcttctggatattctctcaatactgcttcctggatttctgcaatgaccctcaaaacagagggctctatactccttagtgtgactgcagcaaactttggtgtaaaattccaccagtttccagccaccttcctgacttctatctgggcttggccaggacttctagtccctcataccagccctccttgcctccctccagccactggaccccagccttggctcttcctcttggttgacgcccttcagcacacttactgctactctgtacccccagccctactgcccaccaggtttcctctcttgtcccctagtccctggatgtttctcccaaataaatttgtgtgtaaactgtt

SEQ ID NO: 149925 - DNA, 730 bp, Homo sapiens; identical to SEQ ID NO: 149924
  Payload ID: 9615
  Gene Symbol: LY6G5C
  Gene Name: lymphocyte antigen 6 complex, locus G5C
  Uniprot ID: Q5SRR4
  ENST ID: ENST00000431114
  CDS Start-End: 5-457

SEQ ID NO: 149926 - DNA, 950 bp, Homo sapiens
  Payload ID: 9615
  Gene Symbol: LY6G5C
  Gene Name: lymphocyte antigen 6 complex, locus G5C
  ENST ID: ENST00000449562
  CDS Start-End: 1-677
atgcagaccttcccagttgctggggcgctggaccctgctatactggacacaaggtaggagcactcagaagggacaccgtcatctgctgctgtcgccatggcgattattcaacgccctgcctcttcaccccaggaaaaccttcgcggaacccgtcaccatggaaacgaactctctggactcttagcgcgccctgggctggccctgctgggtggacaggagaggagcaaaacgcaacaaagacgggattaattactcggaggccgcgccccctccgaagaaggccccaccctgccccggcctcacccctccccgaaataattcgaggaaatattccgcgaatgctgggtaagtttgttcctgtcaattgggaaccccctcaaccacttccattccccaaatacctgcgctgctaccgatgcctcttggagaccaaggagttagggtgccttctgggatctgacatctgcctcaccccagctggcagcagctgcatcactctccacaaaaagaacagcagcggttctgacgtcatggtgagtgactgccgaagtaaggagcagatgagtgattgttcaaatacccgaacttctccggtgtctggcttctggatattctctcaatactgcttcctggatttctgcaatgaccctcaaaacagagggctctatactccttagtgtgactgcagcaaactttggtgtaaaattccaccagtttccagccaccttcctgacttctatctgggcttggccaggacttctagtccctcacaccagccctccttgcctccctccagccactggaccccagccttggctcttcctcttggttgacgcccttcagcacacttactgctactctgtacccccagccctactgcccaccaggtttcctctcttgtcccctagtccctggatgtttctcccaaataaatttgtgtgtaaactgtt

SEQ ID NO: 149927 - DNA, 950 bp, Homo sapiens; identical to SEQ ID NO: 149926
  Payload ID: 9615
  Gene Symbol: LY6G5C
  Gene Name: lymphocyte antigen 6 complex, locus G5C
  ENST ID: ENST00000450798
  CDS Start-End: 1-677

SEQ ID NO: 149928 - DNA, 950 bp, Homo sapiens; identical to SEQ ID NO: 149920
  Payload ID: 9615
  Gene Symbol: LY6G5C
  Gene Name: lymphocyte antigen 6 complex, locus G5C
  ENST ID: ENST00000411492
  CDS Start-End: 1-677

SEQ ID NO: 149929 - DNA, 950 bp, Homo sapiens; identical to SEQ ID NO: 149920
  Payload ID: 9615
  Gene Symbol: LY6G5C
  Gene Name: lymphocyte antigen 6 complex, locus G5C
  ENST ID: ENST00000435280
  CDS Start-End: 1-677

SEQ ID NO: 149930 - DNA, 950 bp, Homo sapiens; identical to SEQ ID NO: 149920
  Payload ID: 9615
  Gene Symbol: LY6G5C
  Gene Name: lymphocyte antigen 6 complex, locus G5C
  ENST ID: ENST00000432980
  CDS Start-End: 1-677

SEQ ID NO: 149931 - DNA, 730 bp, Homo sapiens; identical to SEQ ID NO: 149924
  Payload ID: 9615
  Gene Symbol: LY6G5C
  Gene Name: lymphocyte antigen 6 complex, locus G5C
  Uniprot ID: Q5SRR4
  ENST ID: ENST00000455753
  CDS Start-End: 5-457

SEQ ID NO: 149932 - DNA, 730 bp, Homo sapiens; identical to SEQ ID NO: 149924
  Payload ID: 9615
  Gene Symbol: LY6G5C
  Gene Name: lymphocyte antigen 6 complex, locus G5C
  Uniprot ID: Q5SRR4
  ENST ID: ENST00000458081
  CDS Start-End: 5-457

SEQ ID NO: 149933 - DNA, 538 bp, Homo sapiens
  Payload ID: 9615
  Gene Symbol: LY6G5C
  Gene Name: lymphocyte antigen 6 complex, locus G5C
  ENST ID: ENST00000474678
  CDS Start-End: 1-210
atggcaggccctgcagggagccagagtctgggtcccctgtgcttccacagcagcccccaagccctctacacggtcctcttaatagtgctggtcatgatgagcttggtgtttggtaagtggctccaagggttcagaagggtctcctggcctggatggagaaacccacagacaccaagtgtctgggtacacctgtccaggatgctcaggtaagtttgttcctgtcaattgggaaccccctcaaccacttccattccccaaatacctgcgctgctaccgatgcctcttggagaccaaggagttagggtgccttctgggatctgacatctgcctcaccccagctggcagcagctgcatcactctccacaaaaagaacagcagcggttctgacgtcatggtgagtgactgccgaagtaaggagcagatgagtgattgttcaaatacccgaacttctccggtgtctggcttctggatattctctcaatactgcttcctggatttctgcaatgaccctcaaaacagagggctctatactccttag

SEQ ID NO: 149934 - DNA, 992 bp, Homo sapiens
  Payload ID: 9616
  Gene Symbol: LY6G6C
  Gene Name: lymphocyte antigen 6 complex, locus G6C
  Uniprot ID: O95867
  ENST ID: ENST00000375819
  CDS Start-End: 167-544
ctggtcagctgcgtagtaagtgagaagggaggggctaccagaggcagggaagggaggagcctttgggtttataaattccaaaaaggccactcaactcctagagctggatccttgaaaatctactctatcagctgctgtggttgccaccattctcaggaccctcgccatgaaagcccttatgctgctcaccctgtctgttctgctctgctgggtctcagctgacattcgctgtcactcctgctacaaggtccctgtgctgggctgtgtggaccggcagtcctgccgcctggagccaggacagcaatgcctgacaacacatgcataccttggtaagatgtgggttttctccaatctgcgctgtggcacaccagaagagccctgtcaggaggccttcaaccaaaccaaccgcaagctgggtctgacatataacaccacctgctgcaacaaggacaactgcaacagcgcaggaccccggcccactccagccctgggccttgtcttccttacctccttggctggccttggcctctggctgctgcactgagactcattccattggctgcccctcctcccacctgccttggcctgagcctctctccctgtgtctctgtatcccctggctttacagaatcgtctctccctagctcccatttctttaattaaacactgttccgagtggtctcctcatccatccttcccacctcacacccttcactctcctttttctgggtcccttcccacttccttccaggacctccattggctcctagaagggctccccactttgcttcctatactctgctgtcccctacttgaggagggattgggatctgggcctgaaatggggcttctgtgttgtccccagtgaaggctcccacaaggacctgatgacctcactgtacagagctgactccccaaacccaggctcccatatgtaccccatcccccatactcacctctttccattttgagtaataaatgtctgagtctga

SEQ ID NO: 149935 - DNA, 992 bp, Homo sapiens
  Payload ID: 9616
  Gene Symbol: LY6G6C
  Gene Name: lymphocyte antigen 6 complex, locus G6C
  Uniprot ID: O95867
  ENST ID: ENST00000383413
  CDS Start-End: 167-544
ctggtcagctgcgtagtaagtgagaagggaggggctaccagaggcagggaagggaggagcctttgggtttataaattccaaaaaggccactcaactcctagagctggatccttgaaaatctactctatcagctgctgtggttgccaccattctcaggaccctcgccatgaaagcccttatgctgctcaccctgtctgttctgctctgctgggtctcagctgacattcgctgtcactcctgctacaaggtccctgtgctgggctgtgtggaccggcagtcctgccgcctggagccaggacagcaatgcctgacaacacatgcataccttggtaagatgtgggttttctccaatctgcgctgtggcacaccagaagagccctgtcaggaggccttcaaccaaaccaaccgtaagctgggtctgacatataacaccacctgctgcaacaaggacaactgcaacagcgcaggaccccggcccactccagccctgggccttgtcttccttacctccttggctggccttggcctctggctgctgcactgagactcattccattggctgcccctcctcccacctgccttggcctgagcctctctccctgtgtctctgtatcccctggctttacagaatcgtctctccctagctcccatttctttaattaaacactgttccgagtggtctcctcatccatccttcccacctcacacccttcactctcctttttctgggtcccttcccacttccttccaggacctccattggctcctagaagggctccccactttgcttcctatactctgctgtcccctacttgaggagggattgggatctgggcctgaaatggggcttctgtgttgtccccagtgaaggctcccacaaggacctgatgacctcactgtacagagctgactccccaaatccaggctcccatatgtaccccatcccccatactcacctctttccattttgagtaataaatgtctgagtctga

SEQ ID NO: 149936 - DNA, 992 bp, Homo sapiens; identical to SEQ ID NO: 149934
  Payload ID: 9616
  Gene Symbol: LY6G6C
  Gene Name: lymphocyte antigen 6 complex, locus G6C
  Uniprot ID: O95867
  ENST ID: ENST00000419939
  CDS Start-End: 167-544

SEQ ID NO: 149937 - DNA, 992 bp, Homo sapiens; identical to SEQ ID NO: 149934
  Payload ID: 9616
  Gene Symbol: LY6G6C
  Gene Name: lymphocyte antigen 6 complex, locus G6C
  Uniprot ID: O95867
  ENST ID: ENST00000448386
  CDS Start-End: 167-544

SEQ ID NO: 149938 - DNA, 992 bp, Homo sapiens; identical to SEQ ID NO: 149934
  Payload ID: 9616
  Gene Symbol: LY6G6C
  Gene Name: lymphocyte antigen 6 complex, locus G6C
  Uniprot ID: O95867
  ENST ID: ENST00000428498
  CDS Start-End: 167-544

SEQ ID NO: 149939 - DNA, 992 bp, Homo sapiens; identical to SEQ ID NO: 149934
  Payload ID: 9616
  Gene Symbol: LY6G6C
  Gene Name: lymphocyte antigen 6 complex, locus G6C
  Uniprot ID: O95867
  ENST ID: ENST00000428121
  CDS Start-End: 167-544

SEQ ID NO: 149940 - DNA, 992 bp, Homo sapiens; identical to SEQ ID NO: 149934
  Payload ID: 9616
  Gene Symbol: LY6G6C
  Gene Name: lymphocyte antigen 6 complex, locus G6C
  Uniprot ID: O95867
  ENST ID: ENST00000434915
  CDS Start-End: 167-544

SEQ ID NO: 149941 - DNA, 937 bp, Homo sapiens
  Payload ID: 9616
  Gene Symbol: LY6G6C
  Gene Name: lymphocyte antigen 6 complex, locus G6C
  ENST ID: ENST00000497123
  CDS Start-End: 280-489
atgaaagcccttatgctgctcaccctgtctgttctgctctgctgggtctcagatggttgcagtgacatctaagagcctccatggaaacagagcgttttcttgagccttctgaagaggggacaactgggccacttacctccagggtgaagtggatttcactgagctgacattcgctgtcactcctgctacaaggtccctgtgctgggctgtgtggaccggcagtcctgccgcctggagccaggacagcaatgcctgacaacacatgcataccttggtaagatgtgggttttctccaatctgcgctgtggcacaccagaagagccctgtcaggaggccttcaaccaaaccaaccgcaagctgggtctgacatataacaccacctgctgcaacaaggacaactgcaacagcgcaggaccccggcccactccagccctgggccttgtcttccttacctccttggctggccttggcctctggctgctgcactgagactcattccattggctgcccctcctcccacctgccttggcctgagcctctctccctgtgtctctgtatcccctggctttacagaatcgtctctccctagctcccatttctttaattaaacactgttccgagtggtctcctcatccatccttcccacctcacacccttcactctcctttttctgggtcccttcccacttccttccaggacctccattggctcctagaagggctccccactttgcttcctatactctgctgtcccctacttgaggagggattgggatctgggcctgaaatggggcttctgtgttgtccccagtgaaggctcccacaaggacctgatgacctcactgtacagagctgactccccaaacccaggctcccatatgtaccccatcccccatactcacctctttccattttgagtaataaatgtctgagtctga

SEQ ID NO: 149942 - DNA, 937 bp, Homo sapiens; identical to SEQ ID NO: 149941
  Payload ID: 9616
  Gene Symbol: LY6G6C
  Gene Name: lymphocyte antigen 6 complex, locus G6C
  ENST ID: ENST00000467714
  CDS Start-End: 280-489

SEQ ID NO: 149943 - DNA, 937 bp, Homo sapiens; identical to SEQ ID NO: 149941
  Payload ID: 9616
  Gene Symbol: LY6G6C
  Gene Name: lymphocyte antigen 6 complex, locus G6C
  ENST ID: ENST00000495859
  CDS Start-End: 280-489

SEQ ID NO: 149944 - DNA, 937 bp, Homo sapiens; identical to SEQ ID NO: 149941
  Payload ID: 9616
  Gene Symbol: LY6G6C
  Gene Name: lymphocyte antigen 6 complex, locus G6C
  ENST ID: ENST00000480025
  CDS Start-End: 280-489

SEQ ID NO: 149945 - DNA, 937 bp, Homo sapiens; identical to SEQ ID NO: 149941
  Payload ID: 9616
  Gene Symbol: LY6G6C
  Gene Name: lymphocyte antigen 6 complex, locus G6C
  ENST ID: ENST00000470881
  CDS Start-End: 280-489

SEQ ID NO: 149946 - DNA, 523 bp, Homo sapiens
  Payload ID: 9617
  Gene Symbol: LY6G6D
  Gene Name: lymphocyte antigen 6 complex, locus G6D
  ENST ID: ENST00000375824
  CDS Start-End: 1-523
atgaaaccccagtttgttgggatcttgctcagctccctgctaggggctgccttgggaaaccgaatgcggtgctacaactgtggtggaagccccagcagttcttgcaaagaggccgtgaccacctgtggcgagggcagaccccagccaggcctggaacagatcaagctacctggaaaccggaggtgttttttgagggggctgaaaatccctttgggctccttgaaatcacatctgctctgccccagaaggcaagtcctgaagccaggagtccaacaccccagtttcattctctctctcagccccagtgaccttgattcaccaacatccagcctgcgtcgcagcccatcattgcaatcaagtggagacagagtcggtgggagacgtgacttatccagcccacagggactgctacctgggagacctgtgcaacagcgccgtggcaagccatgtggcccctgcaggcattttggctgcagcagctaccgccctgacctgtctcttgccaggactgtggagcggatag

SEQ ID NO: 149947 - DNA, 402 bp, Homo sapiens
  Payload ID: 9617
  Gene Symbol: LY6G6D
  Gene Name: lymphocyte antigen 6 complex, locus G6D
  Uniprot ID: O95868
  ENST ID: ENST00000375825
  CDS Start-End: 1-402
atgaaaccccagtttgttgggatcttgctcagctccctgctaggggctgccttgggaaaccgaatgcggtgctacaactgtggtggaagccccagcagttcttgcaaagaggccgtgaccacctgtggcgagggcagaccccagccaggcctggaacagatcaagctacctggaaaccccccagtgaccttgattcaccaacatccagcctgcgtcgcagcccatcattgcaatcaagtggagacagagtcggtgggagacgtgacttatccagcccacagggactgctacctgggagacctgtgcaacagcgccgtggcaagccatgtggcccctgcaggcattttggctgcagcagctaccgccctgacctgtctcttgccaggactgtggagcggatag

SEQ ID NO: 149948 - DNA, 523 bp, Homo sapiens; identical to SEQ ID NO: 149946
  Payload ID: 9617
  Gene Symbol: LY6G6D
  Gene Name: lymphocyte antigen 6 complex, locus G6D
  ENST ID: ENST00000383415
  CDS Start-End: 1-523

SEQ ID NO: 149949 - DNA, 402 bp, Homo sapiens; identical to SEQ ID NO: 149947
  Payload ID: 9617
  Gene Symbol: LY6G6D
  Gene Name: lymphocyte antigen 6 complex, locus G6D
  Uniprot ID: O95868
  ENST ID: ENST00000400080
  CDS Start-End: 1-402

SEQ ID NO: 149950 - DNA, 1266 bp, Homo sapiens
  Payload ID: 9617
  Gene Symbol: LY6G6D
  Gene Name: lymphocyte antigen 6 complex, locus G6D
  ENST ID: ENST00000400084
  CDS Start-End: 4-1152
cccatggcagtcttattcctcctcctgttcctatgtggaactccccaggctgcagacaacatgcaggccatctatgtggccttgggggaggcagtagagctgccatgtccctcaccacctactctacatggggacgaacacctgtcatggttctgcagccctgcagcaggctccttcaccaccctggtagcccaagtccaagtgggcaggccagccccagaccctggaaaaccaggaagggaatccaggctcagactgctggggaactattctttgtggttggagggatccaaagaggaagatgccgggcggtactggtgcactgtgctaggtcagcaccacaactaccagaactggagggtgtacgacgtcttggtgctcaaaggatcccagttatctgcaagggctgcagatggatccccctgcaatgtcctcctgtgctctgtggtccccagcagacgcatggactctgtgacctggcaggaagggaagggtcccgtgaggggccgtgttcagtccttctggggcagtgaggctgccctgctcttggtgtgtcctggggaggggctttctgagcccaggagccgaagaccaagaatcatccgctgcctcatgactcacaacaaaggggtcagctttagcctggcagcctccatcgatgcttctcctgccctctgtgccccttccacgggctgggacatgccttggattctgatgctgctgctcacaatgggccagggagttgtcatcctggccctcagcatcgtgctctggaggcagagggtccgtggggctccaggcagaggaaaccgaatgcggtgctacaactgtggtggaagccccagcagttcttgcaaagaggccgtgaccacctgtggcgagggcagaccccagccaggcctggaacagatcaagctacctggaaaccccccagtgaccttgattcaccaacatccagcctgcgtcgcagcccatcattgcaatcaagtggagacagagtcggtgggagacgtgacttatccagcccacagggactgctacctgggagacctgtgcaacagcgccgtggcaagccatgtggcccctgcaggcattttggctgcagcagctaccgccctgacctgtctcttgccaggactgtggagcggatagggggagtaggagtagagaagggaacaagggagcaagggaacaagggacatctgaacatctaatgtgagaagacaaacatccttctgtgagtcattaaaatctatgaaccactct

SEQ ID NO: 149951 - DNA, 402 bp, Homo sapiens; identical to SEQ ID NO: 149947
  Payload ID: 9617
  Gene Symbol: LY6G6D
  Gene Name: lymphocyte antigen 6 complex, locus G6D
  Uniprot ID: O95868
  ENST ID: ENST00000419389
  CDS Start-End: 1-402

SEQ ID NO: 149952 - DNA, 523 bp, Homo sapiens; identical to SEQ ID NO: 149946
  Payload ID: 9617
  Gene Symbol: LY6G6D
  Gene Name: lymphocyte antigen 6 complex, locus G6D
  ENST ID: ENST00000456155
  CDS Start-End: 1-523

SEQ ID NO: 149953 - DNA, 402 bp, Homo sapiens; identical to SEQ ID NO: 149947
  Payload ID: 9617
  Gene Symbol: LY6G6D
  Gene Name: lymphocyte antigen 6 complex, locus G6D
  Uniprot ID: O95868
  ENST ID: ENST00000440095
  CDS Start-End: 1-402

SEQ ID NO: 149954 - DNA, 523 bp, Homo sapiens; identical to SEQ ID NO: 149946
  Payload ID: 9617
  Gene Symbol: LY6G6D
  Gene Name: lymphocyte antigen 6 complex, locus G6D
  ENST ID: ENST00000421590
  CDS Start-End: 1-523

SEQ ID NO: 149955 - DNA, 402 bp, Homo sapiens
  Payload ID: 9617
  Gene Symbol: LY6G6D
  Gene Name: lymphocyte antigen 6 complex, locus G6D
  Uniprot ID: O95868
  ENST ID: ENST00000434515
  CDS Start-End: 1-402
atgaaaccccagtttgttgggatcttgctcagctccctgctaggggctgccttgggaaaccgaatgcggtgctacaactgtggtggaagccccagcagtacttgcaaagaggccgtgaccacctgtggcgagggcagaccccagccaggcctggaacagatcaagctacctggaaaccccccagtgaccttgattcaccaacatccagcctgcgtcgcagcccatcattgcaatcaagtggagacagagtcggtgggagacgtgacttatccagcccacagggactgctacctgggagacctgtgcaacagcgccgtggcaagccatgtggcccctgcaggcattttggctgcagcagctaccgccctgacctgtctcttgccaggactgtggagcggatag

SEQ ID NO: 149956 - DNA, 402 bp, Homo sapiens; identical to SEQ ID NO: 149947
  Payload ID: 9617
  Gene Symbol: LY6G6D
  Gene Name: lymphocyte antigen 6 complex, locus G6D
  Uniprot ID: O95868
  ENST ID: ENST00000444880
  CDS Start-End: 1-402

SEQ ID NO: 149957 - DNA, 402 bp, Homo sapiens; identical to SEQ ID NO: 149947
  Payload ID: 9617
  Gene Symbol: LY6G6D
  Gene Name: lymphocyte antigen 6 complex, locus G6D
  Uniprot ID: O95868
  ENST ID: ENST00000420378
  CDS Start-End: 1-402

SEQ ID NO: 149958 - DNA, 1266 bp, Homo sapiens; identical to SEQ ID NO: 124864
  Payload ID: 9617
  Gene Symbol: LY6G6D
  Gene Name: lymphocyte antigen 6 complex, locus G6D
  ENST ID: ENST00000430366
  CDS Start-End: 4-1152

SEQ ID NO: 149959 - DNA, 1266 bp, Homo sapiens; identical to SEQ ID NO: 124864
  Payload ID: 9617
  Gene Symbol: LY6G6D
  Gene Name: lymphocyte antigen 6 complex, locus G6D
  ENST ID: ENST00000455955
  CDS Start-End: 4-1152

SEQ ID NO: 149960 - DNA, 523 bp, Homo sapiens
  Payload ID: 9617
  Gene Symbol: LY6G6D
  Gene Name: lymphocyte antigen 6 complex, locus G6D
  ENST ID: ENST00000430137
  CDS Start-End: 1-523
atgaaaccccagtttgttgggatcttgctcagctccctgctaggggctgccttgggaaaccgaatgcggtgctacaactgtggtggaagccccagcagtacttgcaaagaggccgtgaccacctgtggcgagggcagaccccagccaggcctggaacagatcaagctacctggaaaccggaggtgttttttgagggggctgaaaatccctttgggctccttgaaatcacatctgctctgccccagaaggcaagtcctgaagccaggagtccaacaccccagtttcattctctctctcagccccagtgaccttgattcaccaacatccagcctgcgtcgcagcccatcattgcaatcaagtggagacagagtcggtgggagacgtgacttatccagcccacagggactgctacctgggagacctgtgcaacagcgccgtggcaagccatgtggcccctgcaggcattttggctgcagcagctaccgccctgacctgtctcttgccaggactgtggagcggatag

SEQ ID NO: 149961 - DNA, 523 bp, Homo sapiens; identical to SEQ ID NO: 149946
  Payload ID: 9617
  Gene Symbol: LY6G6D
  Gene Name: lymphocyte antigen 6 complex, locus G6D
  ENST ID: ENST00000439522
  CDS Start-End: 1-523

SEQ ID NO: 149962 - DNA, 523 bp, Homo sapiens; identical to SEQ ID NO: 149946
  Payload ID: 9617
  Gene Symbol: LY6G6D
  Gene Name: lymphocyte antigen 6 complex, locus G6D
  ENST ID: ENST00000445443
  CDS Start-End: 1-523

SEQ ID NO: 149963 - DNA, 501 bp, Homo sapiens
  Payload ID: 9618
  Gene Symbol: LY6G6E
  Gene Name: lymphocyte antigen 6 complex, locus G6E (pseudogene)
  ENST ID: ENST00000383417
  CDS Start-End: 1-303
atgggcacctccagcatcttcctctgcgtgctgttcctctgtggggcactgggtctcaccatgtcccctgcccggggaaggctccgctgctacatctgtggcttcaccaaaccctgccaccctgttcccaccgagtgtcgggacgatgaagcttgtggcatcagtattggcacttcaggtaggactctggtccaatggcccttctccaggaggctccctacctccatccatccggcctttcctgtggcccccgcctcagcatgcctctttcatcccacagaccagagtgagatcactgagtgaaaaagctgcctctcaagggcccagtgccctctgccaggctatgccacctactggctgcactcctacactctgtggcaccactgctgcgagcaggacctgtgcaacatagccgcttccccacagcagctcaccagcctcctcgcctccctgcccctctttgtggccagcttcgctgggagaggacacctcctccactag

SEQ ID NO: 149964 - DNA, 383 bp, Homo sapiens
  Payload ID: 9618
  Gene Symbol: LY6G6E
  Gene Name: lymphocyte antigen 6 complex, locus G6E (pseudogene)
  ENST ID: ENST00000383418
  CDS Start-End: 1-378
atgggcacctccagcatcttcctctgcgtgctgttcctctgtggggcactgggtctcaccatgtcccctgcccggggaaggctccgctgctacatctgtggcttcaccaaaccctgccaccctgttcccaccgagtgtcgggacgatgaagcttgtggcatcagtattggcacttcaggaaaaagctgcctctcaagggcccagtgccctctgccaggctatgccacctactggctgcactcctacactctgtggcaccactgctgcgagcaggacctgtgcaacatagccgcttccccacagcagctcaccagcctcctcgcctccctgcccctctttgtggccagcttcgctgggagaggacacctcctccactagcttcc

SEQ ID NO: 149965 - DNA, 501 bp, Homo sapiens; identical to SEQ ID NO: 149963
  Payload ID: 9618
  Gene Symbol: LY6G6E
  Gene Name: lymphocyte antigen 6 complex, locus G6E (pseudogene)
  ENST ID: ENST00000399142
  CDS Start-End: 1-303

SEQ ID NO: 149966 - DNA, 776 bp, Homo sapiens
  Payload ID: 9618
  Gene Symbol: LY6G6E
  Gene Name: lymphocyte antigen 6 complex, locus G6E (pseudogene)
  ENST ID: ENST00000409239
  CDS Start-End: 179-445
agagacaacatgctgagagagcagaggagaccctccaggcaagggcagactccttgcaggggcaggctgggggcccccgctgcctgctgggtcaggctggtgaatctggtcatggttccgccccccagattcactccctaggtgtgtttgtttactggttcctcactgtcttgctcaaatgctccaactctacaaatcccgggatctcggggtgcagatcacctctcccagattcctgagcctgtgtctggccatgggcacctccagcatcttcctctgcgtgctgttcctctgtggggcactgggtctcaccatgtcccctgcccggggaaggctccgctgctacatctgtggcttcaccaaaccctgccaccctgttcccaccgagtgtcgggacgatgaagcttgtggcatcagtattggcacttcagatgcccattgctgatgccccgtgtcagcccaggtcactggcaaggcaggcattttgatgacactgtggatctcaggcaaggggatcaaaggagcatcaggtatggtaaggaggagagtcttgctaggaaagactaatgtggtaggtcgggaactcaggatggagggcttgggggactatgaagagtacctttaataaaaggtctatctaggagtccagtaatactgcagatactgcagtgtgtgtgtgtgtgtgtgtgtgtgtgtgtgtgtgtgtctgtgtgtgtgtgctctaagagcaaactgtagctgcttggtgggttgggctggagctggaacctggacca

SEQ ID NO: 149967 - DNA, 501 bp, Homo sapiens; identical to SEQ ID NO: 149963
  Payload ID: 9618
  Gene Symbol: LY6G6E
  Gene Name: lymphocyte antigen 6 complex, locus G6E (pseudogene)
  ENST ID: ENST00000434670
  CDS Start-End: 1-303

SEQ ID NO: 149968 - DNA, 399 bp, Homo sapiens
  Payload ID: 9618
  Gene Symbol: LY6G6E
  Gene Name: lymphocyte antigen 6 complex, locus G6E (pseudogene)
  ENST ID: ENST00000419000
  CDS Start-End: 1-201
atgggcacctccagcatcttcctctgcgtgctgttcctctgtggggcactgggtctcaccatgtcccctgcccggggaaggctccgctgctacatctgtggcttcaccaaaccctgccaccctgttcccaccgagtgtcgggacgatgaagcttgtggcatcagtattggcacttcagaccagagtgagatcactgagtgaaaaagctgcctctcaagggcccagtgccctctgccaggctatgccacctactggctgcactcctacactctgtggcaccactgctgcgagcaggacctgtgcaacatagccgcttccccacagcagctcaccagcctcctcgcctccctgcccctctttgtggccagcttcgctgggagaggacacctcctccactag

SEQ ID NO: 149969 - DNA, 399 bp, Homo sapiens; identical to SEQ ID NO: 149968
  Payload ID: 9618
  Gene Symbol: LY6G6E
  Gene Name: lymphocyte antigen 6 complex, locus G6E (pseudogene)
  ENST ID: ENST00000435369
  CDS Start-End: 1-201

SEQ ID NO: 149970 - DNA, 501 bp, Homo sapiens; identical to SEQ ID NO: 149963
  Payload ID: 9618
  Gene Symbol: LY6G6E
  Gene Name: lymphocyte antigen 6 complex, locus G6E (pseudogene)
  ENST ID: ENST00000453077
  CDS Start-End: 1-303

SEQ ID NO: 149971 - DNA, 399 bp, Homo sapiens; identical to SEQ ID NO: 149968
  Payload ID: 9618
  Gene Symbol: LY6G6E
  Gene Name: lymphocyte antigen 6 complex, locus G6E (pseudogene)
  ENST ID: ENST00000450147
  CDS Start-End: 1-201

SEQ ID NO: 149972 - DNA, 399 bp, Homo sapiens; identical to SEQ ID NO: 149968
  Payload ID: 9618
  Gene Symbol: LY6G6E
  Gene Name: lymphocyte antigen 6 complex, locus G6E (pseudogene)
  ENST ID: ENST00000419767
  CDS Start-End: 1-201

SEQ ID NO: 149973 - DNA, 501 bp, Homo sapiens; identical to SEQ ID NO: 149963
  Payload ID: 9618
  Gene Symbol: LY6G6E
  Gene Name: lymphocyte antigen 6 complex, locus G6E (pseudogene)
  ENST ID: ENST00000446610
  CDS Start-End: 1-303

SEQ ID NO: 149974 - DNA, 501 bp, Homo sapiens; identical to SEQ ID NO: 149963
  Payload ID: 9618
  Gene Symbol: LY6G6E
  Gene Name: lymphocyte antigen 6 complex, locus G6E (pseudogene)
  ENST ID: ENST00000431420
  CDS Start-End: 1-303

SEQ ID NO: 149975 - DNA, 399 bp, Homo sapiens; identical to SEQ ID NO: 149968
  Payload ID: 9618
  Gene Symbol: LY6G6E
  Gene Name: lymphocyte antigen 6 complex, locus G6E (pseudogene)
  ENST ID: ENST00000430237
  CDS Start-End: 1-201

SEQ ID NO: 149976 - DNA, 399 bp, Homo sapiens; identical to SEQ ID NO: 149968
  Payload ID: 9618
  Gene Symbol: LY6G6E
  Gene Name: lymphocyte antigen 6 complex, locus G6E (pseudogene)
  ENST ID: ENST00000435051
  CDS Start-End: 1-201

SEQ ID NO: 149977 - DNA, 399 bp, Homo sapiens; identical to SEQ ID NO: 149968
  Payload ID: 9618
  Gene Symbol: LY6G6E
  Gene Name: lymphocyte antigen 6 complex, locus G6E (pseudogene)
  ENST ID: ENST00000443544
  CDS Start-End: 1-201

SEQ ID NO: 149978 - DNA, 501 bp, Homo sapiens; identical to SEQ ID NO: 149963
  Payload ID: 9618
  Gene Symbol: LY6G6E
  Gene Name: lymphocyte antigen 6 complex, locus G6E (pseudogene)
  ENST ID: ENST00000431644
  CDS Start-End: 1-303

SEQ ID NO: 149979 - DNA, 384 bp, Homo sapiens
  Payload ID: 9618
  Gene Symbol: LY6G6E
  Gene Name: lymphocyte antigen 6 complex, locus G6E (pseudogene)
  ENST ID: ENST00000469626
  CDS Start-End: 1-384
atgggcacctccagcatcttcctctgcgtgctgttcctctgtggggcactgggtctcaccatgtcccctgcccggggaaggctccgctgctacatctgtggcttcaccaaaccctgccaccctgttcccaccgagtgtcgggacgatgaagcttgtggcatcagtattggcacttcagtgaaaaagctgcctctcaagggcccagtgccctctgccaggctatgccacctactggctgcactcctacactctgtggcaccactgctgcgagcaggacctgtgcaacatagccgcttccccacagcagctcaccagcctcctcgcctccctgcccctctttgtggccagcttcgctgggagaggacacctcctccactagcttcc

SEQ ID NO: 149980 - DNA, 383 bp, Homo sapiens; identical to SEQ ID NO: 149964
  Payload ID: 9618
  Gene Symbol: LY6G6E
  Gene Name: lymphocyte antigen 6 complex, locus G6E (pseudogene)
  ENST ID: ENST00000548716
  CDS Start-End: 1-378

SEQ ID NO: 149981 - DNA, 383 bp, Homo sapiens; identical to SEQ ID NO: 149964
  Payload ID: 9618
  Gene Symbol: LY6G6E
  Gene Name: lymphocyte antigen 6 complex, locus G6E (pseudogene)
  ENST ID: ENST00000547676
  CDS Start-End: 1-378

SEQ ID NO: 149982 - DNA, 383 bp, Homo sapiens; identical to SEQ ID NO: 149964
  Payload ID: 9618
  Gene Symbol: LY6G6E
  Gene Name: lymphocyte antigen 6 complex, locus G6E (pseudogene)
  ENST ID: ENST00000548848
  CDS Start-End: 1-378

SEQ ID NO: 149983 - DNA, 383 bp, Homo sapiens; identical to SEQ ID NO: 149964
  Payload ID: 9618
  Gene Symbol: LY6G6E
  Gene Name: lymphocyte antigen 6 complex, locus G6E (pseudogene)
  ENST ID: ENST00000550508
  CDS Start-End: 1-378

SEQ ID NO: 149984 - DNA, 383 bp, Homo sapiens; identical to SEQ ID NO: 149964
  Payload ID: 9618
  Gene Symbol: LY6G6E
  Gene Name: lymphocyte antigen 6 complex, locus G6E (pseudogene)
  ENST ID: ENST00000546405
  CDS Start-End: 1-378

SEQ ID NO: 149985 - DNA, 383 bp, Homo sapiens; identical to SEQ ID NO: 149964
  Payload ID: 9618
  Gene Symbol: LY6G6E
  Gene Name: lymphocyte antigen 6 complex, locus G6E (pseudogene)
  ENST ID: ENST00000547421
  CDS Start-End: 1-378

SEQ ID NO: 149986 - DNA, 920 bp, Homo sapiens
  Payload ID: 9619
  Gene Symbol: LY6G6F
  Gene Name: lymphocyte antigen 6 complex, locus G6F
  Uniprot ID: Q5SQ64
  ENST ID: ENST00000375832
  CDS Start-End: 23-916
gagaacttggcaggctctccccatggcagtcttattcctcctcctgttcctatgtggaactccccaggctgcagacaacatgcaggccatctatgtggccttgggggaggcagtagagctgccatgtccctcaccacctactctacatggggacgaacacctgtcatggttctgcagccctgcagcaggctccttcaccaccctggtagcccaagtccaagtgggcaggccagccccagaccctggaaaaccaggaagggaatccaggctcagactgctggggaactattctttgtggttggagggatccaaagaggaagatgccgggcggtactggtgcgctgtgctaggtcagcaccacaactaccagaactggagggtgtacgacgtcttggtgctcaaaggatcccagttatctgcaagggctgcagatggatccccctgcaatgtcctcctgtgctctgtggtccccagcagacgcatggactctgtgacctggcaggaagggaagggtcccgtgaggggccgtgttcagtccttctggggcagtgaggctgccctgctcttggtgtgtcctggggaggggctttctgagcccaggagccgaagaccaagaatcatccgctgcctcatgactcacaacaaaggggtcagctttagcctggcagcctccatcgatgcttctcctgccctctgtgccccttccacgggctgggacatgccttggattctgatgctgctgctcacaatgggccagggagttgtcatcctggccctcagcatcgtgctctggaggcagagggtccgtggggctccaggcagagatgcctcgattcctcagttcaaacccgaaatccaggtctatgagaacatccatttggcccgtcttggcccacctgcccacaagcccaggtgatttt

SEQ ID NO: 149987 - DNA, 920 bp, Homo sapiens
  Payload ID: 9619
  Gene Symbol: LY6G6F
  Gene Name: lymphocyte antigen 6 complex, locus G6F
  Uniprot ID: Q5SQ64
  ENST ID: ENST00000383420
  CDS Start-End: 23-916
gagaacttggcaggctctccccatggcagtcttattcctcctcctgttcctatgtggaactccccaggctgcagacaacatgcaggccatctatgtggccttgggggaggcagtagagctgccatgtccctcaccacctactctacatggggacgaacacctgtcatggttctgcagccctgcagcaggctccttcaccaccctggtagcccaagtccaagtgggcaggccagccccagaccctggaaaaccaggaagggaatccaggctcagactgctggggaactattctttgtggttggagggatccaaagaggaagatgccgggcggtactggtgcactgtgctaggtcagcaccacaactaccagaactggagggtgtacgacgtcttggtgctcaaaggatcccagttatctgcaagggctgcagatggatccccctgcaatgtcctcctgtgctctgtggtccccagcagacgcatggactctgtgacctggcaggaagggaagggtcccgtgaggggccgtgttcagtccttctggggcagtgaggctgccctgctcttggtgtgtcctggggaggggctttctgagcccaggagccgaagaccaagaatcatccgctgcctcatgactcacaacaaaggggtcagctttagcctggcagcctccatcgatgcttctcctgccctctgtgccccttccacgggctgggacatgccttggattctgatgctgctgctcacaatgggccagggagttgtcatcctggccctcagcatcgtgctctggaggcagagggtccgtggggctccaggcagagatgcctcgattcctcagttcaaacccgaaatccaggtctatgagaacatccatttggcccgtcttggcccacctgcccacaagcccaggtgatttt

SEQ ID NO: 149988 - DNA, 920 bp, Homo sapiens; identical to SEQ ID NO: 149986
  Payload ID: 9619
  Gene Symbol: LY6G6F
  Gene Name: lymphocyte antigen 6 complex, locus G6F
  Uniprot ID: Q5SQ64
  ENST ID: ENST00000453044
  CDS Start-End: 23-916

SEQ ID NO: 149989 - DNA, 920 bp, Homo sapiens; identical to SEQ ID NO: 149987
  Payload ID: 9619
  Gene Symbol: LY6G6F
  Gene Name: lymphocyte antigen 6 complex, locus G6F
  Uniprot ID: Q5SQ64
  ENST ID: ENST00000442105
  CDS Start-End: 23-916

SEQ ID NO: 149990 - DNA, 920 bp, Homo sapiens; identical to SEQ ID NO: 149986
  Payload ID: 9619
  Gene Symbol: LY6G6F
  Gene Name: lymphocyte antigen 6 complex, locus G6F
  Uniprot ID: Q5SQ64
  ENST ID: ENST00000446062
  CDS Start-End: 23-916

SEQ ID NO: 149991 - DNA, 920 bp, Homo sapiens; identical to SEQ ID NO: 149986
  Payload ID: 9619
  Gene Symbol: LY6G6F
  Gene Name: lymphocyte antigen 6 complex, locus G6F
  Uniprot ID: Q5SQ64
  ENST ID: ENST00000455632
  CDS Start-End: 23-916

SEQ ID NO: 149992 - DNA, 920 bp, Homo sapiens; identical to SEQ ID NO: 149986
  Payload ID: 9619
  Gene Symbol: LY6G6F
  Gene Name: lymphocyte antigen 6 complex, locus G6F
  Uniprot ID: Q5SQ64
  ENST ID: ENST00000447811
  CDS Start-End: 23-916

SEQ ID NO: 149993 - DNA, 951 bp, Homo sapiens
  Payload ID: 9620
  Gene Symbol: LY6H
  Gene Name: lymphocyte antigen 6 complex, locus H
  Uniprot ID: O94772
  ENST ID: ENST00000342752
  CDS Start-End: 130-615
ggtccgcgtctgcggctgcgttccccgaaagacgaggctgcgcccggattccggtccgcagggagaccgaagggcacagctccccgcgccgcgcacgccgcccgagcccggagtgcggacacccccgggatgcttgcgccccagaggacccgcgccccaagcccccgcgccgcccccaggcccacccggagcatgctgcctgcagccatgaagggcctcggcctggcgctgctggccgtcctgctgtgctcggcgcccgctcatggcctgtggtgccaggactgcaccctgaccaccaactccagccattgcaccccaaagcagtgccagccgtccgacacggtgtgtgccagtgtccgaatcaccgatcccagcagcagcaggaaggatcactcggtgaacaagatgtgtgcctcctcctgtgacttcgttaagcgacactttttctcagactatctgatggggtttattaactctgggatcttaaaggtcgacgtggactgctgcgagaaggatttgtgcaatggggcggcaggggcagggcacagcccctgggccctggccggggggctcctgctcagcctggggcctgccctcctctgggctgggccctgatgtctcctccttcccacggggcttctgagcttgctcccctgagcctgtggctgccctctccccagcctggcgtggctggggctgggggcagccttggcccagctccgtggctgtggcctgtggctctcactcctcccccgacgtgaagcctccctgtctctccgccagctctgagtcccaggcagctggacatctccaggaaaccaggccatctgggcaggaggcctggggatgagggtggggggggacccccaggtcccggaggggaagtgaagcaacagcccagctggaagggcgtcttctgcggagaaataaagtcacttttgagtcctgaga

SEQ ID NO: 149994 - DNA, 1056 bp, Homo sapiens
  Payload ID: 9620
  Gene Symbol: LY6H
  Gene Name: lymphocyte antigen 6 complex, locus H
  Uniprot ID: O94772
  ENST ID: ENST00000414417
  CDS Start-End: 235-720
gaccccaggggtctgcgaacccggacctgcgcgtggcgccgcgccgggtacctccccctctctgcgtctttgtgcattttgcttcctttcgcagtaaacgttcttccgagaaattccaaggggatctcagccaagcagagggggaagggatcctgcccacgcctggggagaccgaagggcacagctccccgcgccgcgcacgccgcccgagcccggagtgcggacacccccgggatgcttgcgccccagaggacccgcgccccaagcccccgcgccgcccccaggcccacccggagcatgctgcctgcagccatgaagggcctcggcctggcgctgctggccgtcctgctgtgctcggcgcccgctcatggcctgtggtgccaggactgcaccctgaccaccaactccagccattgcaccccaaagcagtgccagccgtccgacacggtgtgtgccagtgtccgaatcaccgatcccagcagcagcaggaaggatcactcggtgaacaagatgtgtgcctcctcctgtgacttcgttaagcgacactttttctcagactatctgatggggtttattaactctgggatcttaaaggtcgacgtggactgctgcgagaaggatttgtgcaatggggcggcaggggcagggcacagcccctgggccctggccggggggctcctgctcagcctggggcctgccctcctctgggctgggccctgatgtctcctccttcccacggggcttctgagcttgctcccctgagcctgtggctgccctctccccagcctggcgtggctggggctgggggcagccttggcccagctccgtggctgtggcctgtggctctcactcctcccccgacgtgaagcctccctgtctctccgccagctctgagtcccaggcagctggacatctccaggaaaccaggccatctgggcaggaggcctggggatgagggtggggggggacccccaggtcccggaggggaagtgaagcaacagcccagctggaagggcgtcttctgcggagaaataaagtcacttttgagtcctgaga

SEQ ID NO: 149995 - DNA, 925 bp, Homo sapiens
  Payload ID: 9620
  Gene Symbol: LY6H
  Gene Name: lymphocyte antigen 6 complex, locus H
  Uniprot ID: O94772
  ENST ID: ENST00000430474
  CDS Start-End: 167-589
agtggcaggtcccacccgctcccgcccctgccgctcattcctgtccggacgcacctgcagctccccggggagaagaggacgccccccatccgctcccccacacaggcttgcgccccagaggacccgcgccccaagcccccgcgccgcccccaggcccacccggagcatgctgcctgcagccatgaagggcctcggcctggcgctgctggccgtcctgctgtgctcggcgcccgctcatggcctgtggtgccaggactgcaccctgaccaccaactccagccattgcaccccaaagcagtgccagccgtccgacacggtgtgtgccagtgtccgaatcaccgatcccagcagcagcaggaaggatcactcggtgaacaagatgtgtgcctcctcctgtgacttcgttaagcgacactttttctcagactatctgatggggtttattaactctgggatcttaaaggtcgacgtggactgctgcgagaaggatttgtgcaatggggcggcaggggcagggcacagcccctgggccctggccggggggctcctgctcagcctggggcctgccctcctctgggctgggccctgatgtctcctccttcccacggggcttctgagcttgctcccctgagcctgtggctgccctctccccagcctggcgtggctggggctgggggcagccttggcccagctccgtggctgtggcctgtggctctcactcctcccccgacgtgaagcctccctgtctctccgccagctctgagtcccaggcagctggacatctccaggaaaccaggccatctgggcaggaggcctggggatgagggtggggggggacccccaggtcccggaggggaagtgaagcaacagcccagctggaagggcgtcttctgcggagaaataaagtcacttttgagtcctgaga

SEQ ID NO: 149996 - DNA, 925 bp, Homo sapiens; identical to SEQ ID NO: 149995
  Payload ID: 9620
  Gene Symbol: LY6H
  Gene Name: lymphocyte antigen 6 complex, locus H
  Uniprot ID: O94772
  ENST ID: ENST00000610554
  CDS Start-End: 167-589

SEQ ID NO: 149997 - DNA, 980 bp, Homo sapiens
  Payload ID: 9620
  Gene Symbol: LY6H
  Gene Name: lymphocyte antigen 6 complex, locus H
  Uniprot ID: O94772
  ENST ID: ENST00000615409
  CDS Start-End: 223-645
attttgcttcctttcgcagtaaacgttcttccgagaaattccaaggggatctcagccaagcagagggggaagggatcctgcccacgcctggggagaccgaagggcacagctccccgcgccgcgcacgccgcccgagcccggagtgcggacacccccgggatgcttgcgccccagaggacccgcgccccaagcccccgcgccgcccccaggcccacccggagcatgctgcctgcagccatgaagggcctcggcctggcgctgctggccgtcctgctgtgctcggcgcccgctcatggcctgtggtgccaggactgcaccctgaccaccaactccagccattgcaccccaaagcagtgccagccgtccgacacggtgtgtgccagtgtccgaatcaccgatcccagcagcagcaggaaggatcactcggtgaacaagatgtgtgcctcctcctgtgacttcgttaagcgacactttttctcagactatctgatggggtttattaactctgggatcttaaaggtcgacgtggactgctgcgagaaggatttgtgcaatggggcggcaggggcagggcacagcccctgggccctggccggggggctcctgctcagcctggggcctgccctcctctgggctgggccctgatgtctcctccttcccacggggcttctgagcttgctcccctgagcctgtggctgccctctccccagcctggcgtggctggggctgggggcagccttggcccagctccgtggctgtggcctgtggctctcactcctcccccgacgtgaagcctccctgtctctccgccagctctgagtcccaggcagctggacatctccaggaaaccaggccatctgggcaggaggcctggggatgagggtggggggggacccccaggtcccggaggggaagtgaagcaacagcccagctggaagggcgtcttctgcggagaaataaagtcacttttgagtcctgag

SEQ ID NO: 149998 - DNA, 1056 bp, Homo sapiens; identical to SEQ ID NO: 149994
  Payload ID: 9620
  Gene Symbol: LY6H
  Gene Name: lymphocyte antigen 6 complex, locus H
  Uniprot ID: O94772
  ENST ID: ENST00000615434
  CDS Start-End: 235-720

SEQ ID NO: 149999 - DNA, 951 bp, Homo sapiens; identical to SEQ ID NO: 149993
  Payload ID: 9620
  Gene Symbol: LY6H
  Gene Name: lymphocyte antigen 6 complex, locus H
  Uniprot ID: O94772
  ENST ID: ENST00000631670
  CDS Start-End: 130-615

SEQ ID NO: 150000 - DNA, 2671 bp, Homo sapiens
  Payload ID: 9621
  Gene Symbol: LY6K
  Gene Name: lymphocyte antigen 6 complex, locus K
  Uniprot ID: Q17RY6
  ENST ID: ENST00000292430
  CDS Start-End: 418-915
gagttatcagaggtgagcccgtgctcttcagcggagaagatcccctacctggccgccggccactttctgtgggccgtggggtcctcaaggagacggcccttgggctcaggggctgcgtttccacacgcgcctttcccagggctcccgcgcccgttcctgcctggccgccggccgctccaacagcagcacaaggcgggactcagaaccggcgttcagggccgccagcggccgcgaggccctgagatgaggctccaaagaccccgacaggccccggcgggtgggaggcgcgcgccccggggcgggcggggctccccctaccggccagacccggggagaggcgcgcggaggctgcgaaggttccagaagggcggggagggggcgccgcgcgctgaccctccctgggcaccgctggggacgatggcgctgctcgccttgctgctggtcgtggccctaccgcgggtgtggacagacgccaacctgactgcgagacaacgagatccagaggactcccagcgaacggacgagggtgacaatagagtgtggtgtcatgtttgtgagagagaaaacactttcgagtgccagaacccaaggaggtgcaaatggacagagccatactgcgttatagcggccgtgaaaatatttccacgttttttcatggttgcgaagcagtgctccgctggttgtgcagcgatggagagacccaagccagaggagaagcggtttctcctggaagagcccatgcccttcttttacctcaagtgttgtaaaattcgctactgcaatttagaggggccacctatcaactcatcagtgttcaaagaatatgctgggagcatgggtgagagctgtggtgggctgtggctggccatcctcctgctgctggcctccattgcagccggcctcagcctgtcttgagccacgggactgccacagactgagccttccggagcatggactcgctccagaccgttgtcacctgttgcattaaacttgttttctgttgattacctcttggtttgacttcccagggtcttgggatgggagagtggggatcaggtgcagttggctcttaaccctcaagggttctttaactcacattcagaggaagtccagatctcctgagtagtgattttggtgacaagtttttctctttgaaatcaaaccttgtaactcatttattgctgatggccactcttttccttgactcccctctgcctctgagggcttcagtattgatggggagggaggcctaagtaccactcatggagagtatgtgctgagatgcttccgacctttcaggtgacgcaggaacactgggggagtctgaatgattggggtgaagacatccctggagtgaaggactcctcagcatggggggcagtggggcacacgttagggctgcccccattccagtggtggaggcgctgtggatggctgcttttcctcaacctttcctaccagattccaggaggcagaagataactaattgtgttgaagaaacttagacttcacccaccagctggcacaggtgcacagattcataaattcccacacgtgtgtgttcaacatctgaaacttaggccaagtagagagcatcagggtaaatggcgttcatttctctgttaagatgcagccatccatggggagctgagaaatcagactcaaagttccaccaaaaacaaatacaaggggacttcaaaagttcacgaaaaaattgaattaaaagataaaaattaaaaaatgttttatttctcagcatgagctccatcaaggtcgagacgcttctgcaagtaatggtaccagccattcagttcatccctaaagaattgggcaccctgggaatttaaccatgccacttcagtctttgtgacgttattaactgaagaaaagtgggtgccctttaaagattttttaaaattataaaacagaagtaaccaaatcaggcctggaaggtgtatgcctagtgatttcccattgaaactctcacaaaactggccttgtttgatgagaggaatgagcaggagcattgtcatggtggagaagggctctctggtgaagctttccggggtgacgatttcctgggtgttttcctgctaaatcgttggctgactttctctatacactctcataataagatgttactgttctttggccctccagaaagtcaataagcaagatgccttgagcattcacaaaacggttgccacgacctttgcccttgacatgtctgcttttactctgatgggaccacgcccacctctaggtagtcattgctttgcttgtgctttgccttcaggagtgtactggttaagccacatttcatctccggctataattatatgaagaaatgcttcaggatcttgattccacttgtttaaaatggccatagaacgcttttctcttatctgcagctgagctgggagaaagttttggcacccaccgagtggacagtttactcaactttaatttcagtcagaattgtgtaagctgaacaccttgggatacctacagcgttggctattgtttctgctgctattaatcagtcctcttaaattagggcacaaacaagatgaattgtttcctcacagactgatgtggctggcctgctgctgtggacttcctctccaacatcatctcttctcttcttccaatgagttatccacttacttaa

SEQ ID NO: 150001 - DNA, 855 bp, Homo sapiens
  Payload ID: 9621
  Gene Symbol: LY6K
  Gene Name: lymphocyte antigen 6 complex, locus K
  ENST ID: ENST00000518841
  CDS Start-End: 416-718
gttatcagaggtgagcccgtgctcttcagcggagaagatcccctacctggccgccggccactttctgtgggccgtggggtcctcaaggagacggcccttgggctcaggggctgcgtttccacacgcgcctttcccagggctcccgcgcccgttcctgcctggccgccggccgctccaacagcagcacaaggcgggactcagaaccggcgttcagggccgccagcggccgcgaggccctgagatgaggctccaaagaccccgacaggccccggcgggtgggaggcgcgcgccccggggcgggcggggctccccctaccggccagacccggggagaggcgcgcggaggctgcgaaggttccagaagggcggggagggggcgccgcgcgctgaccctccctgggcaccgctggggacgatggcgctgctcgccttgctgctggtcgtggccctaccgcgggtgtggacagacgccaacctgactgcgagacaacgagatccagaggactcccagcgaacggacgagggtgacaatagagtgtggtgtcatgtttgtgagagagaaaacactttcgagtgccagaacccaaggaggtgcaaatggacagagccatactgcgttatagcggccgtgaggagatcttcagggctcgtgaattctgattccgcccagcagtcactctccagcccttcggtatccacgaagttggtggggtgctgaggtgatgcttcagactcagtgtggcccacatcgactttataacttaatatggcaaaatgatttgtacagtgatgtataagatgaagtgtggtcatgagacaagacccccagctcagagtcgagccaggcccaccaag

SEQ ID NO: 150002 - DNA, 2724 bp, Homo sapiens
  Payload ID: 9621
  Gene Symbol: LY6K
  Gene Name: lymphocyte antigen 6 complex, locus K
  ENST ID: ENST00000522591
  CDS Start-End: 57-314
agaagggcggggagggggcgccgcgcgctgaccctccctgggcaccgctggggacgatggcgctgctcgccttgctgctggtcgtggccctaccgcgggtgtggacagacgccaacctgactgcgagacaacgagatccagaggactcccagcgaacggacgagggtgacaatagagtgtggtgtcatgtttgtgagagagaaaacactttcgagtgccagaacccaaggaggtgcaaatggacagagccatactgcgttatagcggccgtgagtgagtatcttcgctcttgttggggacccaaaggcaggtgaacagagggctttcaggaatcagggctgtctagttttcctcaatggggaataactaatagaaagtagcctttttttttttttattttctgagacggagtcaggctggagtgcagtggtgtgatctcggctcactgcaacctcgccttccgggttcaagcgattctcctgcctcagcctccagagtagctggtattatggatgcgcgccaccacactggctaattttttatttttagtagaggtggggtttcaccatgttggtcaggctggtctcgaactcctgacctcaggtgacccacccgccctcggccccccaaagtgctgggattacaagcgtaagccaccgcgccctgcctttttttccctttaaaatgtgaagagcaaagtcctcagaggccagagagaggtgtaggaactgtgctagtgtaaggcagtgcctgctacagtgggtccagatgaaatactgggaggtaggaagaaaatctggatttcatatcatccatttttaaatgaaaaattaagctttaatagtgttaaatgcgccacagagaacagtgtctatgtcactcttacaagagatgcacaaaaccaaggtgtacagccttcaagtgtgttctcaaaggagggtgcatgccttaaaaattgtggagaccactgctctgtcatctgtgattcccctgaaaacctctgggtacatgaagccctccccaaggggaatctggacacccagcacattctgcccacagggagatcttcagggctcgtgaattctgattccgcccagcagtcactctccagcccttcggtatccacgaagttggtggggtgctgaggtgatgcttcagactcagtgtggcccacatcgactttataacttaatatggcaaaatgatttgtacagtgatgtataagatgaagtgtggtcatgagacaagacccccagctcagagtcgagccaggcccaccaagaggccagctccacaccctgggtgatggccagaatggctgggagtcatgtgtctgtctgtggtcacaaaggcctgagccaaccctgtgtttgagaagttgagacctgtttgttcccaaacagcaacccctagacccgcattcccagtgcatatggacaggccataccacgcagaagccagcccttccctgaagcagcattcaacacacaggcctggccctcgtcctcccgactcccccttggtgccccagttgactgtgcacctttgagcagggccgccaggggtgaggctttgacccagacagaagggcctcggtgtcaggcattggaattgcgtgattgccttctctcggtctttatttcctattagaaatatttccacgttttttcatggttgcgaagcagtgctccgctggttgtgcagcgatggagagacccaagccagaggagaagcggtttctcctggaagagcccatgcccttcttttacctcaagtgttgtaaaattcgctactgcaatttagaggggccacctatcaactcatcagtgttcaaagaatatgctgggagcatgggtgagagctgtggtgggctgtggctggccatcctcctgctgctggcctccattgcagccggcctcagcctgtcttgagccacgggactgccacagactgagccttccggagcatggactcgctccagaccgttgtcacctgttgcattaaacttgttttctgttgattacctcttggtttgacttcccagggtcttgggatgggagagtggggatcaggtgcagttggctcttaaccctcaagggttctttaactcacattcagaggaagtccagatctcctgagtagtgattttggtgacaagtttttctctttgaaatcaaaccttgtaactcatttattgctgatggccactcttttccttgactcccctctgcctctgagggcttcagtattgatggggagggaggcctaagtaccactcatggagagtatgtgctgagatgcttccgacctttcaggtgacgcaggaacactgggggagtctgaatgattggggtgaagacatccctggagtgaaggactcctcagcatggggggcagtggggcacacgttagggctgcccccattccagtggtggaggcgctgtggatggctgcttttcctcaacctttcctaccagattccaggaggcagaagataactaattgtgttgaagaaacttagacttcacccaccagctggcacaggtgcacagattcataaattcccacacgtgtgtgttcaacatctgaaacttaggccaagtagagagcatcagggtaaatggcgttcatttctctgttaagatgcagccatccatggggagctgagaaatcagactcaaagttccaccaaaaacaaatacaaggggacttcaaaagttcacg

SEQ ID NO: 150003 - DNA, 963 bp, Homo sapiens
  Payload ID: 9621
  Gene Symbol: LY6K
  Gene Name: lymphocyte antigen 6 complex, locus K
  Uniprot ID: Q17RY6
  ENST ID: ENST00000519387
  CDS Start-End: 415-732
ttatcagaggtgagcccgtgctcttcagcggagaagatcccctacctggccgccggccactttctgtgggccgtggggtcctcaaggagacggcccttgggctcaggggctgcgtttccacacgcgcctttcccagggctcccgcgcccgttcctgcctggccgccggccgctccaacagcagcacaaggcgggactcagaaccggcgttcagggccgccagcggccgcgaggccctgagatgaggctccaaagaccccgacaggccccggcgggtgggaggcgcgcgccccggggcgggcggggctccccctaccggccagacccggggagaggcgcgcggaggctgcgaaggttccagaagggcggggagggggcgccgcgcgctgaccctccctgggcaccgctggggacgatggcgctgctcgccttgctgctggtcgtggccctaccgcgggtgtggacagacgccaacctgactgcgagacaacgagatccagaggactcccagcgaacggacgagggtgacaatagagtgtggtgtcatgtttgtgagagagaaaacactttcgagtgccagaacccaaggaggtgcaaatggacagagccatactgcgttatagcggccgtgacagtgctccgctggttgtgcagcgatggagagacccaagccagaggagaagcggtttctcctggaagagcccatgcccttcttttacctcaagtgttgtaaaattcgctactgcaatttagaggggccacctatcaactcatcagtgttcaaagaatatgctgggagcatgggtgagagctgtggtgggctgtggctggccatcctcctgctgctggcctccattgcagccggcctcagcctgtcttgagccacgggactgccacagactgagccttccggagcatggactcgctccagaccgttgtcacctgttgcattaaacttgttttc

SEQ ID NO: 150004 - DNA, 6886 bp, Homo sapiens
  Payload ID: 9622
  Gene Symbol: LY75
  Gene Name: lymphocyte antigen 75
  Uniprot ID: O60449
  ENST ID: ENST00000263636
  CDS Start-End: 29-5197
ccggccggaaggcttgcgccagctcaggatgaggacaggctgggcgacccctcgccgcccggcggggctcctcatgctgctcttctggttcttcgatctcgcggagccctctggccgcgcagctaatgaccccttcaccatcgtccatggaaatacgggcaagtgcatcaagccagtgtatggctggatagtagcagacgactgtgatgaaactgaggacaagttatggaagtgggtgtcccagcatcggctctttcatttgcactcccaaaagtgccttggcctcgatattaccaaatcggtaaatgagctgagaatgttcagctgtgactccagtgccatgctgtggtggaaatgtgagcaccactctctgtacggagctgcccggtaccggctggctctgaaggatggacatggcacagcaatctcaaatgcatctgatgtctggaagaaaggaggctcagaggaaagcctttgtgaccagccttatcatgagatctataccagagatgggaactcttatgggagaccttgtgaatttccattcttaattgatgggacctggcatcatgattgcattcttgatgaagatcatagtgggccatggtgtgccaccaccttaaattatgaatatgaccgaaagtggggcatctgcttaaagcctgaaaacggttgtgaagataattgggaaaagaacgagcagtttggaagttgctaccaatttaatactcagacggctctttcttggaaagaagcttatgtttcatgtcagaatcaaggagctgatttactgagcatcaacagtgctgctgaattaacttaccttaaagaaaaagaaggcattgctaagattttctggattggtttaaatcagctatactctgctagaggctgggaatggtcagaccacaaaccattaaactttctcaactgggatccagacaggcccagtgcacctactataggtggctccagctgtgcaagaatggatgctgagtctggtctgtggcagagcttttcctgtgaagctcaactgccctatgtctgcaggaaaccattaaataatacagtggagttaacagatgtctggacatactcagatacccgctgtgatgcaggctggctgccaaataatggattttgctatctgctggtaaatgaaagtaattcctgggataaggcacatgcgaaatgcaaagccttcagtagtgacctaatcagcattcattctctagcagatgtggaggtggttgtcacaaaactccataatgaggatatcaaagaagaagtgtggataggccttaagaacataaacataccaactttatttcagtggtcagatggtactgaagttactctaacatattgggatgagaatgagccaaatgttccctacaataagacgcccaactgtgtttcctacttaggagagctaggtcagtggaaagtccaatcatgtgaggagaaactaaaatatgtatgcaagagaaagggagaaaaactgaatgacgcaagttctgataagatgtgtcctccagatgagggctggaagagacatggagaaacctgttacaagatttatgaggatgaggtcccttttggaacaaactgcaatctgactatcactagcagatttgagcaagaatacctaaatgatttgatgaaaaagtatgataaatctctaagaaaatacttctggactggcctgagagatgtagattcttgtggagagtataactgggcaactgttggtggaagaaggcgggctgtaaccttttccaactggaattttcttgagccagcttccccgggcggctgcgtggctatgtctactggaaagtctgttggaaagtgggaggtgaaggactgcagaagcttcaaagcactttcaatttgcaagaaaatgagtggaccccttgggcctgaagaagcatcccctaagcctgatgacccctgtcctgaaggctggcagagtttccccgcaagtctttcttgttataaggtattccatgcagaaagaattgtaagaaagaggaactgggaagaagctgaacgattctgccaagcccttggagcacacctttctagcttcagccatgtggatgaaataaaggaatttcttcactttttaacggaccagttcagtggccagcattggctgtggattggtttgaataaaaggagcccagatttacaaggatcctggcaatggagtgatcgtacaccagtgtctactattatcatgccaaatgagtttcagcaggattatgacatcagagactgtgctgctgtcaaggtatttcataggccatggcgaagaggctggcatttctatgatgatagagaatttatttatttgaggccttttgcttgtgatacaaaacttgaatgggtgtgccaaattccaaaaggccgtactccaaaaacaccagactggtacaatccagaccgtgctggaattcatggacctccacttataattgaaggaagtgaatattggtttgttgctgatcttcacctaaactatgaagaagccgtcctgtactgtgccagcaatcacagctttcttgcaactataacatcttttgtgggactaaaagccatcaaaaacaaaatagcaaatatatctggtgatggacagaagtggtggataagaattagcgagtggccaatagatgatcattttacatactcacgatatccatggcaccgctttcctgtgacatttggagaggaatgcttgtacatgtctgccaagacttggcttatcgacttaggtaaaccaacagactgtagtaccaagttgcccttcatctgtgaaaaatataatgtttcttcgttagagaaatacagcccagattctgcagctaaagtgcaatgttctgagcaatggattccttttcagaataagtgttttctaaagatcaaacccgtgtctctcacattttctcaagcaagcgatacctgtcactcctatggtggcacccttccttcagtgttgagccagattgaacaagactttattacatccttgcttccggatatggaagctactttatggattggtttgcgctggactgcctatgaaaagataaacaaatggacagataacagagagctgacgtacagtaactttcacccattattggttagtgggaggctgagaataccagaaaatttttttgaggaagagtctcgctaccactgtgccctaatactcaacctccaaaaatcaccgtttactgggacgtggaattttacatcctgcagtgaacgccactttgtgtctctctgtcagaaatattcagaagttaaaagcagacagacgttgcagaatgcttcagaaactgtaaagtatctaaataatctgtacaaaataatcccaaagactctgacttggcacagtgctaaaagggagtgtctgaaaagtaacatgcagctggtgagcatcacggacccttaccagcaggcattcctcagtgtgcaggcgctccttcacaactcttccttatggatcggactcttcagtcaagatgatgaactcaactttggttggtcagatgggaaacgtcttcattttagtcgctgggctgaaactaatgggcaactcgaagactgtgtagtattagacactgatggattctggaaaacagttgattgcaatgacaatcaaccaggtgctatttgctactattcaggaaatgagactgaaaaagaggtcaaaccagttgacagtgttaaatgtccatctcctgttctaaatactccgtggataccatttcagaactgttgctacaatttcataataacaaagaataggcatatggcaacaacacaggatgaagttcatactaaatgccagaaactgaatccaaaatcacatattctgagtattcgagatgaaaaggagaataactttgttcttgagcaactgctgtacttcaattatatggcttcatgggtcatgttaggaataacttatagaaataagtctcttatgtggtttgataagaccccactgtcatatacacattggagagcaggaagaccaactataaaaaatgagaagtttttggctggtttaagtactgacggcttctgggatattcaaacctttaaagttattgaagaagcagtttattttcaccagcacagcattcttgcttgtaaaattgaaatggttgactacaaagaagaatataatactacactgccacagtttatgccatatgaagatggtatttacagtgttattcaaaaaaaggtaacatggtatgaagcattaaacatgtgttctcaaagtggaggtcacttggcaagcgttcacaaccaaaatggccagctctttctggaagatattgtaaaacgtgatggatttccactatgggttgggctctcaagtcatgatggaagtgaatcaagttttgaatggtctgatggtagtacatttgactatatcccatggaaaggccaaacatctcctggaaattgtgttctcttggatccaaaaggaacttggaaacatgaaaaatgcaactctgttaaggatggtgctatttgttataaacctacaaaatctaaaaagctgtcccgtcttacatattcatcaagatgtccagcagcaaaagagaatgggtcacggtggatccagtacaagggtcactgttacaagtctgatcaggcattgcacagtttttcagaggccaaaaaattgtgttcaaaacatgatcactctgcaactatcgtttccataaaagatgaagatgagaataaatttgtgagcagactgatgagggaaaataataacattaccatgagagtttggcttggattatctcaacattctgttgaccagtcttggagttggttagatggatcagaagtgacatttgtcaaatgggaaaataaaagtaagagtggtgttggaagatgtagcatgttgatagcttcaaatgaaacttggaaaaaagttgaatgtgaacatggttttggaagagttgtctgcaaagtgcctctgggccctgattacacagcaatagctatcatagttgccacactaagtatcttagttctcatgggcggactgatttggttcctcttccaaaggcaccgtttgcacctggcgggtttctcatcagttcgatatgcacaaggagtgaatgaagatgagattatgcttccttctttccatgactaaattcttctaaaagttttctaatttgcactaatgtgttatgagaaattagtcacttaaaatgtcccagtgtcagtatttactctgctccaaagtagaactcttaaatactttttcagttgtttagatcttaggcatgtgctggtatccacagttaattccctgctaaatgccatgtttatcaccctaattaatagaatggaggggactccaaagctggaactgaagtccaaattgtttgtacagtaatatgtttaatgttcattttctctgtatgaatgtgattggtaactaggatatgtatattttaatagaatttttaacaaaacttcttagaaaattaaaataggcatattactaggtgacatgtctactttttaatttttaagagcatccggccaaatgcaaaattagtacctcaaagtaaaaattgaactgtaaactctatcagcattgtttcaaaatagtcatttttagcactggggaaaaataaacaataagacatgcttactttttaatttttatttttttgagactgagtctctctctgttgcccaggctggagtacaatggcgtgatctcggctcactgcaaatctccgcctcccaggttcaagcgattctcctgcctcagcctcctgagtagctgggattacaggcaactgccaccatgcccggctaatttttgtatttttagtagagatggggtttcaccatgttggccaggctggtctcgaactcgtgaccgcaggtgatcctcccgcctcggcctcccaaagtgctgggattacaggcatgagccaccgcgcctggcctctgcttactttttatatagcaaaatgattcctcttggcaagatgtttcttatattattccaaagttatttcataccattattatgtaaatatgaagagtttttttctgtttataattgtttataaaacaatgacttttaaagatttagtgcttaacattttcccaagtgtgggaacattatttttagattgagtaggtaccttgtagcagtgtgctttgcattttctgatgtattacatgactgtttcttttgtaaagagaatcaactaggtatttaagactgataattttacaatttatatgcttcacatagcatgtcaacttttgactaagaattttgttttacttttttaacatgtgttaaacagagaaagggtccatgaaggaaagtgtatgagttgcatttgtaaaaatgagactttttcagtggaactctaaaccttgtgatgactactaacaaatgtaaaattatgagtgattaagaaaacattgctttgtggttatcactttaagttttgacacctagattatagtcttagtaatagcatccactggaaaaggtgaaaatgttttattcggcatttaacttacatttgtactttatttttgtataaaatccatagatttattttacatttagagtatttacactatgataaagttgtaaataattttctaagacagtttttatatagtctacagttgtcctgatttcttattgaatttgttagactagttctcttgtcctgtgatctgtgtacaattttagtcactaagactttcctccaagaactaagccaacttgatgtgaaaagcacagctgtatataatggtgatgtcataataaagttgttttatcttttaagtaaaagtaaaa

SEQ ID NO: 150005 - DNA, 559 bp, Homo sapiens
  Payload ID: 9623
  Gene Symbol: LY86
  Gene Name: lymphocyte antigen 86
  Uniprot ID: O95711
  ENST ID: ENST00000230568
  CDS Start-End: 67-555
ggaagaaattttacaggctttttattggccggttatttttctgtgtgtcccatacaggcccccaccatgaagggtttcacagccactctcttcctctggactctgatttttcccagctgcagtggaggcggcggtgggaaagcctggcccacacacgtggtctgtagcgacagcggcttggaagtgctctaccagagttgcgatccattacaagattttggcttttctgttgaaaagtgttccaagcaattaaaatcaaatatcaacattagatttggaattattctgagagaggacatcaaagagctttttcttgacctagctctcatgtctcaaggctcatctgttttgaatttctcctatcccatctgtgaggcggctctgcccaagttttctttctgtggaagaaggaaaggagagcagatttactatgctgggcctgtcaataatcctgaatttactattcctcagggagaataccaggttttgctggaactgtacactgaaaaacggtccaccgtggcctgtgccaatgctactatcatgtgctcctgactgt

SEQ ID NO: 150006 - DNA, 1197 bp, Homo sapiens
  Payload ID: 9623
  Gene Symbol: LY86
  Gene Name: lymphocyte antigen 86
  Uniprot ID: O95711
  ENST ID: ENST00000379953
  CDS Start-End: 353-841
tccagagaccacatctgcagctcccaaaacaaggtctgttctgcagctggacaattcactgctaaaatcccaaacctaagagcagagccaaagccagaggagaggaaagtgacaatagggccaaagcctcattccagattccaaatgtcattctgtagccctcgtgctatcaactgctgcctgctggctgcagccaggtccctgggtccatacacagcctgcatcaagagcctgcagagactcgggggctggagatgggaaacagatggtggcctgcgctttgtctttcccaagtttacagcctcacctgggggtggaggctgttctgaggggcccccaagaggcccccaccatgaagggtttcacagccactctcttcctctggactctgatttttcccagctgcagtggaggcggcggtgggaaagcctggcccacacacgtggtctgtagcgacagcggcttggaagtgctctaccagagttgcgatccattacaagattttggcttttctgttgaaaagtgttccaagcaattaaaatcaaatatcaacattagatttggaattattctgagagaggacatcaaagagctttttcttgacctagctctcatgtctcaaggctcatctgttttgaatttctcctatcccatctgtgaggcggctctgcccaagttttctttctgtggaagaaggaaaggagagcagatttactatgctgggcctgtcaataatcctgaatttactattcctcagggagaataccaggttttgctggaactgtacactgaaaaacggtccaccgtggcctgtgccaatgctactatcatgtgctcctgactgtggcctgtagcaaaaatcacagccagctgcatctcgtgggacctccaagctcctctgactgaacctactgtgggaggagaagcagctgatgacagagagaggctctacaaagaagcgcccccaaagagtgcagctgctaattttagtcccaggaccagacatccccagactccacagatgtaatgaagtccccgaatgtatctgtttctaaggagcctcttggcagtccttaagcagtcttgagggtccatcctttttctctaattggtcgcctcccaccagactcacctgcttttcaactttttaggagtgcttcctcacagttaccaagaataaagaaagctggccaccat

SEQ ID NO: 150007 - DNA, 2443 bp, Homo sapiens
  Payload ID: 9624
  Gene Symbol: LY9
  Gene Name: lymphocyte antigen 9
  Uniprot ID: Q9HBG7
  ENST ID: ENST00000263285
  CDS Start-End: 31-1998
cttcagtctcagttctgaaaatagatcatcatggtggcaccaaagagtcacacagatgactgggctcctgggcctttctccagtaagccacagaggagtcagctgcaaatattctcttctgttctacagacctctctcctcttcctgctcatgggactaagagcctctggaaaggactcagccccaacagtggtgtcagggatcctagggggttccgtgactctccccctaaacatctcagtagacacagagattgagaacgtcatctggattggtcccaaaaatgctcttgctttcgcacgtcccaaagaaaatgtaaccattatggtcaaaagctacctgggccgactagacatcaccaagtggagttactccctgtgcatcagcaatctgactctgaatgatgcaggatcctacaaagcccagataaaccaaaggaattttgaagtcaccactgaggaggaattcaccctgttcgtctatgagcagctgcaggagccccaagtcaccatgaagtctgtgaaggtgtctgagaacttctcctgtaacatcactctaatgtgctccgtgaagggggcagagaaaagtgttctgtacagctggaccccaagggaaccccatgcttctgagtccaatggaggctccattcttaccgtctcccgaacaccatgtgacccagacctgccatacatctgcacagcccagaaccccgtcagccagagaagctccctccctgtccatgttgggcagttctgtacagatccaggagcctccagaggaggaacaacgggggagactgtggtaggggtcctgggagagccagtcaccctgccacttgcactcccagcctgccgggacacagagaaggttgtctggttgtttaacacatccatcattagcaaagagagggaagaagcagcaacggcagatccactcattaaatccagggatccttacaagaacagggtgtgggtctccagccaggactgctccctgaagatcagccagctgaagatagaggacgccggcccctaccatgcctacgtgtgctcagaggcctccagcgtcaccagcatgacacatgtcaccctgctcatctaccgcaggctgaggaagcccaaaatcacgtggagcctcaggcacagtgaggatggcatctgcaggatcagcctgacctgctccgtggaggacgggggaaacactgtcatgtacacatggaccccgctgcagaaggaagctgttgtgtcccaaggggaatcacacctcaatgtctcatggagaagcagtgaaaatcaccccaacctcacatgcacagccagcaaccctgtcagcaggagttcccaccagtttctttctgagaacatctgttcaggacctgagagaaacacaaagctttggattgggttgttcctgatggtttgccttctgtgcgttgggatcttcagctggtgcatttggaagcgaaaaggacggtgttcagtcccagccttctgttccagccaagctgaggccccagcggatacaccagaacccacagctggccacacgctatactctgtgctctcccaaggatatgagaagctggacactcccctcaggcctgccaggcaacagcctacacccacctcagacagcagctctgacagcaacctcacaactgaggaggatgaggacaggcctgaggtgcacaagcccatcagtggaagatatgaggtatttgaccaggtcactcaggagggcgctggacatgacccagcccctgagggccaagcagactatgatcccgtcactccatatgtcacggaagttgagtctgtggttggagagaacaccatgtatgcacaagtgttcaacttacagggaaagaccccagtttctcagaaggaagagagctcagccacaatctactgctccatacggaaacctcaggtggtgccaccaccacaacagaatgatcttgagattcctgaaagtcctacctatgaaaatttcacctgaaaggaaaagcagctgctgcctctctcctgggaccgtggggttggaaagtcagctggacctcatggggcctggggctcacagacagaagcacctcagaatttccttcagtgcctcagagatgcctggatgtggcccctccccctccttctcacccttaaggactcccaaacccattaatagttcagacacaggctccttcttggagcctatgggcttcagatgtctttgccccatttgtcacctcgcacacttatagcgtttcctcctcgaaattctaccaagactggtcaaatgttgctgaggggcctggaccagctgtcctttacaccaccttctcaacactgctgaaaagaacccaagagaattgtcacacatgacacaagatgtacataatatcatgctcactgcagtgttatttaaaataaaaggcaggaaataacctaaa

SEQ ID NO: 150008 - DNA, 1463 bp, Homo sapiens
  Payload ID: 9624
  Gene Symbol: LY9
  Gene Name: lymphocyte antigen 9
  ENST ID: ENST00000368035
  CDS Start-End: 1-1024
gaaggttgtctggttgtttaacacatccatcattagcaaagagagggaagaagcagcaacggcagatccactcattaaatccagggatccttacaagaacagggtgtgggtctccagccaggactgctccctgaagatcagccagctgaagatagaggacgccggcccctaccatgcctacgtgtgctcagaggcctccagcgtcaccagcatgacacatgtcaccctgctcatctaccgcaggctgaggaagcccaaaatcacgtggagcctcaggcacagtgaggatggcatctgcaggatcagcctgacctgctccgtggaggacgggggaaacactgtcatgtacacatggaccccgctgcagaaggaagctgttgtgtcccaaggggaatcacacctcaatgtctcatggagaagcagtgaaaatcaccccaacctcacatgcacagccagcaaccctgtcagcaggagttcccaccagtttctttctgagaacatctgttcaggacctgagagaaacacaaagctttggattgggttgttcctgatggtttgccttctgtgcgttgggatcttcagctggtgcatttggaagcgaaaaggacggtgttcagtcccagccttctgttccagccaagctgaggccccagcggatacaccaggatatgagaagctggacactcccctcaggcctgccaggcaacagcctacacccacctcagacagcagctctgacagcaacctcacaactgaggaggatgaggacaggcctgaggtgcacaagcccatcagtggaagatatgaggtatttgaccaggtcactcaggagggcgctggacatgacccagcccctgagggccaagcagactatgatcccgtcactccatatgtcacggaagttgagtctgtggttggagagaacaccatgtatgcacaagtgttcaacttacaggtggtgccaccaccacaacagaatgatcttgagattcctgaaagtcctacctatgaaaatttcacctgaaaggaaaagcagctgctgcctctctcctgggaccgtggggttggaaagtcagctggacctcatggggcctggggctcacagacagaagcacctcagaatttccttcagtgcctcagagatgcctggatgtggcccctccccctccttctcacccttaaggactcccaaacccattaatagttcagacacaggctccttcttggagcctatgggcttcagatgtctttgccccatttgtcacctcgcacacttatagcgtttcctcctcgaaattctaccaagactggtcaaatgttgctgaggggcctggaccagctgtcctttacaccaccttctcaacactgctgaaaagaacccaagagaattgtcacacatgacacaagatgtacataatatcatgctcactgcagtgttatttaaaataaaaggcaggaaataa

SEQ ID NO: 150009 - DNA, 2485 bp, Homo sapiens
  Payload ID: 9624
  Gene Symbol: LY9
  Gene Name: lymphocyte antigen 9
  Uniprot ID: Q9HBG7
  ENST ID: ENST00000368037
  CDS Start-End: 115-2040
acatacacatacacatgcacacacacactcatatacacatgcagaagctgtgacacgtgcggaagctgtggtaagtgcatcctccttcagtctcagttctgaaaatagatcatcatggtggcaccaaagagtcacacagatgactgggctcctgggcctttctccagtaagccacagaggagtcagctgcaaatattctcttctgttctacagacctctctcctcttcctgctcatgggactaagagcctctggaaaggactcagccccaacagtggtgtcagggatcctagggggttccgtgactctccccctaaacatctcagtagacacagagattgagaacgtcatctggattggtcccaaaaatgctcttgctttcgcacgtcccaaagaaaatgtaaccattatggtcaaaagctacctgggccgactagacatcaccaagtggagttactccctgtgcatcagcaatctgactctgaatgatgcaggatcctacaaagcccagataaaccaaaggaattttgaagtcaccactgaggaggaattcaccctgttcgtctatgagcagctgcaggagccccaagtcaccatgaagtctgtgaaggtgtctgagaacttctcctgtaacatcactctaatgtgctccgtgaagggggcagagaaaagtgttctgtacagctggaccccaagggaaccccatgcttctgagtccaatggaggctccattcttaccgtctcccgaacaccatgtgacccagacctgccatacatctgcacagcccagaaccccgtcagccagagaagctccctccctgtccatgttgggcagttctgtacagatccaggagcctccagaggaggaacaacgggggagactgtggtaggggtcctgggagagccagtcaccctgccacttgcactcccagcctgccgggacacagagaaggttgtctggttgtttaacacatccatcattagcaaagagagggaagaagcagcaacggcagatccactcattaaatccagggatccttacaagaacagggtgtgggtctccagccaggactgctccctgaagatcagccagctgaagatagaggacgccggcccctaccatgcctacgtgtgctcagaggcctccagcgtcaccagcatgacacatgtcaccctgctcatctaccgcaggctgaggaagcccaaaatcacgtggagcctcaggcacagtgaggatggcatctgcaggatcagcctgacctgctccgtggaggacgggggaaacactgtcatgtacacatggaccccgctgcagaaggaagctgttgtgtcccaaggggaatcacacctcaatgtctcatggagaagcagtgaaaatcaccccaacctcacatgcacagccagcaaccctgtcagcaggagttcccaccagtttctttctgagaacatctgttcaggacctgagagaaacacaaagctttggattgggttgttcctgatggtttgccttctgtgcgttgggatcttcagctggtgcatttggaagcgaaaaggacggtgttcagtcccagccttctgttccagccaagctgaggccccagcggatacaccaggatatgagaagctggacactcccctcaggcctgccaggcaacagcctacacccacctcagacagcagctctgacagcaacctcacaactgaggaggatgaggacaggcctgaggtgcacaagcccatcagtggaagatatgaggtatttgaccaggtcactcaggagggcgctggacatgacccagcccctgagggccaagcagactatgatcccgtcactccatatgtcacggaagttgagtctgtggttggagagaacaccatgtatgcacaagtgttcaacttacagggaaagaccccagtttctcagaaggaagagagctcagccacaatctactgctccatacggaaacctcaggtggtgccaccaccacaacagaatgatcttgagattcctgaaagtcctacctatgaaaatttcacctgaaaggaaaagcagctgctgcctctctcctgggaccgtggggttggaaagtcagctggacctcatggggcctggggctcacagacagaagcacctcagaatttccttcagtgcctcagagatgcctggatgtggcccctccccctccttctcacccttaaggactcccaaacccattaatagttcagacacaggctccttcttggagcctatgggcttcagatgtctttgccccatttgtcacctcgcacacttatagcgtttcctcctcgaaattctaccaagactggtcaaatgttgctgaggggcctggaccagctgtcctttacaccaccttctcaacactgctgaaaagaacccaagagaattgtcacacatgacacaagatgtacataatatcatgctcactgcagtgttatttaaaataaaaggcaggaaataacctaaa

SEQ ID NO: 150010 - DNA, 1364 bp, Homo sapiens
  Payload ID: 9624
  Gene Symbol: LY9
  Gene Name: lymphocyte antigen 9
  ENST ID: ENST00000368039
  CDS Start-End: 2-583
catggtggcaccaaagagtcacacagatgactgggctcctgggcctttctccagtaagccacagaggagtcagctgcaaatattctcttctgttctacagacctctctcctcttcctgctcatgggactaagagcctctggaaaggactcagccccaacagtggtgtcagggatcctagggggttccgtgactctccccctaaacatctcagtagacacagagattgagaacgtcatctggattggtcccaaaaatgctcttgctttcgcacgtcccaaagaaaatgtaaccattatggtcaaaagctacctgggccgactagacatcaccaagtggagttactccctgtgcatcagcaatctgactctgaatgatgcaggatcctacaaagcccagataaaccaaaggaattttgaagtcaccactgaggaggaattcaccctgttcgtctatgcaccatttattgaaaagttgtccgtccacgtcatcgagggtgaccaccgcacactcctggagggcagcggcctggagtccatcatcagcaccctggctgagccacgtgtgagcgtgcgggagggctaggccctcgcccccacctgccactggagaccgctccgccatccccacctcaccgccgcgcagcagagctggaagggtcctgccgatgggaccctgccaggcccagtgccactgccccccgaggctgctagacgtgggcgttaggcgtgtcccacccacccgccgcctcccatggcacgtcgggaacaccggagccgccaacttggagactcctggtctgtgaagagccgctgacgcccgcaggaaccgggctgggccttgtgtgccagtggggtttgtgcttggtctttctccgcttggatttgcttatttattgcattgctggtagagactcccaagcctgtccaccctgcaaagactcctcgggcagcatgcgggtcccgcacactgcacccatttcctggatgtcccctgcaggcgcgggaggccatccgggcctgctggctgcggccccctctcagccaggcctggctcagcccactgcgtgggaggtcaccggccactccccgaggagctgggatccccgggatgcaggcccacagtgcggggctgcacccatgatgcggagctggcctccaaccctgcgggccgcgccaggcaccaactcagtgtttgtcagtgtttgtttttccaagaaatggttcaaattgctgctcagatttttaaatttactgtagctgccagtgtacacgtgtggaccccattttatttttacaccaatttggtgaaaatgctgctttcctcagcctccccacaattaaactgcacatggtctctaaaaaaa

SEQ ID NO: 150011 - DNA, 2213 bp, Homo sapiens
  Payload ID: 9624
  Gene Symbol: LY9
  Gene Name: lymphocyte antigen 9
  ENST ID: ENST00000392203
  CDS Start-End: 77-1774
atgcagaagctgtgacacgtgcggaagctgtggtaagtgcatcctccttcagtctcagttctgaaaatagatcatcatggtggcaccaaagagtcacacagatgactgggctcctgggcctttctccagtaagccacagaggagtcagctgcaaatattctcttctgttctacagacctctctcctcttcctgctcatgggactaagagcctctggaaaggactcagccccaacagtggtgtcagggatcctagggggttccgtgactctccccctaaacatctcagtagacacagagattgagaacgtcatctggattggtcccaaaaatgctcttgctttcgcacgtcccaaagaaaatgtaaccattatggtcaaaagctacctgggccgactagacatcaccaagtggagttactccctgtgcatcagcaatctgactctgaatgatgcaggatcctacaaagcccagataaaccaaaggaattttgaagtcaccactgaggaggaattcaccctgttcgtctatgagcagctgcaggagccccaagtcaccatgaagtctgtgaaggtgtctgagaacttctcctgtaacatcactctaatgtgctccgtgaagggggcagagaaaagtgttctgtacagctggaccccaagggaaccccatgcttctgagtccaatggaggctccattcttaccgtctcccgaacaccatgtgacccagacctgccatacatctgcacagcccagaaccccgtcagccagagaagctccctccctgtccatgttgggcagttctgtacagatccaggagcctccagaggaggaacaacgggggagactgtggtaggggtcctgggagagccagtcaccctgccacttgcactcccagcctgccgggacacagagaaggttgtctggttgtttaacacatccatcattagcaaagagagggaagaagcagcaacggcagatccactcattaaatccagggatccttacaagaacagggtgtgggtctccagccaggactgctccctgaagatcagccagctgaagatagaggacgccggcccctaccatgcctacgtgtgctcagaggcctccagcgtcaccagcatgacacatgtcaccctgctcatctaccgacctgagagaaacacaaagctttggattgggttgttcctgatggtttgccttctgtgcgttgggatcttcagctggtgcatttggaagcgaaaaggacggtgttcagtcccagccttctgttccagccaagctgaggccccagcggatacaccagaacccacagctggccacacgctatactctgtgctctcccaaggatatgagaagctggacactcccctcaggcctgccaggcaacagcctacacccacctcagacagcagctctgacagcaacctcacaactgaggaggatgaggacaggcctgaggtgcacaagcccatcagtggaagatatgaggtatttgaccaggtcactcaggagggcgctggacatgacccagcccctgagggccaagcagactatgatcccgtcactccatatgtcacggaagttgagtctgtggttggagagaacaccatgtatgcacaagtgttcaacttacagggaaagaccccagtttctcagaaggaagagagctcagccacaatctactgctccatacggaaacctcaggtggtgccaccaccacaacagaatgatcttgagattcctgaaagtcctacctatgaaaatttcacctgaaaggaaaagcagctgctgcctctctcctgggaccgtggggttggaaagtcagctggacctcatggggcctggggctcacagacagaagcacctcagaatttccttcagtgcctcagagatgcctggatgtggcccctccccctccttctcacccttaaggactcccaaacccattaatagttcagacacaggctccttcttggagcctatgggcttcagatgtctttgccccatttgtcacctcgcacacttatagcgtttcctcctcgaaattctaccaagactggtcaaatgttgctgaggggcctggaccagctgtcctttacaccaccttctcaacactgctgaaaagaacccaagagaattgtcacacatgacacaagatgtacataatatcatgctcactgcagtgttatttaaaataaaaggcaggaaataa

SEQ ID NO: 150012 - DNA, 801 bp, Homo sapiens
  Payload ID: 9624
  Gene Symbol: LY9
  Gene Name: lymphocyte antigen 9
  ENST ID: ENST00000490902
  CDS Start-End: 1-216
aagagtcacacagatgactgggctcctgggcctttctccagtaagccacagaggagtcagctgcaaatattctcttctgttctacagacctctctcctcttcctgctcatggaattcctggtggagtctgggtcccaaacccatctgttttggtctagaatttcaaaagtgctctccagagcctcggaagccctggaatctgggaatccaagctagggtcacccagaagacacccacagggtccctacaagaaaattaactgccttggccaaataccagcttcctagatgccttggactaagagcctctggaaaggactcagccccaacagtggtgtcagggatcctagggggttccgtgactctccccctaaacatctcagtagacacagagattgagaacgtcatctggattggtcccaaaaatgctcttgctttcgcacgtcccaaagaaaatgtaaccattatggtcaaaagctacctgggccgactagacatcaccaagtggagttactccctgtgcatcagcaatctgactctgaatgatgcaggatcctacaaagcccagataaaccaaaggaattttgaagtcaccactgaggaggaattcaccctgttcgtctatgcaccatttattgaaaagttgtccgtccacgtcatcgagggtgaccaccgcacactcctggagggcagcggcctggagtccatcatcagcaccctggctgagccacgtgtgagcgtgcgggagggctaggccctcgcccccacctgccactggagaccgctccgccatccccacctc

SEQ ID NO: 150013 - DNA, 847 bp, Homo sapiens
  Payload ID: 9624
  Gene Symbol: LY9
  Gene Name: lymphocyte antigen 9
  ENST ID: ENST00000474998
  CDS Start-End: 83-268
atacacatgcagaagctgtgacacgtgcggaagctgtggtaagtgcatcctccttcagtctcagttctgaaaatagatcatcatggtggcaccaaagagtcacacagatgactgggctcctgggcctttctccagtaagccacagaggagtcagctgcaaatattctcttctgttctacagacctctctcctcttcctgctcatgggcccaactcctgggaaacatctctccgctgcatggcccggaaccccactgtccagcagatagagccaatccagtaccccagagaggatctcagccacctgggactgtggcagctactgtccttctgtgctcccgctttctccagggcttcagggatgatggtgcaggactaagagcctctggaaaggactcagccccaacagtggtgtcagggatcctagggggttccgtgactctccccctaaacatctcagtagacacagagattgagaacgtcatctggattggtcccaaaaatgctcttgctttcgcacgtcccaaagaaaatgtaaccattatggtcaaaagctacctgggccgactagacatcaccaagtggagttactccctgtgcatcagcaatctgactctgaatgatgcaggatcctacaaagcccagataaaccaaaggaattttgaagtcaccactgaggaggaattcaccctgttcgtctatggtgagttccagagagcttctgtgttttgatcttttcttttttttatttgtgcaaatttatggggtatgtgtgaaattttgttatatgtatatagtgcatactgatcaagtcagagttttcagtgtgtctgctgcctgagtacaat

SEQ ID NO: 150014 - DNA, 607 bp, Homo sapiens
  Payload ID: 9625
  Gene Symbol: LY96
  Gene Name: lymphocyte antigen 96
  Uniprot ID: Q9Y6Y9
  ENST ID: ENST00000284818
  CDS Start-End: 92-574
agttaaatcttttctgcttactgaaaaggaagagtctgatgattagttactgatcctctttgcatttgtaaagctttggagatattgaatcatgttaccatttctgtttttttccaccctgttttcttccatatttactgaagctcagaagcagtattgggtctgcaactcatccgatgcaagtatttcatacacctactgtgataaaatgcaatacccaatttcaattaatgttaacccctgtatagaattgaaaagatccaaaggattattgcacattttctacattccaaggagagatttaaagcaattatatttcaatctctatataactgtcaacaccatgaatcttccaaagcgcaaagaagttatttgccgaggatctgatgacgattactctttttgcagagctctgaagggagagactgtgaatacaacaatatcattctccttcaagggaataaaattttctaagggaaaatacaaatgtgttgttgaagctatttctgggagcccagaagaaatgctcttttgcttggagtttgtcatcctacaccaacctaattcaaattagaataaattgagtatttaaaaaaaaatttaaagg

SEQ ID NO: 150015 - DNA, 430 bp, Homo sapiens
  Payload ID: 9625
  Gene Symbol: LY96
  Gene Name: lymphocyte antigen 96
  Uniprot ID: Q9Y6Y9
  ENST ID: ENST00000518893
  CDS Start-End: 18-410
tttggagatattgaatcatgttaccatttctgtttttttccaccctgttttcttccatatttactgaagctcagaagcagtattgggtctgcaactcatccgatgcaagtatttcatacacctactgtgggagagatttaaagcaattatatttcaatctctatataactgtcaacaccatgaatcttccaaagcgcaaagaagttatttgccgaggatctgatgacgattactctttttgcagagctctgaagggagagactgtgaatacaacaatatcattctccttcaagggaataaaattttctaagggaaaatacaaatgtgttgttgaagctatttctgggagcccagaagaaatgctcttttgcttggagtttgtcatcctacaccaacctaattcaaattagaataaattgagtatttaaaa

SEQ ID NO: 150016 - DNA, 3787 bp, Homo sapiens
  Payload ID: 9626
  Gene Symbol: LCP1
  Gene Name: lymphocyte cytosolic protein 1 (L-plastin)
  Uniprot ID: P13796
  ENST ID: ENST00000323076
  CDS Start-End: 239-2122
caggtgatttttggtggggcggggacatgaaaaaaaagttaaaatgtccttataaagacaaaatctttttctttcctggctgatgatttgtcattctagtcacttcctgccttgtgaccacacacccaggcttgacaaagctgttctgcagatcagaaagaaggggttcctggtcatacaccagtactaccaaggacagcttttttcctgcaagatctgttacctaaagcaataaaaaatggccagaggatcagtgtccgatgaggaaatgatggagctcagagaagcttttgccaaagttgatactgatggcaatggatacatcagcttcaatgagttgaatgacttgttcaaggctgcttgcttgcctttgcctgggtatagagtacgagaaattacagaaaacctgatggctacaggtgatctggaccaagatggaaggatcagctttgatgagtttatcaagattttccatggcctaaaaagcacagatgttgccaagacctttagaaaagcaatcaataagaaggaagggatttgtgcaatcggtggtacttcagagcagtctagcgttggcacccaacactcctattcagaggaagaaaagtatgcctttgtcaactggataaacaaagccctggaaaatgatcctgattgtcggcatgtcatcccaatgaacccaaacacgaatgatctctttaatgctgttggagatggcattgtcctttgtaaaatgatcaacctgtcagtgccagacacaattgatgaaagaacaatcaacaaaaagaagctaacccctttcaccattcaggaaaatctgaacttggctctgaactctgcctcagccatcgggtgccatgtggtcaacataggggctgaggacctgaaggaggggaagccttatctggtcctgggacttctgtggcaagtcatcaagattgggttgtttgctgacattgaactcagcagaaatgaagctctgattgctcttttgagagaaggtgagagcctggaggatttgatgaaactctcccctgaagagctcttgctgaggtgggctaattaccacctggaaaatgcaggctgcaacaaaattggcaacttcagtactgacatcaaggactcaaaagcttattaccacctgcttgagcaggtggctccaaaaggagatgaagaaggtgttcctgctgttgttattgacatgtcaggactgcgggagaaggatgacatccagagggcagaatgcatgctgcagcaggcggagaggctgggctgccggcagtttgtcacagccacagatgttgtccgagggaaccccaagttgaacttggcttttattgccaacctctttaacagataccctgccctgcacaaaccagagaaccaggacattgactggggggctcttgaaggtgagacgagagaagagcggacatttaggaactggatgaactccctgggtgttaaccctcgagtcaatcatttgtacagtgacttatcagatgccctggtcatcttccagctctatgaaaagatcaaagttcctgttgactggaacagagtaaacaaaccgccataccccaaactgggaggcaatatgaagaagcttgagaattgtaactacgcggtagaattggggaagaatcaagcgaagttctccctggttggcatcggtggacaagatctcaatgaaggaaaccgcactctcacactggccttgatttggcagctaatgagaaggtatacactgaatatcctcgaagaaattggtggtggccagaaggtcaatgatgacattattgtcaactgggtgaatgaaacattgagggaagcaaagaaaagttcatccatctctagtttcaaggacccgaagattagtacaagtctgcctgttctggacctcatcgatgccatccaaccaggttccattaactatgaccttctgaagacagaaaatctgaatgatgatgagaaactcaacaatgcaaaatatgccatctctatggcccgaaaaattggagcaagagtgtatgccctgccagaagacctggttgaagtgaaccccaaaatggtcatgaccgtgtttgcctgcctcatggggaaaggaatgaagagggtgtgaggcccaatggggctgggtgggaggcggtgcactcactcctgactgcccggcacagatgctccagggatgattcaagccattccaaagttcaacttggtgacactctataagattccaaaaagcacatattagtgcagccaagtagcctctcctgtatttaacaaaaagtgcttcattctttgcaggaggcccaacctcctatatataggtttctattcttgatttatttgcttcttcgaaaatctagaggaaaagaaagaagttattttccaggtacccttctcgcttttgccattagccaaggatagaagctgcagtggtattaattttgatataatctttcaaaccagcttcatgtggcttcccttttctttgttcaagatgagggccaggaggggaaacatcacacctgccctaaaccctgttcctggaggtcagcatttgatctgttgcaagcccctctttctgtcccctcttcctaccctgcctcccttgactttgctcctcacacttttggaaccatgccttccgggggggcccatctcttctggccgtccttgtctctgggccacttggagtgtgtgataaatcagtcaagctgttgaagtctcaggagtctctggtagcctgcagaagtaagcctcatcatcagagcctttcctcaaaactggagtcccaaatgtcatcaggttttgttttttttcagccactaagaacccctctgcttttaactctagaatttgggcttggaccagatctaacatcttgaatactctgccctctagagccttcagccttaatggaaggttggatccaaggagggtgtaatggagcatcaagccactcggcggcagcatggagctataactaagcatcctttagggttctgcctctccaggcatttagccctcacattagatctagttactgtggtatggctaatacctgtcaacatttggaggcaatcctaccttgcttttgcttctagagcttagcatatctgattgttgtcaggccatattatcaatgtttacttttttggtactataaaagctttctgccacccctaaactccaggggggacaatatgtgccaatcaatagcacccctactcacatacacacacacctagccagctgtcaagggcagaatgaatctatgctggataagaaatggtggaactgcgttatgaagagctaatttactggacaaagaattccaaagcaaaaccagaacagtatgaatttgagcaggtctcataggttgagcaatttccccctaaaccaactgaaggctaaaaagcaacaggccattgtgaaccaatgcaagacgccctctatcatggtgaaaagctccatcaatgaggtatcttctttagtggtggtatgtaatggaacttagccatttttcaaagcaattgaaatgcattgctctggatctgttccttggcagtggactcagaaagccaacatgtggctcctcccagcccataaccagtatttttgctgcttctgaatacaaattggttggttttgacttcagattgaacttactgtagcctcagatgatttcccccctccgcctccaggaagaaagaatgttactgccttaataaaaaatgaaaagagaatgatgctcaaaatctttccaaataaaatgttccct

SEQ ID NO: 150017 - DNA, 3944 bp, Homo sapiens
  Payload ID: 9626
  Gene Symbol: LCP1
  Gene Name: lymphocyte cytosolic protein 1 (L-plastin)
  Uniprot ID: P13796
  ENST ID: ENST00000398576
  CDS Start-End: 390-2273
ggtgttgatgaacctgtgtgtgcagtcatagatacatcgtgtgtgtttgcaaaaatggcgaatgaggaaagatccagctctgacagaataatgagttgtgcaaagtgaaggccaaatgacatcaccggagatagcagtagttcaaagaaagcaaagcagaggaattgaactgctgcaaaatgcacgattcctccggcctcagatgaccaggcaccactagatacagaacactgtgctttccttctccaagtcacttcctgccttgtgaccacacacccaggcttgacaaagctgttctgcagatcagaaagaaggggttcctggtcatacaccagtactaccaaggacagcttttttcctgcaagatctgttacctaaagcaataaaaaatggccagaggatcagtgtccgatgaggaaatgatggagctcagagaagcttttgccaaagttgatactgatggcaatggatacatcagcttcaatgagttgaatgacttgttcaaggctgcttgcttgcctttgcctgggtatagagtacgagaaattacagaaaacctgatggctacaggtgatctggaccaagatggaaggatcagctttgatgagtttatcaagattttccatggcctaaaaagcacagatgttgccaagacctttagaaaagcaatcaataagaaggaagggatttgtgcaatcggtggtacttcagagcagtctagcgttggcacccaacactcctattcagaggaagaaaagtatgcctttgtcaactggataaacaaagccctggaaaatgatcctgattgtcggcatgtcatcccaatgaacccaaacacgaatgatctctttaatgctgttggagatggcattgtcctttgtaaaatgatcaacctgtcagtgccagacacaattgatgaaagaacaatcaacaaaaagaagctaacccctttcaccattcaggaaaatctgaacttggctctgaactctgcctcagccatcgggtgccatgtggtcaacataggggctgaggacctgaaggaggggaagccttatctggtcctgggacttctgtggcaagtcatcaagattgggttgtttgctgacattgaactcagcagaaatgaagctctgattgctcttttgagagaaggtgagagcctggaggatttgatgaaactctcccctgaagagctcttgctgaggtgggctaattaccacctggaaaatgcaggctgcaacaaaattggcaacttcagtactgacatcaaggactcaaaagcttattaccacctgcttgagcaggtggctccaaaaggagatgaagaaggtgttcctgctgttgttattgacatgtcaggactgcgggagaaggatgacatccagagggcagaatgcatgctgcagcaggcggagaggctgggctgccggcagtttgtcacagccacagatgttgtccgagggaaccccaagttgaacttggcttttattgccaacctctttaacagataccctgccctgcacaaaccagagaaccaggacattgactggggggctcttgaaggtgagacgagagaagagcggacatttaggaactggatgaactccctgggtgttaaccctcgagtcaatcatttgtacagtgacttatcagatgccctggtcatcttccagctctatgaaaagatcaaagttcctgttgactggaacagagtaaacaaaccgccataccccaaactgggaggcaatatgaagaagcttgagaattgtaactacgcggtagaattggggaagaatcaagcgaagttctccctggttggcatcggtggacaagatctcaatgaaggaaaccgcactctcacactggccttgatttggcagctaatgagaaggtatacactgaatatcctcgaagaaattggtggtggccagaaggtcaatgatgacattattgtcaactgggtgaatgaaacattgagggaagcaaagaaaagttcatccatctctagtttcaaggacccgaagattagtacaagtctgcctgttctggacctcatcgatgccatccaaccaggttccattaactatgaccttctgaagacagaaaatctgaatgatgatgagaaactcaacaatgcaaaatatgccatctctatggcccgaaaaattggagcaagagtgtatgccctgccagaagacctggttgaagtgaaccccaaaatggtcatgaccgtgtttgcctgcctcatggggaaaggaatgaagagggtgtgaggcccaatggggctgggtgggaggcggtgcactcactcctgactgcccggcacagatgctccagggatgattcaagccattccaaagttcaacttggtgacactctataagattccaaaaagcacatattagtgcagccaagtagcctctcctgtatttaacaaaaagtgcttcattctttgcaggaggcccaacctcctatatataggtttctattcttgatttatttgcttcttcgaaaatctagaggaaaagaaagaagttattttccaggtacccttctcgcttttgccattagccaaggatagaagctgcagtggtattaattttgatataatctttcaaaccagcttcatgtggcttcccttttctttgttcaagatgagggccaggaggggaaacatcacacctgccctaaaccctgttcctggaggtcagcatttgatctgttgcaagcccctctttctgtcccctcttcctaccctgcctcccttgactttgctcctcacacttttggaaccatgccttccgggggggcccatctcttctggccgtccttgtctctgggccacttggagtgtgtgataaatcagtcaagctgttgaagtctcaggagtctctggtagcctgcagaagtaagcctcatcatcagagcctttcctcaaaactggagtcccaaatgtcatcaggttttgttttttttcagccactaagaacccctctgcttttaactctagaatttgggcttggaccagatctaacatcttgaatactctgccctctagagccttcagccttaatggaaggttggatccaaggagggtgtaatggagcatcaagccactcggcggcagcatggagctataactaagcatcctttagggttctgcctctccaggcatttagccctcacattagatctagttactgtggtatggctaatacctgtcaacatttggaggcaatcctaccttgcttttgcttctagagcttagcatatctgattgttgtcaggccatattatcaatgtttacttttttggtactataaaagctttctgccacccctaaactccaggggggacaatatgtgccaatcaatagcacccctactcacatacacacacacctagccagctgtcaagggcagaatgaatctatgctggataagaaatggtggaactgcgttatgaagagctaatttactggacaaagaattccaaagcaaaaccagaacagtatgaatttgagcaggtctcataggttgagcaatttccccctaaaccaactgaaggctaaaaagcaacaggccattgtgaaccaatgcaagacgccctctatcatggtgaaaagctccatcaatgaggtatcttctttagtggtggtatgtaatggaacttagccatttttcaaagcaattgaaatgcattgctctggatctgttccttggcagtggactcagaaagccaacatgtggctcctcccagcccataaccagtatttttgctgcttctgaatacaaattggttggttttgacttcagattgaacttactgtagcctcagatgatttcccccctccgcctccaggaagaaagaatgttactgccttaataaaaaatgaaaagagaatgatgctcaaaatctttccaaataaaatgttccctatatta

SEQ ID NO: 150018 - DNA, 753 bp, Homo sapiens
  Payload ID: 9626
  Gene Symbol: LCP1
  Gene Name: lymphocyte cytosolic protein 1 (L-plastin)
  ENST ID: ENST00000442275
  CDS Start-End: 556-753
ggcgggcgccgggaggggcaggcccagcccacggtgcagcgcgcgcggagccctcgccttcctccgacgcactgtggggctgcaggggaagctgcgggccgtgggggccggaggagaagccggctccacgcgcagctgctggcgaatgaggaaagatccagctctgacagaataatgagttgtgcaaagtgaaggccaaatgacatcaccggagatagcagtagttcaaagaaagcaaagcagaggaattgaactgctgcaaaatgcacgagtctcaaacattgtctcagcagcagcatcatatcttacaaaagttgaggaaatactgtatttccagcttaggaaactgaagattcctccggcctcagatgaccaggcaccactagatacagaacactgtgctttccttctccaagtcacttcctgccttgtgaccacacacccaggcttgacaaagctgttctgcagatcagaaagaaggggttcctggtcatacaccagtactaccaaggacagcttttttcctgcaagatctgttacctaaagcaataaaaaatggccagaggatcagtgtccgatgaggaaatgatggagctcagagaagcttttgccaaagttgatactgatggcaatggatacatcagcttcaatgagttgaatgacttgttcaaggctgcttgcttgcctttgcctgggtatagagtacgagaaattacagaaaacctgatggctacaggtgatctggaccaagat

SEQ ID NO: 150019 - DNA, 819 bp, Homo sapiens
  Payload ID: 9626
  Gene Symbol: LCP1
  Gene Name: lymphocyte cytosolic protein 1 (L-plastin)
  ENST ID: ENST00000416500
  CDS Start-End: 82-819
atctgcctggggccagtgaggagaatgcatctagacagagcttttcgtgctgctgagatctgttacctaaagcaataaaaaatggccagaggatcagtgtccgatgaggaaatgatggagctcagagaagcttttgccaaagttgatactgatggcaatggatacatcagcttcaatgagttgaatgacttgttcaaggctgcttgcttgcctttgcctgggtatagagtacgagaaattacagaaaacctgatggctacaggtgatctggaccaagatggaaggatcagctttgatgagtttatcaagattttccatggcctaaaaagcacagatgttgccaagacctttagaaaagcaatcaataagaaggaagggatttgtgcaatcggtggtacttcagagcagtctagcgttggcacccaacactcctattcagaggaagaaaagtatgcctttgtcaactggataaacaaagccctggaaaatgatcctgattgtcggcatgtcatcccaatgaacccaaacacgaatgatctctttaatgctgttggagatggcattgtcctttgtaaaatgatcaacctgtcagtgccagacacaattgatgaaagaacaatcaacaaaaagaagctaacccctttcaccattcaggaaaatctgaacttggctctgaactctgcctcagccatcgggtgccatgtggtcaacataggggctgaggacctgaaggaggggaagccttatctggtcctgggacttctgtggcaagtcatcaagattgggttgtttgctgacattgaactcagcagaaatgaa

SEQ ID NO: 150020 - DNA, 4678 bp, Homo sapiens
  Payload ID: 9627
  Gene Symbol: LCP2
  Gene Name: lymphocyte cytosolic protein 2 (SH2 domain containing leukocyte protein of 76kDa)
  Uniprot ID: Q13094
  ENST ID: ENST00000046794
  CDS Start-End: 617-2218
gacaactgtaaagaggcagctgaaagaatcccagtctttgatggtgggaggggaaagtggttggaaagcattaaaaaaacatgctccagcagttcactgatgtgggaaattgtctgtatttcaggtcaaccgtcaggatagattttggtctgcaaagccccagctgagcaagaatgcagtgtagacatatgggtgcccagagtttaaaggaaaattactcagactcacattggagtttaagaccccttcattgcctctcctactgggttggggtgactggagccagtggggaattaccaaccctgtggctctctctgcatctcaagcctccagagctgggcttccttgtttacttatttagagcccagcagaggaagtggtaaaggaaactagctgagtcgttttctgagaagagaccatatttgttcgcagaggaagccgttgctttctgggatctggctacgccagaaaagacatcggctccaacaggggtgttccacagggtagctgggagttggaagagccaagaacgcctccgagctctggatttgagcttctctgcccatgggtgaagcgcccatgctcagcttgtgagcttcttcccgggagagcagccatggcactgaggaatgtgccctttcgctcagaggtcctgggctgggaccccgacagccttgctgactatttcaagaagctcaactataaggactgtgagaaggcagtgaagaagtaccacatcgatggggctcgcttcttgaacctgacagaaaatgacatccagaagttccccaagctccgggtgccgattctcagtaagttaagtcaggaaatcaacaagaacgaagagaggaggagcatcttcacacgcaaaccccaagtcccgcggtttcctgaagagacagaaagccacgaagaggacaatgggggctggtcgtcctttgaagaagacgattatgaaagtcccaatgatgaccaggatggggaggatgatggagactatgagtcccccaatgaggaggaagaggcacccgtggaagatgacgcggattatgagccgccaccctccaatgacgaggaagctctgcagaactccatcctgcctgccaagcctttccccaactccaactccatgtacatcgaccggcccccctctgggaaaaccccccagcagcctcctgtgcccccccagagaccgatggccgccctcccgcccccaccagccggccggaatcactcgccactgcccccaccccagaccaaccacgaagaacccagcagaagcagaaaccacaaaacggcaaagctccctgctccttcaatagacagaagcacgaaacctcccctagatcgttcattagctccgtttgatagagaacccttcacactaggaaagaaaccaccattttctgacaagccctcgattccagcgggaaggtcactcggggagcatttacccaagattcaaaagcctcctttaccaccgaccacggaaagacatgaaaggagcagccccctgccagggaagaagccacctgtgccaaagcatggatggggaccagacagaagagagaatgatgaagatgatgtgcatcagagacctttgccccagccagcactacttcctatgagctccaacactttcccttcaagatctactaagccaagtcccatgaaccctctcccatcctctcacatgcctggagcattctcagaaagtaacagcagttttccacagagtgcctccctgccaccatacttctctcaaggccctagcaacagaccacctatcagagccgaaggcagaaacttccccttgccacttccaaacaaacctcggcccccatcccccgcggaggaagagaattcattaaatgaagagtggtacgtttcttatattacccgaccagaggcagaagctgctcttagaaagataaaccaggatggcacatttctggtcagagacagctctaaaaaaacaacaaccaatccatatgtcctcatggtgttgtacaaagataaagtttacaacatccagatccgttatcagaaggaaagtcaagtttacttgttgggaactggactccgagggaaagaggactttctgtctgtgtcagatattattgactacttcaggaaaatgccacttctgctcattgatgggaaaaaccgaggttccagataccagtgcacattaacgcatgctgcagggtacccatagcaagttatagccgagcaaatgaaccgtcctcctgcctctgttgccaacacgagatcaatcagccttggtcaatggacaaacacttaggactgaactgaacccctccccatgaacacaagggttttatcctttcctttaaaaacagtgtttgaaatgaagactgtcaactatcccataatttatttattcttcttcaatgtttgtaaagtgcatgagtcatgttcacacttgaagtctagtagtgcactgtaataattcattttttaaaagattatttaatgcccatttcaaaatacagtagtttacacagctacagaaacaatttggggcaagttttaaaacactgaaacagtaatagttattggtgtcacataaaactgatttgttttttacagccaaacctctgtcagtcagaggcattcattagttttatacatgtaatttgaaaatcactaaacctcgttttctcagcagcaataatttaagaggcttcaaaaatataatttcactcttatttagtattttttcctgggggcatttttacgtaatttttttatgaaaagacaaatgcatgttgagataacttctgggattaaaatagtcttttgctttacttttttggtttcctaaaacaactttattgacttttagtccatactgttatatttttgtcttaaagaaaatttaaactacaaataccaaaagaaaacattttaaatttagggatgagactttggtgtatcgtgggtctaggtttaatgaacacatctggggttaagttggcatttcttcacatctccacacccacaccaaccatcacagccccccaccaaccttctcccaaccccaaaagcattgtccagggatatagattttaccaaaggcttcctgggaagacgagggagcaacactttagattaaatgtgatcagactttcctattagatatggctcttctgtctcttgttatccccctgacagctctgccataaagtcccttctcctcatccttcccaaacaggctgtataagtgctttgaggtaattaaactctttcctccagtttacaaatatcacttaacaaaaaatataggcattcagccagattaaaaaactggtattcagccaaatagtgacaatcagttgttcttcaagtttttccctttgggaccttggttgttattgcacaacttttattagcaacaatttttggcgtctctgcttaatctacaagttttcgaaatggaaaagagtatcttgcagcttcattttcatgagctaataaaaggggtattggaaggaatctaagaagtcaccattttaaaactgatgatatgttaaaataaggagtatgcagaaggtagagacttttaactgatgataaaaatggtgtttcacaaaatctcatccttaacaaccagaagttctcagtttagggtccaaaacttgggagtttaaggctgaaaaccctgcattcatttacacgtctacacaacgggctattcagcaagtatttacttagtggctcttctgtgttaaacaagtgagctaggtacaaggtagtaaggatagcatacaccataggttctagtatcgagtaagctccacttgtcttgctttgccgtattctatctttacaattcaaaaatatctaaaatgaaggacctgatagatttcaaagcaactatttggtagcgaatcatgtttataaaacaaaccaaagctcattttaagtctattagtggaaagtgccatcaggattaagatgttctgttccatggctatgactgaaatcaatgttgggaagctaatgttttcatgactagcattctctctctgttcaagcaccgacaactccttttggctgggccttgcctcttttggccacagaccttctatatgaccccaggtgcatcagtcacagttgctcagaaccctgctcagtgataaacatcttactaaagctgggtcaatcagggtcactctctggaatgttaaacatgaagcctgagacaagatctctcttttatctggggtccccaaaggcaatgctgtacacttggagctgcctgctgccctgcaactactcccatttaccaattatctggaagaaccagtctacaatagaagacaacgaggccaacacacaaaaacacagtaaaagtatggacaaattagtgggatccctgaaatctattccaactatgtgcttccaagtcacatgactcaataaatgcttcagctggttgagttgtgcttggcgttcactaccaggagagttctgattaataaaaactcattccatcaattaataatttagtagctctctttcaacctgagccaaattcaagcataagctaaaggataagcagtgacccatggccaatttcctatgtcatacacttgccattagtgacgtaagttaagccattcttcaaaacattaaacagccttcaagaaca

SEQ ID NO: 150021 - DNA, 1599 bp, Homo sapiens
  Payload ID: 9627
  Gene Symbol: LCP2
  Gene Name: lymphocyte cytosolic protein 2 (SH2 domain containing leukocyte protein of 76kDa)
  ENST ID: ENST00000521416
  CDS Start-End: 216-1202
atgctcactctgctgcctgcagaaaagagcttgcgtggcagagtctagaacagggagctcagataggaggctactgcggtagttcagtgaagaaatggacatggatgtttgtaggcagaacatgaagatgaggaaaagtgagcagatccagacaggttttgggagtgccggctcttgctgatgtattggaagtgcttcctaacgtttggatctttatgcagccactgcccccaccccagaccaaccacgaagaacccagcagaagcagaaaccacaaaacggcaaagctccctgctccttcaatagacagaagcacgaaacctcccctagatcgttcattagctccgtttgatagagaacccttcacactaggaaagaaaccaccattttctgacaagccctcgattccagcgggaaggtcactcggggagcatttacccaagattcaaaagcctcctttaccaccgaccacggaaagacatgaaaggagcagccccctgccagggaagaagccacctgtgccaaagcatggatggggaccagacagaagagagaatgatgaagatgatgtgcatcagagacctttgccccagccagcactacttcctatgagctccaacactttcccttcaagatctactaagccaagtcccatgaaccctctcccatcctctcacatgcctggagcattctcagaaagtaacagcagttttccacagagtgcctccctgccaccatacttctctcaaggccctagcaacagaccacctatcagagccgaaggcagaaacttccccttgccacttccaaacaaacctcggcccccatcccccgcggaggaagagaattcattaaatgaagagtggtacgtttcttatattacccgaccagaggcagaagctgctcttagaaagataaaccaggatggcacatttctggtcagagacagctctaaaaaaacaacaaccaatccatatgtcctcatggtgttgtacaaagataaagtttacaacatccagatccgttatcagaaggaaagtcaagtttacttgttgggaactggactccgagggaaagaggactttctgtctgtgtcagatattattgactacttcaggaaaatgccacttctgctcattgatgggaaaaaccgaggttccagataccagtgcacattaacgcatgctgcagggtacccatagcaagttatagccgagcaaatgaaccgtcctcctgcctctgttgccaacacgagatcaatcagccttggtcaatggacaaacacttaggactgaactgaacccctccccatgaacacaagggttttatcctttcctttaaaaacagtgtttgaaatgaagactgtcaactatcccataatttatttattcttcttcaatgtttgtaaagtgcatgagtcatgttcacacttgaagtctagtagtgcactgtaataattcattttttaaaagattatttaatgcccatttcaaaatacagtagtttacacagctacagaaacaatttggggcaagttttaaaacactgaaacagtaatagttattggtgtcacataaaactgatttgttttttacagcc

SEQ ID NO: 150022 - DNA, 666 bp, Homo sapiens
  Payload ID: 9627
  Gene Symbol: LCP2
  Gene Name: lymphocyte cytosolic protein 2 (SH2 domain containing leukocyte protein of 76kDa)
  ENST ID: ENST00000520344
  CDS Start-End: 247-666
aatgtgataggaggcttagcaggaaagtgacatgctcactctgctgcctgcagaaaagagcttgcgtggcagagtctagaacagggagctcagataggaggctactgcggtagttcagtgaagaaatggacatggatgtttgtaggcagaacatgaagatgaggaaaagtgagcagatccagacaggttttgggagtgccggctcttgctgatgtattggaagtgcttcctaacgtttggatctttatgcagccactgcccccaccccagaccaaccacgaagaacccagcagaagcagaaaccacaaaacggcaaagcgaaagaaaccaccattttctgacaagccctcgattccagcgggaaggtcactcggggagcatttacccaagattcaaaagcctcctttaccaccgaccacggaaagacatgaaaggagcagccccctgccagggaagaagccacctgtgccaaagcatggatggggaccagacagaagagagaatgatgaagatgatgtgcatcagagacctttgccccagccagcactacttcctatgagctccaacactttcccttcaagatctactaagccaagtcccatgaaccctctcccatcctctcacatgcctggagcattctcagaaagtaacagcagttttccacag

SEQ ID NO: 150023 - DNA, 2421 bp, Homo sapiens
  Payload ID: 9627
  Gene Symbol: LCP2
  Gene Name: lymphocyte cytosolic protein 2 (SH2 domain containing leukocyte protein of 76kDa)
  ENST ID: ENST00000628092
  CDS Start-End: 208-1809
gaagagaccatatttgttcgcagaggaagccgttgctttctgggatctggctacgccagaaaagacatcggctccaacaggggtgttccacagggtagctgggagttggaagagccaagaacgcctccgagctctggatttgagcttctctgcccatgggtgaagcgcccatgctcagcttgtgagcttcttcccgggagagcagccatggcactgaggaatgtgccctttcgctcagaggtcctgggctgggaccccgacagccttgctgactatttcaagaagctcaactataaggactgtgagaaggcagtgaagaagtaccacatcgatggggctcgcttcttgaacctgacagaaaatgacatccagaagttccccaagctccgggtgccgattctcagtaagttaagtcaggaaatcaacaagaacgaagagaggaggagcatcttcacacgcaaaccccaagtcccgcggtttcctgaagagacagaaagccacgaagaggacaatgggggctggtcgtcctttgaagaagacgattatgaaagtcccaatgatgaccaggatggggaggatgatggagactatgagtcccccaatgaggaggaagaggcacccgtggaagatgacgcggattatgagccgccaccctccaatgacgaggaagctctgcagaactccatcctgcctgccaagcctttccccaactccaactccatgtacatcgaccggcccccctctgggaaaaccccccagcagcctcctgtgcccccccagagaccgatggccgccctcccgcccccaccagccggccggaatcactcgccactgcccccaccccagaccaaccacgaagaacccagcagaagcagaaaccacaaaacggcaaagctccctgctccttcaatagacagaagcacgaaacctcccctagatcgttcattagctccgtttgatagagaacccttcacactaggaaagaaaccaccattttctgacaagccctcgattccagcgggaaggtcactcggggagcatttacccaagattcaaaagcctcctttaccaccgaccacggaaagacatgaaaggagcagccccctgccagggaagaagccacctgtgccaaagcatggatggggaccagacagaagagagaatgtaagtacaaaattgcatcagagacctttgccccagccagcactacttcctatgagctccaacactttcccttcaagatctactaagccaagtcccatgaaccctctcccatcctctcacatgcctggagcattctcagaaagtaacagcagttttccacagagtgcctccctgccaccatacttctctcaaggccctagcaacagaccacctatcagagccgaaggcagaaacttccccttgccacttccaaacaaacctcggcccccatcccccgcggaggaagagaattcattaaatgaagagtggtacgtttcttatattacccgaccagaggcagaagctgctcttagaaagataaaccaggatggcacatttctggtcagagacagctctaaaaaaacaacaaccaatccatatgtcctcatggtgttgtacaaagataaagtttacaacatccagatccgttatcagaaggaaagtcaagtttacttgttgggaactggactccgagggaaagaggactttctgtctgtgtcagatattattgactacttcaggaaaatgccacttctgctcattgatgggaaaaaccgaggttccagataccagtgcacattaacgcatgctgcagggtacccatagcaagttatagccgagcaaatgaaccgtcctcctgcctctgttgccaacacgagatcaatcagccttggtcaatggacaaacacttaggactgaactgaacccctccccatgaacacaagggttttatcctttcctttaaaaacagtgtttgaaatgaagactgtcaactatcccataatttatttattcttcttcaatgtttgtaaagtgcatgagtcatgttcacacttgaagtctagtagtgcactgtaataattcattttttaaaagattatttaatgcccatttcaaaatacagtagtttacacagctacagaaacaatttggggcaagttttaaaacactgaaacagtaatagttattggtgtcacataaaactgatttgttttttacagccaaacctctgtcagtcagaggcattcattagttttatacatgtaatttgaaaatcactaaacctcgttttctcagcagcaataatttaagaggcttcaaaaatataatttcactcttatttagtattttttcctgggggcatttttacgtaatttttttatgaaaagacaaatgcatgttgagataacttctgggattaaaatagtcttttgcttt

SEQ ID NO: 150024 - DNA, 1777 bp, Homo sapiens
  Payload ID: 9628
  Gene Symbol: LEXM
  Gene Name: lymphocyte expansion molecule
  Uniprot ID: Q3ZCV2
  ENST ID: ENST00000358193
  CDS Start-End: 55-1299
acaaggcccgggttgccgtggcagcagcggaggcgggcagcgcgcaggcctgccatgagggaaagccaggatgccgccggagctcatggctggaaccgcgtcggctccacggccaccaagtggttcaccggggcgcccttcggggtgcagagccacaggtttgacatctctgctgtttatcccaactggaagaagttcagcaccttcactgaggccccatactccacgcgttattctacccaagtgtcccacataggccctgggacttacagctccaaagagacctgcttcagcaagaagaagctgatgaaggaggtggacacaggctgggccaaggcccaggaagccacgcggctgacccagctaccccacttccagtaccaggccatcatgaaagagaagcggctgaaggagcaaaagctgggccccggctcctacaacctcaaagacttcttagaacagctgcgggagaaaccatgtagcacccgggggctgctcagctctggggaggttcgcttccgaggactcactgggaactactatccaggccctggaaattatggggagaagggtaacccatacaccaagctggaggagaatgcctggaaccggtctcattccgagggcctcatgtgcaggatgagcaacaagccacacccccggcctcatcaggggagtggtctgggacccggcacctacttcttcaaaagcgaccttgagacatatgtggcacgatccgtcggcacccgcggcccctatgacactttctctggtgatcggagcaagccactgccttatgggcactactccatgcagaaaaaaaagcccagggaactgatgaatttcaagagctttgtagaagaacttaactcacatcacaataagaagcatggggttttttctaaacttccccgaaacccgaaaacccctacagagaggatttactgggccaacctcagccagtgcccccgcacactggccacatctggccccagtttctggcttccacaagagaagaaatgcaaacccgtcaaccagcccccattcctgttgacctccaaggggtcaggtgcaaaggcctgccagatgattatgggaagctggaacccagtaggtgtgggccgctacctcaacacctggctgatggagacaaaggacaggcggcagcgatatcgatccctattcctgagtggatccaaacgctacctctcagacctggcccgggacatgctcatgcaaatcaggctgttttgttggaaaggcctagaagtcatcaattttggcctctcaccaatgtaggatctcctgtgaagcagaaccaacagggaaaggatcacaccatttactaagggaaagtgccctccaactgtggattacaattcagatcctactccttaaagccacatgcgaaggacagcctgcagtgaccagagagcccaaaggcctgaagacaaatctgggggtgacagcatgggcatgggagtggggtgtcttagagaaaggacacatgggcttgggagaggggagagatgtatggggatcacctttgccagagctgcatacctgaaggtcacagtgtcttccgggacagctggggacaggtatcttttgttgcaggagatcaattatcctgagaactcaactcagccagtgacatgaacatgggggccagagagcagatggactgaagggatgggacgtagttgacacttgtgggaccctttctattctaaagccagagtgcttggctccttgtttattaaagttcagaaagtgg

SEQ ID NO: 150025 - DNA, 1651 bp, Homo sapiens
  Payload ID: 9628
  Gene Symbol: LEXM
  Gene Name: lymphocyte expansion molecule
  Uniprot ID: Q3ZCV2
  ENST ID: ENST00000371273
  CDS Start-End: 16-1272
gcgcgcaggcctgccatgagggaaagccaggatgccgccggagctcatggctggaaccgcgtcggctccacggccaccaagtggttcaccggggcgcccttcggggtgcagagccacaggtttgacatctctgctgtttatcccaactggaagaagttcagcaccttcactgaggccccatactccacgcgttattctacccaagtgtcccacataggccctgggacttacagctccaaagagacctgcttcagcaagaagaagctgatgaaggaggtggacacaggctgggccaaggcccaggaagccacgcggctgacccagctaccccacttccagtaccaggccatcatgaaagagaagcggctgaaggagcaaaagctgggccccggctcctacaacctcaaagacttcttagaacagctgcgggagaaaccatgtagcacccgggggctgctcagctctggggaggttcgcttccgaggactcactgggaactactatccaggccctggaaattatggggagaagggtaacccatacaccaagctggaggagaatgcctggaaccggtctcattccgagggcctcatgtgcaggatgagcaacaagccacacccccggcctcatcaggggagtggtctgggacccggcacctacttcttcaaaagcgaccttgagacatatgtggcacgatccgtcggcacccgcggcccctatgacactttctctggtgatcggagcaagccactgccttatgggcactactccatgcagaaaaaaaagcccagggaactgatgaatttcaagagctttgtagaagaacttaactcacatcacaataagaagcatggggttttttctaaacttccccgaaacccgaaaacccctacagagaggatttactgggccaacctcagccagtgcccccgcacactggccacatctggccccagtttctggcttccacaagagaagaaatgcaaacccgtcaaccagcccccattcctgttgacctccaaggggtcaggtgcaaaggcctgccagatgattatgggaagctggaacccagtaggtgtgggccgctacctcaacacctggctgatggagacaaaggacaggcggcagcgatatcgatccctattcctgagtggatccaaacgctacctctcagacctggcccgggacatgctcatgcaggaaaggatcacaccatttactaagggaaagtgccctccaactgtggattacaattcagatcctactccttaaagccacatgcgaaggacagcctgcagtgaccagagagcccaaaggcctgaagacaaatctgggggtgacagcatgggcatgggagtggggtgtcttagagaaaggacacatgggcttgggagaggggagagatgtatggggatcacctttgccagagctgcatacctgaaggtcacagtgtcttccgggacagctggggacaggtatcttttgttgcaggagatcaattatcctgagaactcaactcagccagtgacatgaacatgggggccagagagcagatggactgaagggatgggacgtagttgacacttgtgggaccctttctattctaaagccagagtgcttggctccttgtttattaaagttcagaaagtgg

SEQ ID NO: 150026 - DNA, 1356 bp, Homo sapiens
  Payload ID: 9629
  Gene Symbol: LAX1
  Gene Name: lymphocyte transmembrane adaptor 1
  Uniprot ID: Q8IWV1
  ENST ID: ENST00000367217
  CDS Start-End: 167-1315
cttttcactctgctttgggtgttgaaggaagacgagcttctcacggagcctctcttgagcctcttggcagtttccccctctgtgcccctcacgtttccaccagaaacgtgaaggcagaggccacagattctccctgagccacctcacttggaagcaccatgtccggatgagatcgcacttcctgcagtgggcattagccacgtccagaaataaagaccagatcaccaacatcttttccgggtttgcgggactcctcgccatcctcctggtcgttgcggttttctgcatcttgtggaattggaataaacggaagaagcgacaagttccttacctccgagttaccgtcatgcccttgctgactttgccacaaaccagacaaagagccaaaaatatttatgacatcttgccttggcgacaggaagacctggggagacatgagtcgaggagtatgcgcattttcagtactgagagcctcctctccagaaattctgagagcccggagcatgtgccctcccaagcaggcaatgccttccaggagcatacagcccacatccatgccacagagtacgcggtgggtatctatgacaacgccatggtcccccagatgtgtgggaacctcactccctcggcacactgcatcaatgtcagagcttccagagactgcgcaagcatttcttcagaggattcgcatgattatgtcaatgtccccacagcagaagagattgctgagactctagcttctaccaaaagcccttccagaaatctctttgttcttcccagtacccagaagctggagtttactgaggaaagagatgagggctgtggagatgctggtgactgcaccagtttgtattctccaggagctgaggacagtgattcactcagcaatggagaaggttcttctcagatctcaaatgactatgtcaacatgacagggttggatctcagtgccatccaggaaaggcagctctgggtggcttttcagtgctgcagagactatgaaaatgttccagcagcagatcccagtggaagccagcagcaggctgagaaagatgtgccatcctcaaacataggtcatgtcgaggacaagacagatgatcccgggacccatgtccaatgtgtcaaaaggacattccttgcttcaggggattatgcagactttcagccattcacacagagtgaggacagtcagatgaaacatagagaagagatgtcaaatgaggactccagtgactatgaaaatgtgctaactgccaagttaggaggcagggactctgagcaggggcctggcactcagctccttcctgatgaatgaagacccaggtacccagccataaagccacattgagtagtcta

SEQ ID NO: 150027 - DNA, 3023 bp, Homo sapiens
  Payload ID: 9629
  Gene Symbol: LAX1
  Gene Name: lymphocyte transmembrane adaptor 1
  Uniprot ID: Q8IWV1
  ENST ID: ENST00000442561
  CDS Start-End: 391-1587
tcttttcactctgctttgggtgttgaaggaagacgagcttctcacggagcctctcttgagcctcttggcagtttccccctctgtgcccctcacgtttccaccagaaacgtgaaggcagaggccacagattctccctgagccacctcacttggaagcaccatgtccggatgagatcgcacttcctgcagtgggcattagccacgtccaggtagaaccaaacctgttgcttttgtatgttgggtcaacttggcctgacgtttcagaggtagacacgagatagggagtttgttgcgggggtggggagaagtggtagacatgctggctaactgattatgattaagagaaacttagaagctgaagccagagagcatctcaaaggttcctgatacaatggatggtgtcactccaaccctttcgacaatcagagggaggaccttggagtccagcactctgcatgtgactccccgcagcctggacagaaataaagaccagatcaccaacatcttttccgggtttgcgggactcctcgccatcctcctggtcgttgcggttttctgcatcttgtggaattggaataaacggaagaagcgacaagttccttacctccgagttaccgtcatgcccttgctgactttgccacaaaccagacaaagagccaaaaatatttatgacatcttgccttggcgacaggaagacctggggagacatgagtcgaggagtatgcgcattttcagtactgagagcctcctctccagaaattctgagagcccggagcatgtgccctcccaagcaggcaatgccttccaggagcatacagcccacatccatgccacagagtacgcggtgggtatctatgacaacgccatggtcccccagatgtgtgggaacctcactccctcggcacactgcatcaatgtcagagcttccagagactgcgcaagcatttcttcagaggattcgcatgattatgtcaatgtccccacagcagaagagattgctgagactctagcttctaccaaaagcccttccagaaatctctttgttcttcccagtacccagaagctggagtttactgaggaaagagatgagggctgtggagatgctggtgactgcaccagtttgtattctccaggagctgaggacagtgattcactcagcaatggagaaggttcttctcagatctcaaatgactatgtcaacatgacagggttggatctcagtgccatccaggaaaggcagctctgggtggcttttcagtgctgcagagactatgaaaatgttccagcagcagatcccagtggaagccagcagcaggctgagaaagatgtgccatcctcaaacataggtcatgtcgaggacaagacagatgatcccgggacccatgtccaatgtgtcaaaaggacattccttgcttcaggggattatgcagactttcagccattcacacagagtgaggacagtcagatgaaacatagagaagagatgtcaaatgaggactccagtgactatgaaaatgtgctaactgccaagttaggaggcagggactctgagcaggggcctggcactcagctccttcctgatgaatgaagacccaggtacccagccataaagccacattgagtagtctatcccataggattgactactgcagagtctagtgcagacccgtgatcaccttagtgcttcagtggattcactggttagattaaaaagaggctgagatgagcagtgaactaagaggccacacaaaagcagaggtttgggaattccagaagggaattcttctcaagcagagtgtggttatctcctgtaccagcctaagaatgtttgctgaaactgcttcctagaactgtgaagaaagcaggaaagtagtgcacagtagtctaagattattaccttcattaataccaacaggctgcaaagcaagagtatagattattgtataatccagtcagaggtcaaaaggaaggaagaagttggagtggagtggggtgggcaatttccattttaaagagtgtaggcaggccaggtgcagtggctcatgcctgtaatcccagcattttggtaggccgaggagggcagatcacttggtgccaggagttctagaccagcctggccaacatgacccatctttactaaaaatacaaaaattagccaggcgtggtggtgtgcccctgtaatcccagctactcaggaggctgaagcaggagaatcgcttgaacccgggaggtggaggttgcagcaagccgagattgtgccactgtactccagcctggtgacagagcgagactccctctcaaaaaaaaaaacaaacaaaaaagaagtgtgggcaaccaaatgtaggtaaggatgaagaagaacaggaactctcactggtggctgatgggattgcaaagcgtcagggcagctttgaaaaacttttcagcagtttcttataagcataacttatcatatggcccagccatttcactactagaaattgacgcaagtgaactgaaaacttatgttcacacaaaaactcgcacatgactgtttatagcagcttcattcataattaccaaaaactagaaataacccagatatccttcaacaggtgattggataagctgttgatatccattccttgagtttatccatactcaacagtaaaaaatgaactcttggttcacacaataatatagacatatcttaaatccattttgctaagtgaaagaagctaggcctaaaagtctacatgttgggcgattctatttatatgacattctggaaaaggcaaaactatagggatgaagaacagatcagttgttgtcaggtttgagaaaaggagggaagtttgctacaaaggggctgcaaagggaataggctgatggagctgttctgtatggtactgtgtggtggatacatgacaatatccatttgcaaacacaagaactatacacatggccaggcgcggtggctcacacccgtaatcccagcactttgcggggccgaggcaggggaacacaaggtcaggagatcaagac

SEQ ID NO: 150028 - DNA, 1974 bp, Homo sapiens
  Payload ID: 9630
  Gene Symbol: LAG3
  Gene Name: lymphocyte-activation gene 3
  Uniprot ID: P18627
  ENST ID: ENST00000203629
  CDS Start-End: 334-1911
agagaccagcagaacggcatcccagccacgacggccactttgctctgtctgctctccgccacggccctgctctgttccctgggacacccccgcccccacctcctcaggctgcctgatctgcccagctttccagctttcctctggattccggcctctggtcatccctccccaccctctctccaaggccctctcctggtctcccttcttctagaaccccttcctccacctccctctctgcagaacttctcctttaccccccaccccccaccactgccccctttccttttctgacctccttttggagggctcagcgctgcccagaccataggagagatgtgggaggctcagttcctgggcttgctgtttctgcagccgctttgggtggctccagtgaagcctctccagccaggggctgaggtcccggtggtgtgggcccaggagggggctcctgcccagctcccctgcagccccacaatccccctccaggatctcagccttctgcgaagagcaggggtcacttggcagcatcagccagacagtggcccgcccgctgccgcccccggccatcccctggcccccggccctcacccggcggcgccctcctcctgggggcccaggccccgccgctacacggtgctgagcgtgggtcccggaggcctgcgcagcgggaggctgcccctgcagccccgcgtccagctggatgagcgcggccggcagcgcggggacttctcgctatggctgcgcccagcccggcgcgcggacgccggcgagtaccgcgccgcggtgcacctcagggaccgcgccctctcctgccgcctccgtctgcgcctgggccaggcctcgatgactgccagccccccaggatctctcagagcctccgactgggtcattttgaactgctccttcagccgccctgaccgcccagcctctgtgcattggttccggaaccggggccagggccgagtccctgtccgggagtccccccatcaccacttagcggaaagcttcctcttcctgccccaagtcagccccatggactctgggccctggggctgcatcctcacctacagagatggcttcaacgtctccatcatgtataacctcactgttctgggtctggagcccccaactcccttgacagtgtacgctggagcaggttccagggtggggctgccctgccgcctgcctgctggtgtggggacccggtctttcctcactgccaagtggactcctcctgggggaggccctgacctcctggtgactggagacaatggcgactttacccttcgactagaggatgtgagccaggcccaggctgggacctacacctgccatatccatctgcaggaacagcagctcaatgccactgtcacattggcaatcatcacagtgactcccaaatcctttgggtcacctggatccctggggaagctgctttgtgaggtgactccagtatctggacaagaacgctttgtgtggagctctctggacaccccatcccagaggagtttctcaggaccttggctggaggcacaggaggcccagctcctttcccagccttggcaatgccagctgtaccagggggagaggcttcttggagcagcagtgtacttcacagagctgtctagcccaggtgcccaacgctctgggagagccccaggtgccctcccagcaggccacctcctgctgtttctcatccttggtgtcctttctctgctccttttggtgactggagcctttggctttcacctttggagaagacagtggcgaccaagacgattttctgccttagagcaagggattcaccctccgcaggctcagagcaagatagaggagctggagcaagaaccggagccggagccggagccggaaccggagcccgagcccgagcccgagccggagcagctctgacctggagctgaggcagccagcagatctcagcagcccagtccaaataaactccctgtcagcagc

SEQ ID NO: 150029 - DNA, 1576 bp, Homo sapiens
  Payload ID: 9630
  Gene Symbol: LAG3
  Gene Name: lymphocyte-activation gene 3
  Uniprot ID: P18627
  ENST ID: ENST00000441671
  CDS Start-End: 335-1417
cagagaccagcagaacggcatcccagccacgacggccactttgctctgtctgctctccgccacggccctgctctgttccctgggacacccccgcccccacctcctcaggctgcctgatctgcccagctttccagctttcctctggattccggcctctggtcatccctccccaccctctctccaaggccctctcctggtctcccttcttctagaaccccttcctccacctccctctctgcagaacttctcctttaccccccaccccccaccactgccccctttccttttctgacctccttttggagggctcagcgctgcccagaccataggagagatgtgggaggctcagttcctgggcttgctgtttctgcagccgctttgggtggctccagtgaagcctctccagccaggggctgaggtcccggtggtgtgggcccaggagggggctcctgcccagctcccctgcagccccacaatccccctccaggatctcagccttctgcgaagagcaggggtcacttggcagcatcagccagacagtggcccgcccgctgccgcccccggccatcccctggcccccggccctcacccggcggcgccctcctcctgggggcccaggccccgccgctacacggtgctgagcgtgggtcccggaggcctgcgcagcgggaggctgcccctgcagccccgcgtccagctggatgagcgcggccggcagcgcggggacttctcgctatggctgcgcccagcccggcgcgcggacgccggcgagtaccgcgccgcggtgcacctcagggaccgcgccctctcctgccgcctccgtctgcgcctgggccaggcctcgatgactgccagccccccaggatctctcagagcctccgactgggtcattttgaactgctccttcagccgccctgaccgcccagcctctgtgcattggttccggaaccggggccagggccgagtccctgtccgggagtccccccatcaccacttagcggaaagcttcctcttcctgccccaagtcagccccatggactctgggccctggggctgcatcctcacctacagagatggcttcaacgtctccatcatgtataacctcactgttctgggtctggagcccccaactcccttgacagtgtacgctggagcaggttccagggtggggctgccctgccgcctgcctgctggtgtggggacccggtctttcctcactgccaagtggactcctcctgggggaggccctgacctcctggtgactggagacaatggcgactttacccttcgactagaggatgtgagccaggcccaggctgggacctacacctgccatatccatctgcaggaacagcagctcaatgccactgtcacattggcaatcatcacaggtcagcctcaggtgggaaaggagtagctgccctcccagggtagaaaggacagggaggaagggctggcagggcaaagactaggcaaacccaccctgtgatgccaggccactgggcacaagttccagagcctgcccatctcggcccccacttttctcacccccataataaagaaacgaaactgaaaa

SEQ ID NO: 150030 - DNA, 1699 bp, Homo sapiens
  Payload ID: 9631
  Gene Symbol: LSP1
  Gene Name: lymphocyte-specific protein 1
  Uniprot ID: P33241
  ENST ID: ENST00000311604
  CDS Start-End: 176-1195
acaccctgacccaagccgagacaggttccaaacctcaacctgcagccggaagggggaagtgaaactcggctgggggtgggggctcagaagccgccccagaaagcactgaaagccacagcacgtacacccactccagggatctgccagcaccctgtggggcccagactacaggctgatggcggaggcttcgagtgacccgggtgccgaggagcgggaagagttgctggggcccactgctcagtggagcgtggaggacgaggaggaggccgtccacgagcaatgccagcatgagagagacaggcagcttcaggcccaggacgaggagggaggcggccatgtccccgagcggccgaagcaggagatgctcctcagcctgaagccctcggaggcccctgaactggatgaggacgagggctttggcgactggtcccagaggccagagcagcggcagcagcacgagggggcgcagggcgccttggacagcggagagcccccccagtgcaggagtcctgagggggagcaagaggacaggcccggcctgcatgcctacgaaaaggaggacagtgatgaagtccacctggaggagttgagtctgagcaaggaggggccaggcccagaggacactgtccaggacaacctgggggccgcaggggctgaggaggaacaggaggagcaccagaaatgtcagcagcccaggacacccagccccttggtcttggaggggaccatcgaacagagctcgcctcccctgagccctaccaccaaactcatcgacaggaccgagtccctaaaccgctccatagagaagagtaacagtgtgaagaaatcccagccagacttgcccatctccaagattgatcagtggctggaacaatacacccaggccatcgagaccgctggccggacccccaagctagcccgccaggcctccatagagctgcccagcatggctgtggccagtaccaagagtcggtgggagacgggtgaggtacaggctcagtctgcggccaagactccgtcctgcaaggatattgtggctggagacatgagcaagaaaagcctctgggagcagaagggaggctccaagacctcatcaacaattaagagcaccccatctgggaagaggtataagtttgtggccaccgggcatgggaagtatgagaaggtgcttgtggaagggggcccggctccctaggcgtcccatctcgcttcctgggtctgcaggtccagccggctggcaccctccatgtacccaggggagattccagccagacacccgccccccggccctggctaagaagttgcttcctgttgccagcatgacctaccctcgcctctttgatgccatccgctgccacctccttttgctcctggaccctttagcctctctgcccttccactctctgaccaccgcccccgccctccccacccagctccgcttcttgttacttgggggaggaaagaaactcctgatcattggccaaagggacttacccctggagaggccaagtgccttctaggaagttaggaggttgaggcacagcctgtgcagagagggtgggtcacccccccagatccaaggagaaactgcaggtcaagggctgataacggccatgcaggatgcttgatgctgcgtcccccgctgcttgccgccccccaccccgccattttgtataataaagctccctgtgtattctca

SEQ ID NO: 150031 - DNA, 2016 bp, Homo sapiens
  Payload ID: 9631
  Gene Symbol: LSP1
  Gene Name: lymphocyte-specific protein 1
  Uniprot ID: P33241
  ENST ID: ENST00000381775
  CDS Start-End: 109-1512
ggtcaggccaggtcgccgcctgagcagaggctgcagcctgggcagtcccgggcttctgaggaggaactctagcagacagggcctggatacctcttgagatgcagagagatggctccgatctggtccccacctggcagggtctccggctgtcacctgagttcaggaccagcaccaggatctgcagtgggcccctggctgggcacacctcatcccagcctccccctacccctggccccccataagcctcctcctcctgggcttccaggctctgctggtcagacctccctccctgcccaacgggaatgtgttttcccaggggacgctgctgtccaccaggagctctgtggcctgggatttgaggagtgcctggggtcaatcccccaggctcaccagtgctacttaacaaatgggcccaagagaaggaagtgcagcccccggaggaggggcagagcccctgcctggctgtgcggtggctcacccccttgtcaccaggggctcggccatgagcatccgtccagcgggcccagcaccaactgcagccccaggcccactgctcagtggagcgtggaggacgaggaggaggccgtccacgagcaatgccagcatgagagagacaggcagcttcaggcccaggacgaggagggaggcggccatgtccccgagcggccgaagcaggagatgctcctcagcctgaagccctcggaggcccctgaactggatgaggacgagggctttggcgactggtcccagaggccagagcagcggcagcagcacgagggggcgcagggcgccttggacagcggagagcccccccagtgcaggagtcctgagggggagcaagaggacaggcccggcctgcatgcctacgaaaaggaggacagtgatgaagtccacctggaggagttgagtctgagcaaggaggggccaggcccagaggacactgtccaggacaacctgggggccgcaggggctgaggaggaacaggaggagcaccagaaatgtcagcagcccaggacacccagccccttggtcttggaggggaccatcgaacagagctcgcctcccctgagccctaccaccaaactcatcgacaggaccgagtccctaaaccgctccatagagaagagtaacagtgtgaagaaatcccagccagacttgcccatctccaagattgatcagtggctggaacaatacacccaggccatcgagaccgctggccggacccccaagctagcccgccaggcctccatagagctgcccagcatggctgtggccagtaccaagagtcggtgggagacgggtgaggtacaggctcagtctgcggccaagactccgtcctgcaaggatattgtggctggagacatgagcaagaaaagcctctgggagcagaagggaggctccaagacctcatcaacaattaagagcaccccatctgggaagaggtataagtttgtggccaccgggcatgggaagtatgagaaggtgcttgtggaagggggcccggctccctaggcgtcccatctcgcttcctgggtctgcaggtccagccggctggcaccctccatgtacccaggggagattccagccagacacccgccccccggccctggctaagaagttgcttcctgttgccagcatgacctaccctcgcctctttgatgccatccgctgccacctccttttgctcctggaccctttagcctctctgcccttccactctctgaccaccgcccccgccctccccacccagctccgcttcttgttacttgggggaggaaagaaactcctgatcattggccaaagggacttacccctggagaggccaagtgccttctaggaagttaggaggttgaggcacagcctgtgcagagagggtgggtcacccccccagatccaaggagaaactgcaggtcaagggctgataacggccatgcaggatgcttgatgctgcgtcccccgctgcttgccgccccccaccccgccattttgtataataaagctccctgtgtattctca

SEQ ID NO: 150032 - DNA, 1785 bp, Homo sapiens
  Payload ID: 9631
  Gene Symbol: LSP1
  Gene Name: lymphocyte-specific protein 1
  Uniprot ID: P33241
  ENST ID: ENST00000405957
  CDS Start-End: 448-1281
gggctggaagtcggtcttcggacagagcccgtcctgcccagaagcccaggcgagccagcagcaggggtgcagggaccgagtggcccagccccctgggcagggtgtcagggccagagcccagaggacggcggttcaggcttcagtcccagccggcgaaccagagctgggcagagcggccagcaagcggcagccagggtgccctgggcactcgacccccagatgcccctgctggaaccgtaaaggggaggcaccctgaggccagagggagcatggccccggggactgagcatccggctcagagcggcttggcagaggcccactgctcagtggagcgtggaggacgaggaggaggccgtccacgagcaatgccagcatgagagagacaggcagcttcaggcccaggacgaggagggaggcggccatgtccccgagcggccgaagcaggagatgctcctcagcctgaagccctcggaggcccctgaactggatgaggacgagggctttggcgactggtcccagaggccagagcagcggcagcagcacgagggggcgcagggcgccttggacagcggagagcccccccagtgcaggagtcctgagggggagcaagaggacaggcccggcctgcatgcctacgaaaaggaggacagtgatgaagtccacctggaggagttgagtctgagcaaggaggggccaggcccagaggacactgtccaggacaacctgggggccgcaggggctgaggaggaacaggaggagcaccagaaatgtcagcagcccaggacacccagccccttggtcttggaggggaccatcgaacagagctcgcctcccctgagccctaccaccaaactcatcgacaggaccgagtccctaaaccgctccatagagaagagtaacagtgtgaagaaatcccagccagacttgcccatctccaagattgatcagtggctggaacaatacacccaggccatcgagaccgctggccggacccccaagctagcccgccaggcctccatagagctgcccagcatggctgtggccagtaccaagagtcggtgggagacgggtgaggtacaggctcagtctgcggccaagactccgtcctgcaaggatattgtggctggagacatgagcaagaaaagcctctgggagcagaagggaggctccaagacctcatcaacaattaagagcaccccatctgggaagaggtataagtttgtggccaccgggcatgggaagtatgagaaggtgcttgtggaagggggcccggctccctaggcgtcccatctcgcttcctgggtctgcaggtccagccggctggcaccctccatgtacccaggggagattccagccagacacccgccccccggccctggctaagaagttgcttcctgttgccagcatgacctaccctcgcctctttgatgccatccgctgccacctccttttgctcctggaccctttagcctctctgcccttccactctctgaccaccgcccccgccctccccacccagctccgcttcttgttacttgggggaggaaagaaactcctgatcattggccaaagggacttacccctggagaggccaagtgccttctaggaagttaggaggttgaggcacagcctgtgcagagagggtgggtcacccccccagatccaaggagaaactgcaggtcaagggctgataacggccatgcaggatgcttgatgctgcgtcccccgctgcttgccgccccccaccccgccattttgtataataaagctccctgtgtattctca

SEQ ID NO: 150033 - DNA, 2640 bp, Homo sapiens
  Payload ID: 9631
  Gene Symbol: LSP1
  Gene Name: lymphocyte-specific protein 1
  Uniprot ID: P33241
  ENST ID: ENST00000406638
  CDS Start-End: 1303-2136
ataccccattttgcaaacaggaaagctgaggctcagggaggcaccaaagcttactcccatcctggggcttggcagggggtgcccgcagcacccggggacatacaccggggagtctcctgggaaagaagtgccggcccaggggcagactcttttctgctctgccatgtcttccctgcacccccagggatgatgagtctgggaggggctggtcagccatgaaagcttcggggaggggccggtggccaggccgggcaccccagagctccacaggcagacatggtgtgggggtgtcaggaagagggcctggctgctgggtgctacggtaggaagatcccggtgctgtgggagtggagcaggtggttgaatgccaggctggcttggtccttctctctgggtgccggctgtggctcccgcccaggtgggcaccacgtctgaataatgtatgaagcctctggttgcgtggaggatgggagcgcttcgggcagcatctgtgggcagagacttcagggatgtgaggtacatctgggcatggctagctgggaaggaaagaggatggcagagcctcgagccgttgccagggactggttgcgtgtcccagaacgtgccaaaagcctgcctcgtgagcacggcaagagctctgccagggcagtcccagctggcccaggcgccgcagcgctcccgagggccgtcgagcaaaggcgggaggcgcagccgggctgtcggtggacctgtaggtatcagggctccttggtcccctcctgcgggaagcaggcaccgagtggggctgcatgtagacgcatgcgagggtgagagctgcggcggaggacgctgatcgcggagtgcaggcgagggccccagaaaggtcccgcaggtcgcctcgctcgtggcacgggctcggcagcgttgtggttagtgacacggaggaagacagaaagccatatgcacagcacgcagaacaggaggaggggggaagaaagagcaggcacggggcaggcagagccgcagccacgccgccgggatgcagcaggcagggccacccacgagcagggcggggccctaacctccgacccaggctggtcgccgcagatgggggcagagatgtgaaacagctgcagagcgggacaagggtgctgccggcacagggctgaccacagagcacatcaaaagaggcccactgctcagtggagcgtggaggacgaggaggaggccgtccacgagcaatgccagcatgagagagacaggcagcttcaggcccaggacgaggagggaggcggccatgtccccgagcggccgaagcaggagatgctcctcagcctgaagccctcggaggcccctgaactggatgaggacgagggctttggcgactggtcccagaggccagagcagcggcagcagcacgagggggcgcagggcgccttggacagcggagagcccccccagtgcaggagtcctgagggggagcaagaggacaggcccggcctgcatgcctacgaaaaggaggacagtgatgaagtccacctggaggagttgagtctgagcaaggaggggccaggcccagaggacactgtccaggacaacctgggggccgcaggggctgaggaggaacaggaggagcaccagaaatgtcagcagcccaggacacccagccccttggtcttggaggggaccatcgaacagagctcgcctcccctgagccctaccaccaaactcatcgacaggaccgagtccctaaaccgctccatagagaagagtaacagtgtgaagaaatcccagccagacttgcccatctccaagattgatcagtggctggaacaatacacccaggccatcgagaccgctggccggacccccaagctagcccgccaggcctccatagagctgcccagcatggctgtggccagtaccaagagtcggtgggagacgggtgaggtacaggctcagtctgcggccaagactccgtcctgcaaggatattgtggctggagacatgagcaagaaaagcctctgggagcagaagggaggctccaagacctcatcaacaattaagagcaccccatctgggaagaggtataagtttgtggccaccgggcatgggaagtatgagaaggtgcttgtggaagggggcccggctccctaggcgtcccatctcgcttcctgggtctgcaggtccagccggctggcaccctccatgtacccaggggagattccagccagacacccgccccccggccctggctaagaagttgcttcctgttgccagcatgacctaccctcgcctctttgatgccatccgctgccacctccttttgctcctggaccctttagcctctctgcccttccactctctgaccaccgcccccgccctccccacccagctccgcttcttgttacttgggggaggaaagaaactcctgatcattggccaaagggacttacccctggagaggccaagtgccttctaggaagttaggaggttgaggcacagcctgtgcagagagggtgggtcacccccccagatccaaggagaaactgcaggtcaagggctgataacggccatgcaggatgcttgatgctgcgtcccccgctgcttgccgccccccaccccgccattttgtataataaagctccctgtgtattctca

SEQ ID NO: 150034 - DNA, 887 bp, Homo sapiens
  Payload ID: 9631
  Gene Symbol: LSP1
  Gene Name: lymphocyte-specific protein 1
  ENST ID: ENST00000457279
  CDS Start-End: 63-887
acacagcttcttggtgctccaaagacgggcggtaggaggaagatcaaagaagcgagaaatggatgctggaggaacgcagtgaggccaggcccactgctcagtggagcgtggaggacgaggaggaggccgtccacgagcaatgccagcatgagagagacaggcagcttcaggcccaggacgaggagggaggcggccatgtccccgagcggccgaagcaggagatgctcctcagcctgaagccctcggaggcccctgaactggatgaggacgagggctttggcgactggtcccagaggccagagcagcggcagcagcacgagggggcgcagggcgccttggacagcggagagcccccccagtgcaggagtcctgagggggagcaagaggacaggcccggcctgcatgcctacgaaaaggaggacagtgatgaagtccacctggaggagttgagtctgagcaaggaggggccaggcccagaggacactgtccaggacaacctgggggccgcaggggctgaggaggaacaggaggagcaccagaaatgtcagcagcccaggacacccagccccttggtcttggaggggaccatcgaacagagctcgcctcccctgagccctaccaccaaactcatcgacaggaccgagtccctaaaccgctccatagagaagagtaacagtgtgaagaaatcccagccagacttgcccatctccaagattgatcagtggctggaacaatacacccaggccatcgagaccgctggccggacccccaagctagcccgccaggcctccatagagctgcccagcatggctgtggccagtaccaagagtcggtgggagacgggtgaggtacaggctcagtctgcggccaagactccgtcctgcaag

SEQ ID NO: 150035 - DNA, 582 bp, Homo sapiens
  Payload ID: 9631
  Gene Symbol: LSP1
  Gene Name: lymphocyte-specific protein 1
  ENST ID: ENST00000429923
  CDS Start-End: 58-582
ggtgcagaggaccaaggccggtccacttgacctcagccatgaggacatcccaaggccatgcccactgctcagtggagcgtggaggacgaggaggaggccgtccacgagcaatgccagcatgagagagacaggcagcttcaggcccaggacgaggagggaggcggccatgtccccgagcggccgaagcaggagatgctcctcagcctgaagccctcggaggcccctgaactggatgaggacgagggctttggcgactggtcccagaggccagagcagcggcagcagcacgagggggcgcagggcgccttggacagcggagagcccccccagtgcaggagtcctgagggggagcaagaggacaggcccggcctgcatgcctacgaaaaggaggacagtgatgaagtccacctggaggagttgagtctgagcaaggaggggccaggcccagaggacactgtccaggacaacctgggggccgcaggggctgaggaggaacaggaggagcaccagaaatgtcagcagcccaggacacccagccccttggtcttggaggggaccatcgaacagagctcgcctcccctg

SEQ ID NO: 150036 - DNA, 574 bp, Homo sapiens
  Payload ID: 9631
  Gene Symbol: LSP1
  Gene Name: lymphocyte-specific protein 1
  ENST ID: ENST00000446808
  CDS Start-End: 197-574
gagacggggaaggaggggacgggacaaagaggaaccagcgaagggtccaggcctgcgatgatggcccactgctcagtggagcgtggaggacgaggaggaggccgtccacgagcaatgccagcatgagagagacaggcagcttcaggcccaggacgaggagggaggcggccatgtccccgagcggccgaagcaggagatgctcctcagcctgaagccctcggaggcccctgaactggatgaggacgagggctttggcgactggtcccagaggccagagcagcggcagcagcacgagggggcgcagggcgccttggacagcggagagcccccccagtgcaggagtcctgagggggagcaagaggacaggcccggcctgcatgcctacgaaaaggaggacagtgatgaagtccacctggaggagttgagtctgagcaaggaggggccaggcccagaggacactgtccaggacaacctgggggccgcaggggctgaggaggaacaggaggagcaccagaaatgtcagcagcccaggacacccagccccttggtcttggaggggaccatcgaacagagc

SEQ ID NO: 150037 - DNA, 581 bp, Homo sapiens
  Payload ID: 9631
  Gene Symbol: LSP1
  Gene Name: lymphocyte-specific protein 1
  ENST ID: ENST00000418975
  CDS Start-End: 216-581
ataccccattttgcaaacaggaaagctgaggctcagggaggcaccaaagcttactcccatcctggggcttggcagggggtgcccgcagcacccggggacatacaccggggagtctcctgggaaagaagtgccggcccaggggcagactcttttctgctctgccatgtcttccctgcacccccagggatgatgagtctgggaggggctggtcagccatgaaagcttcggggaggggccggtggccaggccgggcaccccagagctccacaggcagacatggtgtgggggtgtcaggaagagggcctggctgctgggtgctacggcccactgctcagtggagcgtggaggacgaggaggaggccgtccacgagcaatgccagcatgagagagacaggcagcttcaggcccaggacgaggagggaggcggccatgtccccgagcggccgaagcaggagatgctcctcagcctgaagccctcggaggcccctgaactggatgaggacgagggctttggcgactggtcccagaggccagagcagcggcagcagcacgagggggcgcagggcgccttggacagcgga

SEQ ID NO: 150038 - DNA, 682 bp, Homo sapiens
  Payload ID: 9631
  Gene Symbol: LSP1
  Gene Name: lymphocyte-specific protein 1
  ENST ID: ENST00000421485
  CDS Start-End: 503-682
acagcctcacccttgcttccctcagtgttcccaaggtgctgcgcaaccccaactccctggcctggccagggtcatgatagctggggaggcaagaggtggctgttctccttgaatgtagggacagagggtggcatgggcagatgagtgcccgtgcacagatggtggcccaggactaattgggtggccagcggccggcagatctggctctggttctggctgtgccaggccctcactctgtgaccttggatgccagtgctgctggctggaccttggtttctccatcctggacatgggtacatggtggttctgagtgccagcgagctgggcaaaccgccggatgtgagactgccgtcgcggagctgaccctcggcccactgctcagtggagcgtggaggacgaggaggaggccgtccacgagcaatgccagcatgagagagacaggcagcttcaggcccaggacgaggagggaggcggccatgtccccgagcggccgaagcaggagatgctcctcagcctgaagccctcggaggcccctgaactggatgaggacgagggctttggcgactggtcccagaggccagagcagcggcagcagcacgagggggcgcagggcgccttggacagcggagagcccccccagtgcaggagtcctgagggggagcaagaggacaggcccggcctg

SEQ ID NO: 150039 - DNA, 968 bp, Homo sapiens
  Payload ID: 9631
  Gene Symbol: LSP1
  Gene Name: lymphocyte-specific protein 1
  ENST ID: ENST00000432093
  CDS Start-End: 303-968
gagcctcctcactccccaggaccccagagaggacggaccctctccagccgccctctgggctcaggacagccgggtggggcagccacaggagctgcctgcagggggcagagtcgggacggggaccgagccggacacccattctgcaagtgtctgcagggggaggacggaggcccactgctcagtggagcgtggaggacgaggaggaggccgtccacgagcaatgccagcatgagagagacaggcagcttcaggcccaggacgaggagggaggcggccatgtccccgagcggccgaagcaggagatgctcctcagcctgaagccctcggaggcccctgaactggatgaggacgagggctttggcgactggtcccagaggccagagcagcggcagcagcacgagggggcgcagggcgccttggacagcggagagcccccccagtgcaggagtcctgagggggagcaagaggacaggcccggcctgcatgcctacgaaaaggaggacagtgatgaagtccacctggaggagttgagtctgagcaaggaggggccaggcccagaggacactgtccaggacaacctgggggccgcaggggctgaggaggaacaggaggagcaccagaaatgtcagcagcccaggacacccagccccttggtcttggaggggaccatcgaacagagctcgcctcccctgagccctaccaccaaactcatcgacaggaccgagtccctaaaccgctccatagagaagagtaacagtgtgaagaaatcccagccagacttgcccatctccaagattgatcagtggctggaacaatacacccaggccatcgagaccgctggccggacccccaagctagcccgccaggcctccatagagctgcccagcatggctgtggccagtaccaagagtcggtgggagacgggtgaggtacaggctcagtctgcggccaagactccgtcctgcaag

SEQ ID NO: 150040 - DNA, 417 bp, Homo sapiens
  Payload ID: 9631
  Gene Symbol: LSP1
  Gene Name: lymphocyte-specific protein 1
  ENST ID: ENST00000451814
  CDS Start-End: 224-417
gtgggctgagacccgggaggcttgagggtcggctgctacccatgacgggttggggaggtattggtgcgagctgaggtggtgcttgcggaggcccactgctcagtggagcgtggaggacgaggaggaggccgtccacgagcaatgccagcatgagagagacaggcagcttcaggcccaggacgaggagggaggcggccatgtccccgagcggccgaagcaggagatgctcctcagcctgaagccctcggaggcccctgaactggatgaggacgagggctttggcgactggtcccagaggccagagcagcggcagcagcacgagggggcgcagggcgccttggacagcggagagcccccccagtgcaggagtcctgagggggagcaagaggacaggcccggcctgcatgcctacgaaaa

SEQ ID NO: 150041 - DNA, 887 bp, Homo sapiens
  Payload ID: 9631
  Gene Symbol: LSP1
  Gene Name: lymphocyte-specific protein 1
  ENST ID: ENST00000417766
  CDS Start-End: 222-887
agggcagtcccagctggcccaggcgccgcagcgctcccgagggccgtcgagcaaaggcgggaggcgcagccgggctgtcggtggacctgcccactgctcagtggagcgtggaggacgaggaggaggccgtccacgagcaatgccagcatgagagagacaggcagcttcaggcccaggacgaggagggaggcggccatgtccccgagcggccgaagcaggagatgctcctcagcctgaagccctcggaggcccctgaactggatgaggacgagggctttggcgactggtcccagaggccagagcagcggcagcagcacgagggggcgcagggcgccttggacagcggagagcccccccagtgcaggagtcctgagggggagcaagaggacaggcccggcctgcatgcctacgaaaaggaggacagtgatgaagtccacctggaggagttgagtctgagcaaggaggggccaggcccagaggacactgtccaggacaacctgggggccgcaggggctgaggaggaacaggaggagcaccagaaatgtcagcagcccaggacacccagccccttggtcttggaggggaccatcgaacagagctcgcctcccctgagccctaccaccaaactcatcgacaggaccgagtccctaaaccgctccatagagaagagtaacagtgtgaagaaatcccagccagacttgcccatctccaagattgatcagtggctggaacaatacacccaggccatcgagaccgctggccggacccccaagctagcccgccaggcctccatagagctgcccagcatggctgtggccagtaccaagagtcggtgggagacgggtgaggtacaggctcagtctgcggccaagactccgtcctgcaag

SEQ ID NO: 150042 - DNA, 1881 bp, Homo sapiens
  Payload ID: 9631
  Gene Symbol: LSP1
  Gene Name: lymphocyte-specific protein 1
  Uniprot ID: P33241
  ENST ID: ENST00000612798
  CDS Start-End: 544-1377
ttttgcaaacaggaaagctgaggctcagggaggcaccaaagcttactcccatcctggggcttggcagggggtgcccgcagcacccggggacatacaccggggagtctcctgggaaagaagtgccggcccaggggcagactcttttctgctctgccatgtcttccctgcacccccagggatgatgagtctgggaggggctggtcagccatgaaagcttcggggaggggccggtggccaggccgggcaccccagagctccacaggcagacatggtgtgggggtgtcaggaagagggcctggctgctgggtgctacggtaggaagatcccggtgctgtgggagtggagcaggtggttgaatgccaggctggcttggtccttctctctgggtgccggctgtggctcccgcccaggcccactgctcagtggagcgtggaggacgaggaggaggccgtccacgagcaatgccagcatgagagagacaggcagcttcaggcccaggacgaggagggaggcggccatgtccccgagcggccgaagcaggagatgctcctcagcctgaagccctcggaggcccctgaactggatgaggacgagggctttggcgactggtcccagaggccagagcagcggcagcagcacgagggggcgcagggcgccttggacagcggagagcccccccagtgcaggagtcctgagggggagcaagaggacaggcccggcctgcatgcctacgaaaaggaggacagtgatgaagtccacctggaggagttgagtctgagcaaggaggggccaggcccagaggacactgtccaggacaacctgggggccgcaggggctgaggaggaacaggaggagcaccagaaatgtcagcagcccaggacacccagccccttggtcttggaggggaccatcgaacagagctcgcctcccctgagccctaccaccaaactcatcgacaggaccgagtccctaaaccgctccatagagaagagtaacagtgtgaagaaatcccagccagacttgcccatctccaagattgatcagtggctggaacaatacacccaggccatcgagaccgctggccggacccccaagctagcccgccaggcctccatagagctgcccagcatggctgtggccagtaccaagagtcggtgggagacgggtgaggtacaggctcagtctgcggccaagactccgtcctgcaaggatattgtggctggagacatgagcaagaaaagcctctgggagcagaagggaggctccaagacctcatcaacaattaagagcaccccatctgggaagaggtataagtttgtggccaccgggcatgggaagtatgagaaggtgcttgtggaagggggcccggctccctaggcgtcccatctcgcttcctgggtctgcaggtccagccggctggcaccctccatgtacccaggggagattccagccagacacccgccccccggccctggctaagaagttgcttcctgttgccagcatgacctaccctcgcctctttgatgccatccgctgccacctccttttgctcctggaccctttagcctctctgcccttccactctctgaccaccgcccccgccctccccacccagctccgcttcttgttacttgggggaggaaagaaactcctgatcattggccaaagggacttacccctggagaggccaagtgccttctaggaagttaggaggttgaggcacagcctgtgcagagagggtgggtcacccccccagatccaaggagaaactgcaggtcaagggctgataacggccatgcaggatgcttgatgctgcgtcccccgctgcttgccgccccccaccccgccattttgtataataaagctccctgtgtattctca

SEQ ID NO: 150043 - DNA, 3068 bp, Homo sapiens
  Payload ID: 9632
  Gene Symbol: LEF1
  Gene Name: lymphoid enhancer-binding factor 1
  Uniprot ID: Q9UJU2
  ENST ID: ENST00000265165
  CDS Start-End: 656-1855
aagatctaaaacggacatctccagcgtgggtggctcctttttctttttctttttttcccacccttcaggaagtggacgtttcgttatcttctgatccttgcaccttcttttggggcaaacggggcccttctgcccagatcccctctcttttctcggaaaacaaactactaagtcggcatccggggtaactacagtggagagggtttccgcggagacgcgccgccggaccctcctctgcactttggggaggcgtgctccctccagaaccggcgttctccgcgcgcaaatcccggcgacgcggggtcgcggggtggccgccggggcagcctcgtctagcgcgcgccgcgcagacgcccccggagtcgccagctaccgcagccctcgccgcccagtgcccttcggcctcgggggcgggcgcctgcgtcggtctccgcgaagcgggaaagcgcggcggccgccgggattcgggcgccgcggcagctgctccggctgccggccggcggccccgcgctcgcccgccccgcttccgcccgctgtcctgctgcacgaacccttccaactctcctttcctcccccacccttgagttacccctctgtctttcctgctgttgcgcgggtgctcccacagcggagcggagattacagagccgccgggatgccccaactctccggaggaggtggcggcggcgggggggacccggaactctgcgccacggacgagatgatccccttcaaggacgagggcgatcctcagaaggaaaagatcttcgccgagatcagtcatcccgaagaggaaggcgatttagctgacatcaagtcttccttggtgaacgagtctgaaatcatcccggccagcaacggacacgaggtggccagacaagcacaaacctctcaggagccctaccacgacaaggccagagaacaccccgatgacggaaagcatccagatggaggcctctacaacaagggaccctcctactcgagttattccgggtacataatgatgccaaatatgaataacgacccatacatgtcaaatggatctctttctccacccatcccgagaacatcaaataaagtgcccgtggtgcagccatcccatgcggtccatcctctcacccccctcatcacttacagtgacgagcacttttctccaggatcacacccgtcacacatcccatcagatgtcaactccaaacaaggcatgtccagacatcctccagctcctgatatccctactttttatcccttgtctccgggtggtgttggacagatcaccccacctcttggctggcaaggtcagcctgtatatcccatcacgggtggattcaggcaaccctacccatcctcactgtcagtcgacacttccatgtccaggttttcccatcatatgattcccggtcctcctggtccccacacaactggcatccctcatccagctattgtaacacctcaggtcaaacaggaacatccccacactgacagtgacctaatgcacgtgaagcctcagcatgaacagagaaaggagcaggagccaaaaagacctcacattaagaagcctctgaatgcttttatgttatacatgaaagaaatgagagcgaatgtcgttgctgagtgtactctaaaagaaagtgcagctatcaaccagattcttggcagaaggtggcatgccctctcccgtgaagagcaggctaaatattatgaattagcacggaaagaaagacagctacatatgcagctttatccaggctggtctgcaagagacaattatggtaagaaaaagaagaggaagagagagaaactacaggaatctgcatcaggtacaggtccaagaatgacagctgcctacatctgaaacatggtggaaaacgaagctcattcccaacgtgcaaagccaaggcagcgaccccaggacctcttctggagatggaagcttgttgaaaacccagactgtctccacggcctgcccagtcgaccccaaaggaacactgacatcaattttaccctgaggtcactgctagagacgctgatccataaagacaatcactgccaacccctctttcgtctactgcaagagccaagttccaaaataaagcataaaaaggttttttaaaaggaaatgtaaaagcacatgagaatgctagcaggctgtggggcagctgagcagcttttctcccctcatatctgcgtgcacttcccagagcatcttgcatccaaacctgtaacctttcggcaaggacggtaacttggctgcatttgcctgtcatgcgcaactggagccagcaaccagcacatccatcagcaccccagtggaggagttcatggaagagttccctctttgtttctgcttcatttttctttcttttcttttctcctaaagcttttatttaacagtgcaaaaggatcgtttttttttgcttttttaaacttgaatttttttaatttacactttttagttttaattttcttgtatattttgctagctatgagcttttaaataaaattgaaagttctggaaaagtttgaaataatgacataaaaagaagccttctttttctgagacagcttgtctggtaagtggcttctctgtgaattgcctgtaacacatagtggcttctccgcccttgtaaggtgttcagtagagctaaataaatgtaatagccaaacccactctgttggtagcaattggcagccctatttcagtttattttttcttctgttttcttcttttctttttttaaacagtaaaccttaacagatgcgttcagcagactggtttgcagtgaattttcatttctttccttatcacccccttgttgtaaaaagcccagcacttgaattgttattactttaaatgttctgtatttgtatctgtttttattagccaattagtgggattttatgccagttgttaaaatgagcattgatgtacccattttttaaaaaagcaaggcacagcctttgcccaaaactgtcatcctaacgtttgtcattccagtttgagttaatgtgctgagcatttttttaaaagaagctttgtaataaaacatttttaaaaattgtcattt

SEQ ID NO: 150044 - DNA, 3477 bp, Homo sapiens
  Payload ID: 9632
  Gene Symbol: LEF1
  Gene Name: lymphoid enhancer-binding factor 1
  Uniprot ID: Q9UJU2
  ENST ID: ENST00000379951
  CDS Start-End: 1190-2350
agcgccggcgaggcgcgggaggaggagaagcagtggggaggcgcagccgctcacctgcggggcagggcgcggaggagggacccgggctgcgcgctctcgggccgaggaaccaggacgcgcccggagcctcgcacgcggccaagctcggggcgtcccctcccctcggccgggcgaactcaaggggcgcagctctttgctttgacagagctggccggcggaggcgtgcagagcggcgagccggcgagccaggctgagaaactcgagccgggaacaaagaggggtcggactgagtgtgtgtgtcggctcgagctccgggcagaggcatttgggcccgaggcccccgctgtgactccccgagactccgcagtgccctccactgcggagtccccgcgcttgccggcaaaaactttattcttggcaaacttctctttctcttcccctcctcctcggcccccatcttctgctcctcctccttctctagcagattaaatgagcctcgagaagaaaaaccgaagcgaaagggaagaaaataagaagatctaaaacggacatctccagcgtgggtggctcctttttctttttctttttttcccacccttcaggaagtggacgtttcgttatcttctgatccttgcaccttcttttggggcaaacggggcccttctgcccagatcccctctcttttctcggaaaacaaactactaagtcggcatccggggtaactacagtggagagggtttccgcggagacgcgccgccggaccctcctctgcactttggggaggcgtgctccctccagaaccggcgttctccgcgcgcaaatcccggcgacgcggggtcgcggggtggccgccggggcagcctcgtctagcgcgcgccgcgcagacgcccccggagtcgccagctaccgcagccctcgccgcccagtgcccttcggcctcgggggcgggcgcctgcgtcggtctccgcgaagcgggaaagcgcggcggccgccgggattcgggcgccgcggcagctgctccggctgccggccggcggccccgcgctcgcccgccccgcttccgcccgctgtcctgctgcacgaacccttccaactctcctttcctcccccacccttgagttacccctctgtctttcctgctgttgcgcgggtgctcccacagcggagcggagattacagagccgccgggatgccccaactctccggaggaggtggcggcggcgggggggacccggaactctgcgccacggacgagatgatccccttcaaggacgagggcgatcctcagaaggaaaagatcttcgccgagatcagtcatcccgaagaggaaggcgatttagctgacatcaagtcttccttggtgaacgagtctgaaatcatcccggccagcaacggacacgaggtggccagacaagcacaaacctctcaggagccctaccacgacaaggccagagaacaccccgatgacggaaagcatccagatggaggcctctacaacaagggaccctcctactcgagttattccgggtacataatgatgccaaatatgaataacgacccatacatgtcaaatggatctctttctccacccatcccgagaacatcaaataaagtgcccgtggtgcagccatcccatgcggtccatcctctcacccccctcatcacttacagtgacgagcacttttctccaggatcacacccgtcacacatcccatcagatgtcaactccaaacaaggcatgtccagacatcctccagctcctgatatccctactttttatcccttgtctccgggtggtgttggacagatcaccccacctcttggctggttttcccatcatatgattcccggtcctcctggtccccacacaactggcatccctcatccagctattgtaacacctcaggtcaaacaggaacatccccacactgacagtgacctaatgcacgtgaagcctcagcatgaacagagaaaggagcaggagccaaaaagacctcacattaagaagcctctgaatgcttttatgttatacatgaaagaaatgagagcgaatgtcgttgctgagtgtactctaaaagaaagtgcagctatcaaccagattcttggcagaaggtggcatgccctctcccgtgaagagcaggctaaatattatgaattagcacggaaagaaagacagctacatatgcagctttatccaggctggtctgcaagagacaattatggtaagaaaaagaagaggaagagagagaaactacaggaatctgcatcaggtggaaaacgaagctcattcccaacgtgcaaagccaaggcagcgaccccaggacctcttctggagatggaagcttgttgaaaacccagactgtctccacggcctgcccagtcgaccccaaaggaacactgacatcaattttaccctgaggtcactgctagagacgctgatccataaagacaatcactgccaacccctctttcgtctactgcaagagccaagttccaaaataaagcataaaaaggttttttaaaaggaaatgtaaaagcacatgagaatgctagcaggctgtggggcagctgagcagcttttctcccctcatatctgcgtgcacttcccagagcatcttgcatccaaacctgtaacctttcggcaaggacggtaacttggctgcatttgcctgtcatgcgcaactggagccagcaaccagcacatccatcagcaccccagtggaggagttcatggaagagttccctctttgtttctgcttcatttttctttcttttcttttctcctaaagcttttatttaacagtgcaaaaggatcgtttttttttgcttttttaaacttgaatttttttaatttacactttttagttttaattttcttgtatattttgctagctatgagcttttaaataaaattgaaagttctggaaaagtttgaaataatgacataaaaagaagccttctttttctgagacagcttgtctggtaagtggcttctctgtgaattgcctgtaacacatagtggcttctccgcccttgtaaggtgttcagtagagctaaataaatgtaatagccaaacccactctgttggtagcaattggcagccctatttcagtttattttttcttctgttttcttcttttctttttttaaacagtaaaccttaacagatgcgttcagcagactggtttgcagtgaattttcatttctttccttatcacccccttgttgtaaaaagcccagcacttgaattgttattactttaaatgttctgtatttgtatctgtttttattagccaattagtgggattttatgccagttgttaaaatgagcattgatgtacccattttttaaaaaagcaaggcacagcctttgcccaaaactgtcatcctaacgtttgtcattccagtttgagttaatgtgctgagcatttttttaaaagaagctttgtaataaaacatttttaaaaattgtcattt

SEQ ID NO: 150045 - DNA, 1488 bp, Homo sapiens
  Payload ID: 9632
  Gene Symbol: LEF1
  Gene Name: lymphoid enhancer-binding factor 1
  Uniprot ID: Q9UJU2
  ENST ID: ENST00000438313
  CDS Start-End: 32-1147
acagcggagcggagattacagagccgccgggatgccccaactctccggaggaggtggcggcggcgggggggacccggaactctgcgccacggacgagatgatccccttcaaggacgagggcgatcctcagaaggaaaagatcttcgccgagatcagtcatcccgaagaggaaggcgatttagctgacatcaagtcttccttggtgaacgagtctgaaatcatcccggccagcaacggacacgaggtggccagacaagcacaaacctctcaggagccctaccacgacaaggccagagaacaccccgatgacggaaagcatccagatggaggcctctacaacaagggaccctcctactcgagttattccgggtacataatgatgccaaatatgaataacgacccatacatgtcaaatggatctctttctccacccatcccgagaacatcaaataaagtgcccgtggtgcagccatcccatgcggtccatcctctcacccccctcatcacttacagtgacgagcacttttctccaggatcacacccgtcacacatcccatcagatgtcaactccaaacaaggcatgtccagacatcctccagctcctgatatccctactttttatcccttgtctccgggtggtgttggacagatcaccccacctcttggctggttttcccatcatatgattcccggtcctcctggtccccacacaactggcatccctcatccagctattgtaacacctcaggtcaaacaggaacatccccacactgacagtgacctaatgcacgtgaagcctcagcatgaacagagaaaggagcaggagccaaaaagacctcacattaagaagcctctgaatgcttttatgttatacatgaaagaaatgagagcgaatgtcgttgctgagtgtactctaaaagaaagtgcagctatcaaccagattcttggcagaaggtggcatgccctctcccgtgaagagcaggctaaatattatgaattagcacggaaagaaagacagctacatatgcagctttatccaggctggtctgcaagagacaattatggtaagaaaaagaagaggaagagagagaaactacaggaatctgcatcaggtacaggtccaagaatgacagctgcctacatctgaaacatggtggaaaacgaagctcattcccaacgtgcaaagccaaggcagcgaccccaggacctcttctggagatggaagcttgttgaaaacccagactgtctccacggcctgcccagtcgaccccaaaggaacactgacatcaattttaccctgaggtcactgctagagacgctgatccataaagacaatcactgccaacccctctttcgtctactgcaagagccaagttccaaaataaagcataaaaaggttttttaaaaggaaatgtaaaagcacatgagaatgctagcaggctgtggggcagctgagcagcttttctcccctcatatctgcgtgcactt

SEQ ID NO: 150046 - DNA, 1280 bp, Homo sapiens
  Payload ID: 9632
  Gene Symbol: LEF1
  Gene Name: lymphoid enhancer-binding factor 1
  Uniprot ID: Q9UJU2
  ENST ID: ENST00000506680
  CDS Start-End: 1-990
atgccccaactctccggaggaggtggcggcggcgggggggacccggaactctgcgccacggacgagatgatccccttcaaggacgagggcgatcctcagaaggaaaagatcttcgccgagatcagtcatcccgaagaggaaggcgatttagctgacatcaagtcttccttggtgaacgagtctgaaatcatcccggccagcaacggacacgaggtggccagacaagcacaaacctctcaggagccctaccacgacaaggccagagaacaccccgatgacggaaagcatccagatggaggcctctacaacaagggaccctcctactcgagttattccgggtacataatgatgccaaatatgaataacgacccatacatgtcaaatggatctctttctccacccatcccgagaacatcaaataaagtgcccgtggtgcagccatcccatgcggtccatcctctcacccccctcatcacttacagtgacgagcacttttctccaggatcacacccgtcacacatcccatcagatgtcaactccaaacaaggcatgtccagacatcctccagctcctgatatccctactttttatcccttgtctccgggtggtgttggacagatcaccccacctcttggctggcaaggtcagcctgtatatcccatcacgggtggattcaggcaaccctacccatcctcactgtcagtcgacacttccatgtccaggttttcccatcatatgattcccggtcctcctggtccccacacaactggcatccctcatccagctattgtaacacctcaggtcaaacaggaacatccccacactgacagtgacctaatgcacgtgtgctctgcttttctcctcccccatcccttcctcattccttcaaccccttcccctaaccaccaccaccaccaccttttaggaagcctcagcatgaacagagaaaggagcaggagccaaaaagacctcacattaagaagcctctgaatgcttttatgttatacatgaaagaaatgagagcgaatgtcgttgctgagtgtactctaaaagaaagtgcagctatcaaccagattcttggcagaaggtggcatgccctctcccgtgaagagcaggctaaatattatgaattagcacggaaagaaagacagctacatatgcagctttatccaggctggtctgcaagagacaattatggtaagaaaaagaagaggaagagagagaaactacaggaatctgcatcaggtacaggtccaagaatgacagctgcctacatctga

SEQ ID NO: 150047 - DNA, 1037 bp, Homo sapiens
  Payload ID: 9632
  Gene Symbol: LEF1
  Gene Name: lymphoid enhancer-binding factor 1
  ENST ID: ENST00000515500
  CDS Start-End: 518-1037
ttttatttggggtttgggaccggatcaggccttaaatctacgcagaagaaaggcggagaagcagcggaagccgggcactagtcctgcagggtggaaggcgctttatcgggtcttctggcccgctgcgggcgatagagctggtaacctgagtagagtaaatagagacacgtgggtgctggctagagaaagcgcggagcagggccgcgctggagggctgtttgaagcctagtccagagctggtctagggggcggatggaccctgatacccgacactccactggtcacccttgttccacaactgggaaaccctctggaggaaatccggtagaaaagtcctgacacccgaatgatttaaccaacgccttttccctccaaagaaacttggaggatatacctttttttccttaaatggcatctttctacccccaaaaagaaagtgtgtggttttgagggcggggacattttgggttttaaacagcgcgtttaagaacacctcagatctgccttctctatcccaatggcagaggtggccagacaagcacaaacctctcaggagccctaccacgacaaggccagagaacaccccgatgacggaaagcatccagatggaggcctctacaacaagggaccctcctactcgagttattccgggtacataatgatgccaaatatgaataacgacccatacatgtcaaatggatctctttctccacccatcccgagaacatcaaataaagtgcccgtggtgcagccatcccatgcggtccatcctctcacccccctcatcacttacagtgacgagcacttttctccaggatcacacccgtcacacatcccatcagatgtcaactccaaacaaggcatgtccagacatcctccagctcctgatatccctactttttatcccttgtctccgggtggtgttggacagatcaccccacctcttggctggcaaggtcagcctgtatatcccatcacgggtggattcaggcaaccctacccatcctcactgtcagtcgacacttccatgtccaggt

SEQ ID NO: 150048 - DNA, 1472 bp, Homo sapiens
  Payload ID: 9632
  Gene Symbol: LEF1
  Gene Name: lymphoid enhancer-binding factor 1
  Uniprot ID: Q9UJU2
  ENST ID: ENST00000510624
  CDS Start-End: 442-1353
actagtcctgcagggtggaaggcgctttatcgggtcttctggcccgctgcgggcgatagagctggtaacctgagtagagtaaatagagacacgtgggtgctggctagagaaagcgcggagcagggccgcgctggagggctgtttgaagcctagtccagagctggtctagggggcggatggaccctgatacccgacactccactggtcacccttgttccacaactgggaaaccctctggaggaaatccggtagaaaagtcctgacacccgaatgatttaaccaacgccttttccctccaaagaaacttggaggatatacctttttttccttaaatggcatctttctacccccaaaaagaaagtgtgtggttttgagggcggggacattttgggttttaaacagcgcgtttaagaacacctcagatctgccttctctatcccaatggcagaggtggccagacaagcacaaacctctcaggagccctaccacgacaaggccagagaacaccccgatgacggaaagcatccagatggaggcctctacaacaagggaccctcctactcgagttattccgggtacataatgatgccaaatatgaataacgacccatacatgtcaaatggatctctttctccacccatcccgagaacatcaaataaagtgcccgtggtgcagccatcccatgcggtccatcctctcacccccctcatcacttacagtgacgagcacttttctccaggatcacacccgtcacacatcccatcagatgtcaactccaaacaaggcatgtccagacatcctccagctcctgatatccctactttttatcccttgtctccgggtggtgttggacagatcaccccacctcttggctggttttcccatcatatgattcccggtcctcctggtccccacacaactggcatccctcatccagctattgtaacacctcaggtcaaacaggaacatccccacactgacagtgacctaatgcacgtgaagcctcagcatgaacagagaaaggagcaggagccaaaaagacctcacattaagaagcctctgaatgcttttatgttatacatgaaagaaatgagagcgaatgtcgttgctgagtgtactctaaaagaaagtgcagctatcaaccagattcttggcagaaggtggcatgccctctcccgtgaagagcaggctaaatattatgaattagcacggaaagaaagacagctacatatgcagctttatccaggctggtctgcaagagacaattatggtaagaaaaagaagaggaagagagagaaactacaggaatctgcatcaggtacaggtccaagaatgacagctgcctacatctgaaacatggtggaaaacgaagctcattcccaacgtgcaaagccaaggcagcgaccccaggacctcttctggagatggaagcttgttgaaaacccagactgtctccacggcctgcccagtcg

SEQ ID NO: 150049 - DNA, 598 bp, Homo sapiens
  Payload ID: 9632
  Gene Symbol: LEF1
  Gene Name: lymphoid enhancer-binding factor 1
  ENST ID: ENST00000512172
  CDS Start-End: 22-459
agatctgccttctctatcccaatggcagaggtggccagacaagcacaaacctctcaggagccctaccacgacaaggccagagaacaccccgatgacggaaagcatccagatggaggcctctacaacaagggaccctcctactcgagttattccgggtacataatgatgccaaatatgaataacgacccatacatgtcaaatggatctctttctccacccatcccgagaacatcaaataaagtgcccgtggtgcagccatcccatgcggtccatcctctcacccccctcatcacttacagtgacgagcacttttctccaggatcacacccgtcacacatcccatcagatgtcaactccaaacaaggcatgtccagacatcctccagctcctgatatccctactttttatcccttgtctccgggtggtgttggacagatcaccccacctcttggctggtaagaaccttgctgcacccttcagccaggcatttgaacacatgttcctccactttccattcatggaaattagatttatgaatggtaacacttgtggagttgaagaaatttcacatcaacaagcaaggtgctaactttattca

SEQ ID NO: 150050 - DNA, 572 bp, Homo sapiens
  Payload ID: 9632
  Gene Symbol: LEF1
  Gene Name: lymphoid enhancer-binding factor 1
  ENST ID: ENST00000504950
  CDS Start-End: 7-408
atcccaatggcagaggtggccagacaagcacaaacctctcaggagccctaccacgacaaggccagagaacaccccgatgacggaaagcatccagatggaggcctctacaacaagggaccctcctactcgagttattccgggtacataatgatgccaaatatgaataacgacccatacatgtcaaatggatctctttctccacccatcccgagaacagcatgtccagacatcctccagctcctgatatccctactttttatcccttgtctccgggtggtgttggacagatcaccccacctcttggctggcaaggtcagcctgtatatcccatcacgggtggattcaggcaaccctacccatcctcactgtcagtcgacacttccatgtccaggttttcccatcatatgattcccggtcctcctggtccccacacaactggcatccctcatccagctattgtaacacctcaggtcaaacaggaacatccccacactgacagtgacctaatgcacgtgaagcctcagcatgaacagagaaaggagcaggagccaaaaagacctcacattaagaag

SEQ ID NO: 150051 - DNA, 2504 bp, Homo sapiens
  Payload ID: 9633
  Gene Symbol: LRMP
  Gene Name: lymphoid-restricted membrane protein
  Uniprot ID: Q12912
  ENST ID: ENST00000354454
  CDS Start-End: 830-2329
aaagggggagttgtaagagaggcggtatcaacagcctgctgatgaaagaggcgactctgcagaaagaggcaacttgacatatcaggactttaaccgctgtagaaatagctcaggcataccaagcccatgcaaacacagaattgcagaagttcaggagaggcttatcacttccctgagaagaaaaacacattttcagttttgcctgcatcataagagtgagcactccattgctttctttcctggccacactgctacaatccagcactaactatccatgtccagggtaaggatcgagatcgagaagcccacactgccagtgaaaaagctacgtctttactgcataaattagaggaagcaatttcggaacaacggaaccttcaaactataaatactgaattatcgaacacttgccaggcacttcagcagaagacaaggaaactgaagaagctttttagatgaggaatttcctcactatgattccctgtcctgcgcagatgcaattcaacaacctcttcaagaaaaattgaagcagtgttgccacaaactatatggtggtcaagaagcaagaatacatcagacacccctgaccttgaaacatacgtgctggtacacacctctgctggatgccttatctctggatagttttacagcagttccaaccctggaatcaacacctttctcaggtgtagccaaccaaatccacactctgtgtgaaaggcccacatatggagaagtaaaggatggtgctttggatgtaaaaagacaacacaagtgcccaggccccacaagtggccccagcccaggaacgaatctctcaggctgcatcaggatgaatgatgacccaagtatggaagagaatggtgttgaacgcgtgtgtcctgagagcctgctgcagtccagggaatattcctcactaccattacccagacacacttcatcgacagacggtactataacttcaagtgatcctggattagaaattctgaatatggcttcttgtgaccttgacagaaactcgctctgtaagaaagaggaggatacaagatcagcttctcccacgatagaggcccaaggcacaagtccagctcatgataatattgcattccaagactctacgagtaaggataaaaccatattaaatctggaagccaaagaggaaccagaaacaatagaagaacataaaaaagaacatgcttcaggagactctgtggtttcccctcttcctgtaaccactgtgaaatcggttaaccttagacaaagtgagaacacttctgctaatgagaaggaggtggaggcagaatttctcagattatctttgggatttaagtgtgactggtttaccttggagaagagagtgaagcttgaagagaggtcccgtgacttggcagaagaaaatttgaagaaagaaatcactaactgtttaaaactattagagtctttaacacctctgtgtgaagatgacaaccaggcacaggaaatcattaagaagctggagaagagtataaagtttcttagccagtgtgcagcacgagtggccagtagggctgagatgttgggagccatcaatcaggaaagccgggttagtaaagcagttgaagtgatgattcagcacgtagaaaacttgaagaggatgtatgccaaagagcacgctgaattagaagaactgaaacaggttcttctgcagaatgaaaggtctttcaatcctcttgaagatgatgatgactgccaaattaaaaaacgttcagcttctctaaactccaagccatcttctctacgaagagtgactattgcctctttacccagaaatattggaaatgcaggaatggtggctgggatggaaaataatgatcgattcagtagaaggtcaagcagttggcgtattttggggtcaaagcagagtgaacaccgtccctcattacctcgatttattagcacctattcctgggcagatgctgaagaagaaaaatgtgaactaaaaactaaagatgactcagagccatctggagaagaaacagtagaaaggacaaggaagccaagtctttctgaaaagaaaaataatccatcaaagtgggatgtctcttcagtttatgacacaatagcttcctgggcaacaaatctcaagtcctccatcagaaaggctaataaggccctctggctctctattgcattcattgtactgtttgcagctttgatgagcttcctcacaggccaattattccagaagtctgtggatgccgctcccacacagcaagaggactcatggacgtctctagaacatatcttgtggccatttaccagactccgacacaatgggccaccaccagtgtgacagcaggacatcctaatatatggatcttgatttttaagtttcagtatctgaacttcgtaaattagtaacttttagctgggaaagtatagcatgaaaccagaggttctcagaatgactgtaagatagcttacatttcctctttttgcctttatctccccaactaaaatacaatggg

SEQ ID NO: 150052 - DNA, 2715 bp, Homo sapiens
  Payload ID: 9633
  Gene Symbol: LRMP
  Gene Name: lymphoid-restricted membrane protein
  ENST ID: ENST00000361433
  CDS Start-End: 1070-2116
gatgctgtcaaccaggaaggcatccttaggaagaggctccaagaaaccagccaacggctggaggatgtggaggagcaggtagggtggctcatggctacattagattcaggggacatctcctcagatgccctgcaaaccatgaaataaaaatggaggaggaacaacaacaacaaacaaaaaaaaaaagcaaagaggaactgcaagttcagtccctagcgactaacagtgagcagaggaagtaaagggggagttgtaagagaggcggtatcaacagcctgctgatgaaagaggcgactctgcagaaagaggcaacttgacatatcaggactttaaccgctgtagaaatagctcaggcataccaagcccatgcaaacacagaattgcagaagttcaggagaggcttatcacttccctgagaagaaaaacacattttcagttttgcctgcatcataagagtgagcactccattgctttctttcctggccacactgctacaatccagcactaactatccatgtccagggtaaggatcgagatcgagaagcccacactgccagtgaaaaagctacgtctttactgcataaattagaggaagcaatttcggaacaacggaaccttcaaactataaatactgaattatcgaacacttgccaggcacttcagcagaagacaaggaaactgaagaagctttttagatgaggaatttcctcactatgattccctgtcctgcgcagatgcaattcaacaacctcttcaagaaaaattgaagcagtgttgccacaaactatatggtggtcaagaagcaagaatacatcagacacccctgaccttgaaacatacgtgctggtacacacctctgctggatgccttatctctggatagttttacagcagttccaaccctggaatcaacacctttctcaggtgtagccaaccaaatccacactctgtgtgaaaggcccacatatggagaagtaaaggatggtgctttggatgtaaaaagacaacacaagtgcccaggccccacaagtggccccagcccaggaacgaatctctcaggctgcatcaggatgaatgatgacccaagtatggaagagaatggtgttgaacgcgtgtgtcctgagagcctgctgcagtccagggaatattcctcactaccattacccagacacacttcatcgacagacggtactataacttcaagtgatcctggattagaaattctgaatatggcttcttgtgaccttgacagaaactcgctctgtaagaaagaggaggatacaagatcagcttctcccacgatagaggcccaaggcacaagtccagctcatgataatattgcattccaagactctacgagtaaggataaaaccatattaaatctggaagccaaagaggaaccagaaacaatagaagaacataaaaaagaacatgcttcaggagactctgtggtttcccctcttcctgtaaccactgtgaaatcggttaaccttagacaaagtgagaacacttctgctaatgagaaggaggtggaggcagaatttctcagattatctttgggatttaagtgtgactggtttaccttggagaagagagtgaagcttgaagagaggtcccgtgacttggcagaagaaaatttgaagaaagaaatcactaactgtttaaaactattagagtctttaacacctctgtgtgaagatgacaaccaggcacaggaaatcattaagaagctggagaagagtataaagtttcttagccagtgtgcagcacgagtggccagtagggctgagatgttgggagccatcaatcaggaaagccgggttagtaaagcagttgaagtgatgattcagcacgtagaaaacttgaagaggatgtatgccaaagagcacgctgaattagaagaactgaaacaggttcttctgcagaatgaaaggtctttcaatcctcttgaagatgatgatgactgccaaattaaaaaacgttcagcttctctaaactccaagccatcttctctacgaagagtgactattgcctctttacccagaaatattggaaatgcaggaatggtggctgggatggaaaataatgatcgattcagtagaaggtcaagcagttgaactaaagatgactcagagccatctggagaagaaacagtagaaaggacaaggaagccaagtctttctgaaaagaaaaataatccatcaaagtgggatgtctcttcagtttatgacacaatagcttcctgggcaacaaatctcaagtcctccatcagaaaggctaataaggccctctggctctctattgcattcattgtactgtttgcagctttgatgagcttcctcacaggccaattattccagaagtctgtggatgccgctcccacacagcaagaggactcatggacgtctctagaacatatcttgtggccatttaccagactccgacacaatgggccaccaccagtgtgacagcaggacatcctaatatatggatcttgatttttaagtttcagtatctgaacttcgtaaattagtaacttttagctgggaaagtatagcatgaaaccagaggttctcagaatgactgtaagatagcttacatttcctctttttgcctttatctccccaactaaaatacaatggggaagaagtctgcctatgatctttgaatgagctttttaaggaagaaatattatatattgtttgttaaagtttat

SEQ ID NO: 150053 - DNA, 2120 bp, Homo sapiens
  Payload ID: 9633
  Gene Symbol: LRMP
  Gene Name: lymphoid-restricted membrane protein
  ENST ID: ENST00000536173
  CDS Start-End: 506-1846
gacatatcaggactttaaccgctgtagaaatagctcaggcataccaagcccatgcaaacacagaattgcagaagttcaggagaggcttatcacttccctgagaagaaaaacacattttcagttttgcctgcatcataagagtgagcactccattgctttctttcctggccacactgctacaatccagcactaactatccatgtccagggtaaggatcgagatcgagaagcccacactgccagtgaaaaagctacgtctttactgcataaattagaggaagcaatttcggaacaacggaaccttcaaactataaatactgaattatcgaacacttgccaggcacttcagcagaagacaaggaaactgaagagagaatggtgttgaacgcgtgtgtcctgagagcctgctgcagtccagggaatattcctcactaccattacccagacacacttcatcgacagacggtactataacttcaagtgatcctggattagaaattctgaatatggcttcttgtgaccttgacagaaactcgctctgtaagaaagaggaggatacaagatcagcttctcccacgatagaggcccaaggcacaagtccagctcatgataatattgcattccaagactctacgagtaaggataaaaccatattaaatctggaagccaaagaggaaccagaaacaatagaagaacataaaaaagaacatgcttcaggagactctgtggtttcccctcttcctgtaaccactgtgaaatcggttaaccttagacaaagtgagaacacttctgctaatgagaaggaggtggaggcagaatttctcagattatctttgggatttaagtgtgactggtttaccttggagaagagagtgaagcttgaagagaggtcccgtgacttggcagaagaaaatttgaagaaagaaatcactaactgtttaaaactattagagtctttaacacctctgtgtgaagatgacaaccaggcacaggaaatcattaagaagctggagaagagtataaagtttcttagccagtgtgcagcacgagtggccagtagggctgagatgttgggagccatcaatcaggaaagccgggttagtaaagcagttgaagtgatgattcagcacgtagaaaacttgaagaggatgtatgccaaagagcacgctgaattagaagaactgaaacaggttcttctgcagaatgaaaggtctttcaatcctcttgaagatgatgatgactgccaaattaaaaaacgttcagcttctctaaactccaagccatcttctctacgaagagtgactattgcctctttacccagaaatattggaaatgcaggaatggtggctgggatggaaaataatgatcgattcagtagaaggtcaagcagttggcgtattttggggtcaaagcagagtgaacaccgtccctcattacctcgatttattagcacctattcctgggcagatgctgaagaagaaaaatgtgaactaaaaactaaagatgactcagagccatctggagaagaaacagtagaaaggacaaggaagccaagtctttctgaaaagaaaaataatccatcaaagtgggatgtctcttcagtttatgacacaatagcttcctgggcaacaaatctcaagtcctccatcagaaaggctaataaggccctctggctctctattgcattcattgtactgtttgcagctttgatgagcttcctcacaggccaattattccagaagtctgtggatgccgctcccacacagcaagaggactcatggacgtctctagaacatatcttgtggccatttaccagactccgacacaatgggccaccaccagtgtgacagcaggacatcctaatatatggatcttgatttttaagtttcagtatctgaacttcgtaaattagtaacttttagctgggaaagtatagcatgaaaccagaggttctcagaatgactgtaagatagcttacatttcctctttttgcctttatctccccaactaaaatacaatggggaagaagtctgcctatgatctttgaatgagctttttaaggaagaaatattatatattgtttgttaaagtttattgaaataaagaatcatttaaatcttc

SEQ ID NO: 150054 - DNA, 2193 bp, Homo sapiens
  Payload ID: 9633
  Gene Symbol: LRMP
  Gene Name: lymphoid-restricted membrane protein
  Uniprot ID: Q12912
  ENST ID: ENST00000548766
  CDS Start-End: 549-2048
aaacacagaattgcagaagttcaggagaggcttatcacttccctgagaagaaaaacacattttcagttttgcctgcatcataagagtgagcactccattgctttctttcctggccacactgctacaatccagcactaactatccatgtccagggtaaggatcgagatcgagaagcccacactgccagtgaaaaagctacgtctttactgcataaattagaggaagcaatttcggaacaacggaaccttcaaactataaatactgaattatcgaacacttgccaggcacttcagcagaagacaaggaaactgaagaagctttttagatgaggaatttcctcactatgattccctgtcctgcgcagatgcaattcaacaacctcttcaagaaaaattgcagtgttgccacaaactatatggtggtcaagaagcaagaatacatcagacacccctgaccttgaaacatacgtgctggtacacacctctgctgggtgcccaggccccacaagtggccccagcccaggaacgaatctctcaggctgcatcaggatgaatgatgacccaagtatggaagagaatggtgttgaacgcgtgtgtcctgagagcctgctgcagtccagggaatattcctcactaccattacccagacacacttcatcgacagacggtactataacttcaagtgatcctggattagaaattctgaatatggcttcttgtgaccttgacagaaactcgctctgtaagaaagaggaggatacaagatcagcttctcccacgatagaggcccaaggcacaagtccagctcatgataatattgcattccaagactctacgagtaaggataaaaccatattaaatctggaagccaaagaggaaccagaaacaatagaagaacataaaaaagaacatgcttcaggagactctgtggtttcccctcttcctgtaaccactgtgaaatcggttaaccttagacaaagtgagaacacttctgctaatgagaaggaggtggaggcagaatttctcagattatctttgggatttaagtgtgactggtttaccttggagaagagagtgaagcttgaagagaggtcccgtgacttggcagaagaaaatttgaagaaagaaatcactaactgtttaaaactattagagtctttaacacctctgtgtgaagatgacaaccaggcacaggaaatcattaagaagctggagaagagtataaagtttcttagccagtgtgcagcacgagtggccagtagggctgagatgttgggagccatcaatcaggaaagccgggttagtaaagcagttgaagtgatgattcagcacgtagaaaacttgaagaggatgtatgccaaagagcacgctgaattagaagaactgaaacaggttcttctgcagaatgaaaggtctttcaatcctcttgaagatgatgatgactgccaaattaaaaaacgttcagcttctctaaactccaagccatcttctctacgaagagtgactattgcctctttacccagaaatattggaaatgcaggaatggtggctgggatggaaaataatgatcgattcagtagaaggtcaagcagttggcgtattttggggtcaaagcagagtgaacaccgtccctcattacctcgatttattagcacctattcctgggcagatgctgaagaagaaaaatgtgaactaaaaactaaagatgactcagagccatctggagaagaaacagtagaaaggacaaggaagccaagtctttctgaaaagaaaaataatccatcaaagtgggatgtctcttcagtttatgacacaatagcttcctgggcaacaaatctcaagtcctccatcagaaaggctaataaggccctctggctctctattgcattcattgtactgtttgcagctttgatgagcttcctcacaggccaattattccagaagtctgtggatgccgctcccacacagcaagaggactcatggacgtctctagaacatatcttgtggccatttaccagactccgacacaatgggccaccaccagtgtgacagcaggacatcctaatatatggatcttgatttttaagtttcagtatctgaacttcgtaaattagtaacttttagctgggaaagtatagcatgaaaccagaggttctcagaatgactgtaagatagcttacatttcctctttttg

SEQ ID NO: 150055 - DNA, 1426 bp, Homo sapiens
  Payload ID: 9633
  Gene Symbol: LRMP
  Gene Name: lymphoid-restricted membrane protein
  ENST ID: ENST00000550945
  CDS Start-End: 1071-1426
agatgctgtcaaccaggaaggcatccttaggaagaggctccaagaaaccagccaacggctggaggatgtggaggagcaggtagggtggctcatggctacattagattcaggggacatctcctcagatgccctgcaaaccatgaaataaaaatggaggaggaacaacaacaacaaacaaaaaaaaaaagcaaagaggaactgcaagttcagtccctagcgactaacagtgagcagaggaagtaaagggggagttgtaagagaggcggtatcaacagcctgctgatgaaagaggcgactctgcagaaagaggcaacttgacatatcaggactttaaccgctgtagaaatagctcaggcataccaagcccatgcaaacacagaattgcagaagttcaggagaggcttatcacttccctgagaagaaaaacacattttcagttttgcctgcatcataagagtgagcactccattgctttctttcctggccacactgctacaatccagcactaactatccatgtccagggtaaggatcgagatcgagaagcccacactgccagtgaaaaagctacgtctttactgcataaattagaggaagcaatttcggaacaacggaaccttcaaactataaatactgaattatcgaacacttgccaggcacttcagcagaagacaaggaaactgaagaagctttttagatgaggaatttcctcactatgattccctgtcctgcgcagatgcaattcaacaacctcttcaagaaaaattgaagcagtgttgccacaaactatatggtggtcaagaagcaagaatacatcagacacccctgaccttgaaacatacgtgctggtacacacctctgctggatgccttatctctggatagttttacagcagttccaaccctggaatcaacacctttctcaggtgtagccaaccaaatccacactctgtgtgaaaggcccacatatggagaagtaaaggatggtgctttggatgtaaaaagacaacacaagtgcccaggccccacaagtggccccagcccaggaacgaatctctcaggctgcatcaggatgaatgatgacccaagtatggaagagaatggtgttgaacgcgtgtgtcctgagagcctgctgcagtccagggaatattcctcactaccattacccagacacacttcatcgacagacggtactataacttcaagtgatcctggattagaaattctgaatatggcttcttgtgaccttgacagaaactcgctctgtaagaaagaggaggatacaagatcagcttctcccacgatagaggcccaaggcacaagtccagctcatgataatattgcattccaagactctacgagtaaggataaaaccatattaaatctggaagccaaagaggaaccagaaacaatagaagaacataaaaa

SEQ ID NO: 150056 - DNA, 2208 bp, Homo sapiens
  Payload ID: 9633
  Gene Symbol: LRMP
  Gene Name: lymphoid-restricted membrane protein
  Uniprot ID: Q12912
  ENST ID: ENST00000547044
  CDS Start-End: 521-2020
tgctttctttcctggccacactgctacaatccagcactaactatccatgtccagggtaaggatcgagatcgagaagcccacactgccagtgaaaaagctacgtctttactgcataaattagaggaagcaatttcggaacaacggaaccttcaaactataaatactgaattatcgaacacttgccaggcacttcagcagaagacaaggaaactgaagaaagcagtgttgccacaaactatatggtggtcaagaagcaagaatacatcagacacccctgaccttgaaacatacgtgctggtacacacctctgctggatgccttatctctggatagttttacagcagttccaaccctggaatcaacacctttctcaggtgtagccaaccaaatccacactctgtgtgaaaggcccacatatggagaagtaaaggatggtgctttggatgtaaaaagacaacacaagtgcccaggccccacaagtggccccagcccaggaacgaatctctcaggctgcatcaggatgaatgatgacccaagtatggaagagaatggtgttgaacgcgtgtgtcctgagagcctgctgcagtccagggaatattcctcactaccattacccagacacacttcatcgacagacggtactataacttcaagtgatcctggattagaaattctgaatatggcttcttgtgaccttgacagaaactcgctctgtaagaaagaggaggatacaagatcagcttctcccacgatagaggcccaaggcacaagtccagctcatgataatattgcattccaagactctacgagtaaggataaaaccatattaaatctggaagccaaagaggaaccagaaacaatagaagaacataaaaaagaacatgcttcaggagactctgtggtttcccctcttcctgtaaccactgtgaaatcggttaaccttagacaaagtgagaacacttctgctaatgagaaggaggtggaggcagaatttctcagattatctttgggatttaagtgtgactggtttaccttggagaagagagtgaagcttgaagagaggtcccgtgacttggcagaagaaaatttgaagaaagaaatcactaactgtttaaaactattagagtctttaacacctctgtgtgaagatgacaaccaggcacaggaaatcattaagaagctggagaagagtataaagtttcttagccagtgtgcagcacgagtggccagtagggctgagatgttgggagccatcaatcaggaaagccgggttagtaaagcagttgaagtgatgattcagcacgtagaaaacttgaagaggatgtatgccaaagagcacgctgaattagaagaactgaaacaggttcttctgcagaatgaaaggtctttcaatcctcttgaagatgatgatgactgccaaattaaaaaacgttcagcttctctaaactccaagccatcttctctacgaagagtgactattgcctctttacccagaaatattggaaatgcaggaatggtggctgggatggaaaataatgatcgattcagtagaaggtcaagcagttggcgtattttggggtcaaagcagagtgaacaccgtccctcattacctcgatttattagcacctattcctgggcagatgctgaagaagaaaaatgtgaactaaaaactaaagatgactcagagccatctggagaagaaacagtagaaaggacaaggaagccaagtctttctgaaaagaaaaataatccatcaaagtgggatgtctcttcagtttatgacacaatagcttcctgggcaacaaatctcaagtcctccatcagaaaggctaataaggccctctggctctctattgcattcattgtactgtttgcagctttgatgagcttcctcacaggccaattattccagaagtctgtggatgccgctcccacacagcaagaggactcatggacgtctctagaacatatcttgtggccatttaccagactccgacacaatgggccaccaccagtgtgacagcaggacatcctaatatatggatcttgatttttaagtttcagtatctgaacttcgtaaattagtaacttttagctgggaaagtatagcatgaaaccagaggttctcagaatgactgtaagatagcttacatttcctctttttgcctttatctccccaactaaaatacaatggggaagaagtctgcc

SEQ ID NO: 150057 - DNA, 785 bp, Homo sapiens
  Payload ID: 9633
  Gene Symbol: LRMP
  Gene Name: lymphoid-restricted membrane protein
  ENST ID: ENST00000554942
  CDS Start-End: 556-785
attttcagttttgcctgcatcataagagtgagcactccattgctttctttcctggccacactgctacaatccagcactaactatccatgtccagggtaaggatcgagatcgagaagcccacactgccagtgaaaaagctacgtctttactgcataaattagaggaagcaatttcggaacaacggaaccttcaaactataaatactgaattatcgaacacttgccaggcacttcagcagaagacaaggaaactgaagacaacaattgagtcacttcaaaaggagttcattgaaggggaacaccatggcttgctgtttcagagctttttagatgaggaatttcctcactatgattccctgtcctgcgcagatgcaattcaacaacctcttcaagaaaaattgaagcagtgttgccacaaactatatggtggtcaagaagcaagaatacatcagacacccctgaccttgaaacatacgtgctggtacacacctctgctgggtgcccaggccccacaagtggccccagcccaggaacgaatctctcaggctgcatcaggatgaatgatgacccaagtatggaagagaatggtgttgaacgcgtgtgtcctgagagcctgctgcagtccagggaatattcctcactaccattacccagacacacttcatcgacagacggtactataacttcaagtgatcctggattagaaattctgaatatggcttcttgtgaccttgacagaaactcgctctgtaagaaagaggaggatacaagatcagcttctcccac

SEQ ID NO: 150058 - DNA, 463 bp, Homo sapiens
  Payload ID: 9633
  Gene Symbol: LRMP
  Gene Name: lymphoid-restricted membrane protein
  ENST ID: ENST00000555885
  CDS Start-End: 1-209
atgagaaggaggtggaggcagaatttctcagattatctttgggatttaagtgtgactggtttaccttggagaagagagtgaagcttgaagagaggtcccgtgacttggcagaagaaaatttgaagaaagaaatcactaactgtttaaaactattagaggcagaaaaggaatcatacagaaaactgagcaataggaaatatcaattttaagcttcaaagaagagaatcgagtctatttccatttatgattaactgaggaaagagaatggtaactgattcagtcttgcagatgatgggcaagcctgctgtagggtactgagagaagaatgggggtgcagaggagtgtaacaactactattatccttccatatggtgaagttaccatacatttagagatgagctggaaaattagtaggcttagttttggatgaaggacattaaaattgagaaaccatggaaaagaa

SEQ ID NO: 150059 - DNA, 759 bp, Homo sapiens
  Payload ID: 9633
  Gene Symbol: LRMP
  Gene Name: lymphoid-restricted membrane protein
  ENST ID: ENST00000556887
  CDS Start-End: 736-759
ggagaggcttatcacttccctgagaagaaaaacacattttcagttttgcctgcatcataagagtgagcactccattgctttctttcctggccacactgctacaatccagcactaactatccatgtccagggtaaggatcgagatcgagaagcccacactgccagtgaaaaagctacgtctttactgcataaattagaggaagcaatttcggaacaacggaaccttcaaactataaatactgaattatcgaacacttgccaggcacttcagcagaagacaaggaaactgaagacaacaattgagtcacttcaaaaggagttcattgaaggggaacaccatggcttgctgtttcagagctttttagatgaggaatttcctcactatgattccctgtcctgcgcagatgcaattcaacaacctcttcaagaaaaattgcagtgttgccacaaactatatggtggtcaagaagcaagaatacatcagacacccctgaccttgaaacatacgtgctggtacacacctctgctggatgccttatctctggatagttttacagcagttccaaccctggaatcaacacctttctcaggtgtagccaaccaaatccacactctgtgtgaaaggcccacatatggagaagtaaaggatggtgctttggatgtaaaaagacaacacaagtgcccaggccccacaagtggccccagcccaggaacgaatctctcaggctgcatcaggatgaatgatgacccaagtatggaa

SEQ ID NO: 150060 - DNA, 846 bp, Homo sapiens
  Payload ID: 9633
  Gene Symbol: LRMP
  Gene Name: lymphoid-restricted membrane protein
  ENST ID: ENST00000554272
  CDS Start-End: 456-644
ggaaactgaagacaacaattgagtcacttcaaaaggagttcattgaaggggaacaccatggcttgctgtttcagagctttttagatgaggaatttcctcactatgattccctgtcctgcgcagatgcaattcaacaacctcttcaagaaaaattgcagtgttgccacaaactatatggtggtcaagaagcaagaatacatcagacacccctgaccttgaaacatacgtgctggtacacacctctgctggatgccttatctctggatagttttacagcagttccaaccctggaatcaacacctttctcaggtgtagccaaccaaatccacactctgtgtgaaaggcccacatatggagaagtaaaggatggtgctttggatgtaaaaagacaacacaagtgcccaggccccacaagtggccccagcccaggaacgaatctctcaggctgcatcaggatgaatgatgacccaagtatggaagagaatggtgttgaacgcgtgtgtcctgagagcctgctgcagtccagggaatattcctcactaccattacccagacacacttcatcgacagacggtactataacttcaagtgaaactcgctctgtaagaaagaggaggatacaagatcagcttctcccacgatagaggcccaaggcacaagtccagctcatgataatattgcattccaagactctacgagtaaggataaaaccatattaaatctggaagccaaagaggaaccagaaacaatagaagaacataaaaaagaacatgcttcaggagactctgtggtttcccctcttcctgtaaccactgtgaaatcggttaaccttagacaaagtgagaa

SEQ ID NO: 150061 - DNA, 888 bp, Homo sapiens
  Payload ID: 9633
  Gene Symbol: LRMP
  Gene Name: lymphoid-restricted membrane protein
  ENST ID: ENST00000555877
  CDS Start-End: 1-292
tgacaaccaggcacaggaaatcattaagaagctggagaagagtataaagtttcttagccagtgtgcagcacgagtggccagtagggctgagatgttgggagccatcaatcaggaaagccgggttagtaaagcagttgaagtgatgattcagcacgtagaaaacttgaagaggatgtatgccaaagagcacgctgaattagaagaactgaaacaggttcttctgcagaatgaaaggtctttcaatcctcttgaagatgatgcagacacacatgtagtgcctaccctgtgctagctaggcattatggacatcacagtgacacagaggactgtattccattggttaagatgatgactgccaaattaaaaaacgttcagcttctctaaactccaagccatcttctctacgaagagtgactattgcctctttacccagaaatattggaaatgcaggaatggtggctgggatggaaaataatgatcgattcagtagaaggtcaagcagttggcgtattttggggtcaaagcagagtgaacaccgtccctcattacctcgatttattagcacctattcctgggcagatgctgaagaagaaaaatgtgaactaaaaactaaagatgactcagagccatctggagaagaaacagtagaaaggacaaggaagccaagtctttctgaaaagaaaaataatccatcaaagtgggatgtctcttcagtttatgacacaatagcttcctgggcaacaaatctcaagtcctccatcagaaaggctaataaggccctctggctctctattgcattcattgtactgtttgcagctttgatgagcttcctcacaggccaattattccagaagtctgtggatgccgctcccacacagcaagaggact

SEQ ID NO: 150062 - DNA, 1253 bp, Homo sapiens
  Payload ID: 9633
  Gene Symbol: LRMP
  Gene Name: lymphoid-restricted membrane protein
  ENST ID: ENST00000557489
  CDS Start-End: 892-1253
aaagggggagttgtaagagaggcggtatcaacagcctgctgatgaaagaggcgactctgcagaaagaggcaacttgacatatcaggactttaaccgctgtagaaatagctcaggcataccaagcccatgcaaacacagaattgcagaagttcaggagaggcttatcacttccctgagaagaaaaacacattttcagttttgcctgcatcataagagtgagcactccattgctttctttcctggccacactgctacaatccagcactaactatccatgtccagggtaaggatcgagatcgagaagcccacactgccagtgaaaaagctacgtctttactgcataaattagaggaagcaatttcggaacaacggaaccttcaaactataaatactgaattatcgaacacttgccaggcacttcagcagaagacaaggaaactgaagacaacaattgagtcacttcaaaaggagttcattgaaggggaacaccatggcttgctgtttcagagctttttagatgaggaatttcctcactatgattccctgtcctgcgcagatgcaattcaacaacctcttcaagaaaaattgaagcagtgttgccacaaactatatggtggtcaagaagcaagaatacatcagacacccctgaccttgaaacatacgtgctggtacacacctctgctggatgccttatctctggatagttttacagcagttccaaccctggaatcaacacctttctcaggtgtagccaaccaaatccacactctgtgtgaaaggcccacatatggagaagtaaaggatggtgctttggatgtaaaaagacaacacaagtgcccaggccccacaagtggccccagcccaggaacgaatctctcaggctgcatcaggatgaatgatgacccaagtatggaagagaatggtgttgaacgcgtgtgtcctgagagcctgctgcagtccagggaatattcctcactaccattacccagacacacttcatcgacagacggtactataacttcaagtgatcctggattagaaattctgaatatggcttcttgtgaccttgacagaaactcgctctgtaagaaagaggaggatacaagatcagcttctcccacgatagaggcccaaggcacaagtccagctcatgataatattgcattccaagactctacgagtaaggataaaaccatattaaatctggaagccaaagaggaaccagaaacaatagaagaacataaaaaagaaca

SEQ ID NO: 150063 - DNA, 1507 bp, Homo sapiens
  Payload ID: 9634
  Gene Symbol: LTA
  Gene Name: lymphotoxin alpha
  ENST ID: ENST00000383303
  CDS Start-End: 259-876
tcccagcccacgattcccctgacccgactccctttcccagaactcagtcgcctgaacccccagcctgtggttctctcctaggcctcagcctttcctgcctttgactgaaacagcagtatcttctaagccctgggggcttccccgggccccagccccgacctagaacccgcccgctgcctgccacgctgccactgccgcttcctctataaagggacctgagcgtccgggcccaggggctccacacagcaggttctccccatgacaccacctgaacgtctcttcctcccaagggtgtgtggcaccaccctacacctcctccttctggggctgctgctggttctgctgcctggggcccaggggctccctggtgttggcctcacaccttcagctgcccagactgcccgtcagcaccccaagatgcatcttgcccacagcaacctcaaacctgctgctcacctcattggagaccccagcaagcagaactcactgctctggagagcaaacacggaccgtgccttcctccaggatggtttctccttgagcaacaattctctcctggtccccaccagtggcatctacttcgtctactcccaggtggtcttctctgggaaagcctactctcccaaggccacctcctccccactctacctggcccatgaggtccagctcttctcctcccagtaccccttccatgtgcctctcctcagctcccagaagatggtgtatccagggctgcaggaaccctggctgcactcgatgtaccacggggctgcgttccagctcacccagggagaccagctatccacccacacagatggcatcccccacctagtcctcagccctagtactgtcttctttggagccttcgctctgtagaacttggaaaaatccagaaagaaaaaataattgatttcaagaccttctccccattctgcctccattctgaccatttcaggggtcgtcaccacctctcctttggccattccaacagctcaagtcttccctgatcaagtcaccggagctttcaaagaaggaattctaggcatcccaggggaccacacctccctgaaccatccctgatgtctgtctggctgaggatttcaagcctgcctaggaattcccagcccaaagctgttggtctgtcccaccagctaggtggggcctagatccacacacagaggaagagcaggcacatggaggagcttgggggatgactagaggcagggaggggactatttatgaaggcaaaaaaattaaattatttatttatggaggatggagagaggggaataatagaagaacatccaaggagaaacagagacaggcccaagagatgaagagtgagagggcatgcgcacaaggctgaccaagagagaaagaagtaggcatgagggatcacagggccccagaaggcagggaaaggctctgaaagccagctgccgaccagagccccacacggaggcatctgcaccctcgatgaagcccaataaacctcttttctctgaaa

SEQ ID NO: 150064 - DNA, 1422 bp, Homo sapiens
  Payload ID: 9634
  Gene Symbol: LTA
  Gene Name: lymphotoxin alpha
  ENST ID: ENST00000383304
  CDS Start-End: 174-791
ccaggggctccacacagcaggtgaggctctcctgccccatctccttgggctgcccgtgcttcgtgctttggactaccgccccgcagtgtcctgccctctgcctgggcctcggtccctcctgcacctgctgcctggatccccggcctgcctgggcctgggccttggttctccccatgacaccacctgaacgtctcttcctcccaagggtgtgtggcaccaccctacacctcctccttctggggctgctgctggttctgctgcctggggcccaggggctccctggtgttggcctcacaccttcagctgcccagactgcccgtcagcaccccaagatgcatcttgcccacagcaacctcaaacctgctgctcacctcattggagaccccagcaagcagaactcactgctctggagagcaaacacggaccgtgccttcctccaggatggtttctccttgagcaacaattctctcctggtccccaccagtggcatctacttcgtctactcccaggtggtcttctctgggaaagcctactctcccaaggccacctcctccccactctacctggcccatgaggtccagctcttctcctcccagtaccccttccatgtgcctctcctcagctcccagaagatggtgtatccagggctgcaggaaccctggctgcactcgatgtaccacggggctgcgttccagctcacccagggagaccagctatccacccacacagatggcatcccccacctagtcctcagccctagtactgtcttctttggagccttcgctctgtagaacttggaaaaatccagaaagaaaaaataattgatttcaagaccttctccccattctgcctccattctgaccatttcaggggtcgtcaccacctctcctttggccattccaacagctcaagtcttccctgatcaagtcaccggagctttcaaagaaggaattctaggcatcccaggggaccacacctccctgaaccatccctgatgtctgtctggctgaggatttcaagcctgcctaggaattcccagcccaaagctgttggtctgtcccaccagctaggtggggcctagatccacacacagaggaagagcaggcacatggaggagcttgggggatgactagaggcagggaggggactatttatgaaggcaaaaaaattaaattatttatttatggaggatggagagaggggaataatagaagaacatccaaggagaaacagagacaggcccaagagatgaagagtgagagggcatgcgcacaaggctgaccaagagagaaagaagtaggcatgagggatcacagggccccagaaggcagggaaaggctctgaaagccagctgccgaccagagccccacacggaggcatctgcaccctcgatgaagcccaataaacctcttttctctgaaa

SEQ ID NO: 150065 - DNA, 1422 bp, Homo sapiens
  Payload ID: 9634
  Gene Symbol: LTA
  Gene Name: lymphotoxin alpha
  ENST ID: ENST00000383499
  CDS Start-End: 174-791
ccaggggctccgcacagcaggtgaggctctcctgccccatctccttgggctgcccgtgcttcgtgctttggactaccgccccgcagtgtcctgccctctgcctgggcctcggtccctcctgcacctgctgcctggatccccggcctgcctgggcctgggccttggttctccccatgacaccacctgaacgtctcttcctcccaagggtgcgtggcaccaccctacacctcctccttctggggctgctgctggttctgctgcctggggcccaggggctccctggtgttggcctcacaccttcagctgcccagactgcccgtcagcaccccaagatgcatcttgcccacagcaccctcaaacctgctgctcacctcattggagaccccagcaagcagaactcactgctctggagagcaaacacggaccgtgccttcctccaggatggtttctccttgagcaacaattctctcctggtccccaccagtggcatctacttcgtctactcccaggtggtcttctctgggaaagcctactctcccaaggccacctcctccccactctacctggcccatgaggtccagctcttctcctcccagtaccccttccatgtgcctctcctcagctcccagaagatggtgtatccagggctgcaggaaccctggctgcactcgatgtaccacggggctgcgttccagctcacccagggagaccagctatccacccacacagatggcatcccccacctagtcctcagccctagtactgtcttctttggagccttcgctctgtagaacttggaaaaatccagaaagaaaaaataattgatttcaagaccttctccccattctgcctccattctgaccatttcaggggtcgtcaccacctctcctttggccattccaacagctcaagtcttccctgatcaagtcaccggagctttcaaagaaggaattctaggcatcccaggggaccacacctccctgaaccatccctgatgtctgtctggctgaggatttcaagcctgcctaggaattcccagcccaaagctgttggtctgtcccaccagctaggtggggcctagatccacacacagaggaagagcaggcacatggaggagcttgggggatgactagaggcagggaggggactatttatgaaggcaaaaaaattaaattatttatttatggaggatggagagaggggaataatagaagaacatccaaggagaaacagagacaggcccaagagatgaagagtgagagggcatgcgcacaaggctgaccaagagagaaagaagtaggcatgagggatcacagggccccagaaggcagggaaaggctctgaaagccagctgccgaccagagccccacacggaggcatctgcaccctcgatgaagcccaataaacctcttttctctgaaa

SEQ ID NO: 150066 - DNA, 1507 bp, Homo sapiens
  Payload ID: 9634
  Gene Symbol: LTA
  Gene Name: lymphotoxin alpha
  ENST ID: ENST00000400272
  CDS Start-End: 259-876
tcccagcccacgattcccctgacccgactccctttcccagaactcagtcgcctgaacccccagcctgtggttctctcctaggcctcagcctttcctgcctttgactgaaacagcagtatcttctaagccctgggggcttccccgggccccagccccgacctagaacccgcccgctgcctgccacgctgccactgccgcttcctctataaagggacctgagcgtccgggcccaggggctccgcacagcaggttctccccatgacaccacctgaacgtctcttcctcccaagggtgcgtggcaccaccctacacctcctccttctggggctgctgctggttctgctgcctggggcccaggggctccctggtgttggcctcacaccttcagctgcccagactgcccgtcagcaccccaagatgcatcttgcccacagcaccctcaaacctgctgctcacctcattggagaccccagcaagcagaactcactgctctggagagcaaacacggaccgtgccttcctccaggatggtttctccttgagcaacaattctctcctggtccccaccagtggcatctacttcgtctactcccaggtggtcttctctgggaaagcctactctcccaaggccacctcctccccactctacctggcccatgaggtccagctcttctcctcccagtaccccttccatgtgcctctcctcagctcccagaagatggtgtatccagggctgcaggaaccctggctgcactcgatgtaccacggggctgcgttccagctcacccagggagaccagctatccacccacacagatggcatcccccacctagtcctcagccctagtactgtcttctttggagccttcgctctgtagaacttggaaaaatccagaaagaaaaaataattgatttcaagaccttctccccattctgcctccattctgaccatttcaggggtcgtcaccacctctcctttggccattccaacagctcaagtcttccctgatcaagtcaccggagctttcaaagaaggaattctaggcatcccaggggaccacacctccctgaaccatccctgatgtctgtctggctgaggatttcaagcctgcctaggaattcccagcccaaagctgttggtctgtcccaccagctaggtggggcctagatccacacacagaggaagagcaggcacatggaggagcttgggggatgactagaggcagggaggggactatttatgaaggcaaaaaaattaaattatttatttatggaggatggagagaggggaataatagaagaacatccaaggagaaacagagacaggcccaagagatgaagagtgagagggcatgcgcacaaggctgaccaagagagaaagaagtaggcatgagggatcacagggccccagaaggcagggaaaggctctgaaagccagctgccgaccagagccccacacggaggcatctgcaccctcgatgaagcccaataaacctcttttctctgaaa

SEQ ID NO: 150067 - DNA, 1422 bp, Homo sapiens; identical to SEQ ID NO: 150065
  Payload ID: 9634
  Gene Symbol: LTA
  Gene Name: lymphotoxin alpha
  ENST ID: ENST00000441939
  CDS Start-End: 174-791

SEQ ID NO: 150068 - DNA, 1507 bp, Homo sapiens; identical to SEQ ID NO: 150066
  Payload ID: 9634
  Gene Symbol: LTA
  Gene Name: lymphotoxin alpha
  ENST ID: ENST00000456789
  CDS Start-End: 259-876

SEQ ID NO: 150069 - DNA, 1507 bp, Homo sapiens
  Payload ID: 9634
  Gene Symbol: LTA
  Gene Name: lymphotoxin alpha
  Uniprot ID: P01374
  ENST ID: ENST00000436519
  CDS Start-End: 259-876
tcccagcccacgattcccctgacccgactccctttcccagaactcagtcgcctgaacccccagcctgtggttctctcctaggcctcagcctttcctgcctttgactgaaacagcagtatcttctaagccctgggggcttccccgggccccagccccgacctagaacccgcccgctgcctgccacgctgccactgccgcttcctctataaagggacctgagcgtccgggcccaggggctccgcacagcaggttctccccatgacaccacctgaacgtctcttcctcccaagggtgtgtggcaccaccctacacctcctccttctggggctgctgctggttctgctgcctggggcccaggggctccctggtgttggcctcacaccttcagctgcccagactgcccgtcagcaccccaagatgcatcttgcccacagcaccctcaaacctgctgctcacctcattggagaccccagcaagcagaactcactgctctggagagcaaacacggaccgtgccttcctccaggatggtttctccttgagcaacaattctctcctggtccccaccagtggcatctacttcgtctactcccaggtggtcttctctgggaaagcctactctcccaaggccacctcctccccactctacctggcccatgaggtccagctcttctcctcccagtaccccttccatgtgcctctcctcagctcccagaagatggtgtatccagggctgcaggaaccctggctgcactcgatgtaccacggggctgcgttccagctcacccagggagaccagctatccacccacacagatggcatcccccacctagtcctcagccctagtactgtcttctttggagccttcgctctgtagaacttggaaaaatccagaaagaaaaaataattgatttcaagaccttctccccattctgcctccattctgaccatttcaggggtcgtcaccacctctcctttggccattccaacagctcaagtcttccctgatcaagtcaccggagctttcaaagaaggaattctaggcatcccaggggaccacacctccctgaaccatccctgatgtctgtctggctgaggatttcaagcctgcctaggaattcccagcccaaagctgttggtctgtcccaccagctaggtggggcctagatccacacacagaggaagagcaggcacatggaggagcttgggggatgactagaggcagggaggggactatttatgaaggcaaaaaaattaaattatttatttatggaggatggagagaggggaataatagaagaacatccaaggagaaacagagacaggcccaagagatgaagagtgagagggcatgcgcacaaggctgaccaagagagaaagaagtaggcatgagggatcacagggccccagaaggcagggaaaggctctgaaagccagctgccgaccagagccccacacggaggcatctgcaccctcgatgaagcccaataaacctcttttctctgaaa

SEQ ID NO: 150070 - DNA, 1507 bp, Homo sapiens; identical to SEQ ID NO: 150069
  Payload ID: 9634
  Gene Symbol: LTA
  Gene Name: lymphotoxin alpha
  Uniprot ID: P01374
  ENST ID: ENST00000426845
  CDS Start-End: 259-876

SEQ ID NO: 150071 - DNA, 1507 bp, Homo sapiens; identical to SEQ ID NO: 150069
  Payload ID: 9634
  Gene Symbol: LTA
  Gene Name: lymphotoxin alpha
  Uniprot ID: P01374
  ENST ID: ENST00000454783
  CDS Start-End: 259-876

SEQ ID NO: 150072 - DNA, 1422 bp, Homo sapiens; identical to SEQ ID NO: 150065
  Payload ID: 9634
  Gene Symbol: LTA
  Gene Name: lymphotoxin alpha
  ENST ID: ENST00000448630
  CDS Start-End: 174-791

SEQ ID NO: 150073 - DNA, 1422 bp, Homo sapiens
  Payload ID: 9634
  Gene Symbol: LTA
  Gene Name: lymphotoxin alpha
  Uniprot ID: P01374
  ENST ID: ENST00000412851
  CDS Start-End: 174-791
ccaggggctccgcacagcaggtgaggctctcctgccccatctccttgggctgcccgtgcttcgtgctttggactaccgcccagcagtgtcctgccctctgcctgggcctcggtccctcctgcacctgctgcctggatccccggcctgcctgggcctgggccttggttctccccatgacaccacctgaacgtctcttcctcccaagggtgtgtggcaccaccctacacctcctccttctggggctgctgctggttctgctgcctggggcccaggggctccctggtgttggcctcacaccttcagctgcccagactgcccgtcagcaccccaagatgcatcttgcccacagcaccctcaaacctgctgctcacctcattggagaccccagcaagcagaactcactgctctggagagcaaacacggaccgtgccttcctccaggatggtttctccttgagcaacaattctctcctggtccccaccagtggcatctacttcgtctactcccaggtggtcttctctgggaaagcctactctcccaaggccacctcctccccactctacctggcccatgaggtccagctcttctcctcccagtaccccttccatgtgcctctcctcagctcccagaagatggtgtatccagggctgcaggaaccctggctgcactcgatgtaccacggggctgcgttccagctcacccagggagaccagctatccacccacacagatggcatcccccacctagtcctcagccctagtactgtcttctttggagccttcgctctgtagaacttggaaaaatccagaaagaaaaaataattgatttcaagaccttctccccattctgcctccattctgaccatttcaggggtcgtcaccacctctcctttggccattccaacagctcaagtcttccctgatcaagtcaccggagctttcaaagaaggaattctaggcatcccaggggaccacacctccctgaaccatccctgatgtctgtctggctgaggatttcaagcctgcctaggaattcccagcccaaagctgttggtctgtcccaccagctaggtggggcctagatccacacacagaggaagagcaggcacatggaggagcttgggggatgactagaggcagggaggggactatttatgaaggcaaaaaaattaaattatttatttatggaggatggagagaggggaataatagaagaacatccaaggagaaacagagacaggcccaagagatgaagagtgagagggcatgcgcacaaggctgaccaagagagaaagaagtaggcatgagggatcacagggccccagaaggcagggaaaggctctgaaagccagctgccgaccagagccccacacggaggcatctgcaccctcgatgaagcccaataaacctcttttctctgaaa

SEQ ID NO: 150074 - DNA, 1422 bp, Homo sapiens; identical to SEQ ID NO: 150073
  Payload ID: 9634
  Gene Symbol: LTA
  Gene Name: lymphotoxin alpha
  Uniprot ID: P01374
  ENST ID: ENST00000418386
  CDS Start-End: 174-791

SEQ ID NO: 150075 - DNA, 1507 bp, Homo sapiens; identical to SEQ ID NO: 150066
  Payload ID: 9634
  Gene Symbol: LTA
  Gene Name: lymphotoxin alpha
  ENST ID: ENST00000432632
  CDS Start-End: 259-876

SEQ ID NO: 150076 - DNA, 1422 bp, Homo sapiens; identical to SEQ ID NO: 150073
  Payload ID: 9634
  Gene Symbol: LTA
  Gene Name: lymphotoxin alpha
  Uniprot ID: P01374
  ENST ID: ENST00000454550
  CDS Start-End: 174-791

SEQ ID NO: 150077 - DNA, 897 bp, Homo sapiens
  Payload ID: 9635
  Gene Symbol: LTB
  Gene Name: lymphotoxin beta (TNF superfamily, member 3)
  Uniprot ID: Q06643
  ENST ID: ENST00000376117
  CDS Start-End: 9-743
cagtctcaatgggggcactggggctggagggcaggggtgggaggctccaggggaggggttccctcctgctagctgtggcaggagccacttctctggtgaccttgttgctggcggtgcctatcactgtcctggctgtgctggccttagtgccccaggatcagggaggactggtaacggagacggccgaccccggggcacaggcccagcaaggactggggtttcagaagctgccagaggaggagccagaaacagatctcagccccgggctcccagctgcccacctcataggcgctccgctgaaggggcaggggctaggctgggagacgacgaaggaacaggcgtttctgacgagcgggacgcagttctcggacgccgaggggctggcgctcccgcaggacggcctctattacctctactgtctcgtcggctaccggggccgggcgccccctggcggcggggacccccagggccgctcggtcacgctgcgcagctctctgtaccgggcggggggcgcctacgggccgggcactcccgagctgctgctcgagggcgccgagacggtgactccagtgctggacccggccaggagacaagggtacgggcctctctggtacacgagcgtggggttcggcggcctggtgcagctccggaggggcgagagggtgtacgtcaacatcagtcaccccgatatggtggacttcgcgagagggaagaccttctttggggccgtgatggtggggtgagggaatatgagtgcgtggtgcgagtgcgtgaatattgggggcccggacgcccaggaccccatggcagtgggaaaaatgtaggagactgtttggaaattgattttgaacctgatgaaaataaagaatggaaagcttcagtgctgccgataaagat

SEQ ID NO: 150078 - DNA, 897 bp, Homo sapiens; identical to SEQ ID NO: 150077
  Payload ID: 9635
  Gene Symbol: LTB
  Gene Name: lymphotoxin beta (TNF superfamily, member 3)
  Uniprot ID: Q06643
  ENST ID: ENST00000383493
  CDS Start-End: 9-743

SEQ ID NO: 150079 - DNA, 897 bp, Homo sapiens; identical to SEQ ID NO: 150077
  Payload ID: 9635
  Gene Symbol: LTB
  Gene Name: lymphotoxin beta (TNF superfamily, member 3)
  Uniprot ID: Q06643
  ENST ID: ENST00000421268
  CDS Start-End: 9-743

SEQ ID NO: 150080 - DNA, 897 bp, Homo sapiens; identical to SEQ ID NO: 150077
  Payload ID: 9635
  Gene Symbol: LTB
  Gene Name: lymphotoxin beta (TNF superfamily, member 3)
  Uniprot ID: Q06643
  ENST ID: ENST00000444479
  CDS Start-End: 9-743

SEQ ID NO: 150081 - DNA, 897 bp, Homo sapiens; identical to SEQ ID NO: 150077
  Payload ID: 9635
  Gene Symbol: LTB
  Gene Name: lymphotoxin beta (TNF superfamily, member 3)
  Uniprot ID: Q06643
  ENST ID: ENST00000420402
  CDS Start-End: 9-743

SEQ ID NO: 150082 - DNA, 897 bp, Homo sapiens; identical to SEQ ID NO: 150077
  Payload ID: 9635
  Gene Symbol: LTB
  Gene Name: lymphotoxin beta (TNF superfamily, member 3)
  Uniprot ID: Q06643
  ENST ID: ENST00000456113
  CDS Start-End: 9-743

SEQ ID NO: 150083 - DNA, 897 bp, Homo sapiens; identical to SEQ ID NO: 150077
  Payload ID: 9635
  Gene Symbol: LTB
  Gene Name: lymphotoxin beta (TNF superfamily, member 3)
  Uniprot ID: Q06643
  ENST ID: ENST00000457552
  CDS Start-End: 9-743

SEQ ID NO: 150084 - DNA, 897 bp, Homo sapiens; identical to SEQ ID NO: 150077
  Payload ID: 9635
  Gene Symbol: LTB
  Gene Name: lymphotoxin beta (TNF superfamily, member 3)
  Uniprot ID: Q06643
  ENST ID: ENST00000429299
  CDS Start-End: 9-743

SEQ ID NO: 150085 - DNA, 853 bp, Homo sapiens
  Payload ID: 9635
  Gene Symbol: LTB
  Gene Name: lymphotoxin beta (TNF superfamily, member 3)
  Uniprot ID: Q06643
  ENST ID: ENST00000446745
  CDS Start-End: 11-244
ttcagtctcaatgggggcactggggctggagggcaggggtgggaggctccaggggaggggttccctcctgctagctgtggcaggagccacttctctggtgaccttgttgctggcggtgcctatcactgtcctggctgtgctggccttagtgccccaggatcagggaggactgggtttcagaagctgccagaggaggagccagaaacagatctcagccccgggctcccagctgcccacctcataggcgctccgctgaaggggcaggggctaggctgggagacgacgaaggaacaggcgtttctgacgagcgggacgcagttctcggacgccgaggggctggcgctcccgcaggacggcctctattacctctactgtctcgtcggctaccggggccgggcgccccctggcggcggggacccccagggccgctcggtcacgctgcgcagctctctgtaccgggcggggggcgcctacgggccgggcactcccgagctgctgctcgagggcgccgagacggtgactccagtgctggacccggccaggagacaagggtacgggcctctctggtacacgagcgtggggttcggcggcctggtgcagctccggaggggcgagagggtgtacgtcaacatcagtcaccccgatatggtggacttcgcgagagggaagaccttctttggggccgtgatggtggggtgagggaatatgagtgcgtggtgcgagtgcgtgaatattgggggcccggacgcccaggaccccatggcagtgggaaaaatgtaggagactgtttggaaattgattttgaacctgatgaaaataaagaatggaaagcttcagtgctgccgataaagat

SEQ ID NO: 150086 - DNA, 2260 bp, Homo sapiens
  Payload ID: 9636
  Gene Symbol: LTBR
  Gene Name: lymphotoxin beta receptor (TNFR superfamily, member 3)
  Uniprot ID: P36941
  ENST ID: ENST00000228918
  CDS Start-End: 327-1634
gctttcccggccgcccctcccgccccgcatcgaggcagacaagcctgttcctcttccctgggctgcgattgcgacaggccggcctggctcccagcgctccctgtccccgccccgcggccagctcgctccactcccacttcctgagctccgccatgggagccctggaggcccggcctggccgctcccggccctggggtgcacatcggccctgagtcccgtcccaggctctgggctcgggcagccgccgccaccgctgcccaggacgtcgggcctcctgccttcctcccaggcccccacgttgctggccgcctggccgagtggccgccatgctcctgccttgggccacctctgcccccggcctggcctgggggcctctggtgctgggcctcttcgggctcctggcagcatcgcagccccaggcggtgcctccatatgcgtcggagaaccagacctgcagggaccaggaaaaggaatactatgagccccagcaccgcatctgctgctcccgctgcccgccaggcacctatgtctcagctaaatgtagccgcatccgggacacagtttgtgccacatgtgccgagaattcctacaacgagcactggaactacctgaccatctgccagctgtgccgcccctgtgacccagtgatgggcctcgaggagattgccccctgcacaagcaaacggaagacccagtgccgctgccagccgggaatgttctgtgctgcctgggccctcgagtgtacacactgcgagctactttctgactgcccgcctggcactgaagccgagctcaaagatgaagttgggaagggtaacaaccactgcgtcccctgcaaggccgggcacttccagaatacctcctcccccagcgcccgctgccagccccacaccaggtgtgagaaccaaggtctggtggaggcagctccaggcactgcccagtccgacacaacctgcaaaaatccattagagccactgcccccagagatgtcaggaaccatgctgatgctggccgttctgctgccactggccttctttctgctccttgccaccgtcttctcctgcatctggaagagccacccttctctctgcaggaaactgggatcgctgctcaagaggcgtccgcagggagagggacccaatcctgtagctggaagctgggagcctccgaaggcccatccatacttccctgacttggtacagccactgctacccatttctggagatgtttccccagtatccactgggctccccgcagccccagttttggaggcaggggtgccgcaacagcagagtcctctggacctgaccagggagccgcagttggaacccggggagcagagccaggtggcccacggtaccaatggcattcatgtcaccggcgggtctatgactatcactggcaacatctacatctacaatggaccagtactggggggaccaccgggtcctggagacctcccagctacccccgaacctccataccccattcccgaagagggggaccctggccctcccgggctctctacaccccaccaggaagatggcaaggcttggcacctagcggagacagagcactgtggtgccacaccctctaacaggggcccaaggaaccaatttatcacccatgactgactgagtctgagaaaaggcagaagaaggggggcacaagggcaccttctcccttgaggctgccctgcccacgtgggattcacaggggcctgagtagggcccggggaagcagagccctaagggattaaggctcagacacctctgagagcaggtgggcactggctgggtacggtgccctccacaggactctccctactgcctgagcaaacctgaggcctcccggcagacccacccaccccctggggctgctcagcctcaggcacggacagggcacatgataccaactgctgcccactacggcacgccgcaccggagcacggcaccgagggagccgccacacggtcacctgcaaggacgtcacgggcccctctaaaggattcgtggtgctcatccccaagcttcagagaccctttggggttccacacttcacgtggactgaggtagaccctgcatgaagatgaaattatagggaggacgctccttccctcccctcctagaggagaggaaagggagtcattaacaactagggggttgggtaggattcctaggtatggggaagagttttggaaggggaggaaaatggcaagtgtatttatattgtaaccacatgcaaataaaaagaatgggac

SEQ ID NO: 150087 - DNA, 842 bp, Homo sapiens
  Payload ID: 9636
  Gene Symbol: LTBR
  Gene Name: lymphotoxin beta receptor (TNFR superfamily, member 3)
  ENST ID: ENST00000536876
  CDS Start-End: 190-842
ttcctgagctccgccatgggagccctggaggcccggcctggccgctcccggccctggggtgcacatcggccctgagtcccgtcccaggctctgggctcgggcagccgccgccaccgctgcccaggacgtcgggcctcctgccttcctcccaggcccccacgttgctggccgcctggccgagtggccgccatgctcctgccttgggccacctctgcccccggcctggcctgggggcctctggtgctgggcctcttcgggctcctggcagcatcgcagccccaggcggtgcctccatatgcgtcggagaaccagacctgcagggaccaggaaaaggaatactatgagccccagcaccgcatctgctgctcccgctgcccgccagctaaatgtagccgcatccgggacacagtttgtgccacatgtgccgagaattcctacaacgagcactggaactacctgaccatctgccagctgtgccgcccctgtgacccagtgatgggcctcgaggagattgccccctgcacaagcaaacggaagacccagtgccgctgccagccgggaatgttctgtgctgcctgggccctcgagtgtacacactgcgagctactttctgactgcccgcctggcactgaagccgagctcaaagatgaagttgggaagggtaacaaccactgcgtcccctgcaaggccgggcacttccagaatacctcctcccccagcgcccgctgccagccccacaccaggtgtgagaaccaaggtctggtggaggcagctccaggcactgcccagtccgacacaacctgcaaaaatccattagagccactgcccccagagatgtcagg

SEQ ID NO: 150088 - DNA, 632 bp, Homo sapiens
  Payload ID: 9636
  Gene Symbol: LTBR
  Gene Name: lymphotoxin beta receptor (TNFR superfamily, member 3)
  ENST ID: ENST00000544454
  CDS Start-End: 40-486
ctgaccatctgccagctgtgccgcccctgtgacccagtgatgggcctcgaggagattgccccctgcacaagcaaacggaagacccagtgccgctgccagccgggaatgttctgtgctgcctgggccctcgagtgtacacactgcgagctactttctgactgcccgcctggcactgaagccgagctcaaagatgaagttgggaagggtaacaaccactgcgtcccctgcaaggccgggcacttccagaatacctcctcccccagcgcccgctgccagccccacaccaggtgtgagaaccaaggtctggtggaggcagctccaggcactgcccagtccgacacaacctgcaaaaatccattagagccactgcccccagagatgtcagaacctgccctgagcaagggggtggagaacttgcaagccctgctctaccaggcggccacaggcagttccgaagcaagtttccctactctctcacccctgtaaacacccccacaggaaccatgctgatgctggccgttctgctgccactggccttctttctgctccttgccaccgtcttctcctgcatctggaagagccacccttctctctgcaggaaactgggatcgctgctcaagaggcgtccgcag

SEQ ID NO: 150089 - DNA, 1084 bp, Homo sapiens
  Payload ID: 9636
  Gene Symbol: LTBR
  Gene Name: lymphotoxin beta receptor (TNFR superfamily, member 3)
  ENST ID: ENST00000541102
  CDS Start-End: 32-910
ctgccagctgtgccgcccctgtgacccagtgatgggcctcgaggagattgccccctgcacaagcaaacggaagacccagtgccgctgccagccgggaatgttctgtgctgcctgggccctcgagtgtacacactgcgagctactttctgactgcccgcctggcactgaagccgagctcaaagatgaagttgggaagggtaacaaccactgcgtcccctgcaaggccgggcacttccagaatacctcctcccccagcgcccgctgccagccccacaccaggtgtgagaaccaaggtctggtggaggcagctccaggcactgcccagtccgacacaacctgcaaaaatccattagagccactgcccccagagatgtcaggatcgctgctcaagaggcgtccgcagggagagggacccaatcctgtagctggaagctgggagcctccgaaggcccatccatacttccctgacttggtacagccactgctacccatttctggagatgtttccccagtatccactgggctccccgcagccccagttttggaggcaggggtgccgcaacagcagagtcctctggacctgaccagggagccgcagttggaacccggggagcagagccaggtggcccacggtaccaatggcattcatgtcaccggcgggtctatgactatcactggcaacatctacatctacaatggaccagtactggggggaccaccgggtcctggagacctcccagctacccccgaacctccataccccattcccgaagagggggaccctggccctcccgggctctctacaccccaccaggaagatggcaaggcttggcacctagcggagacagagcactgtggtgccacaccctctaacaggggcccaaggaaccaatttatcacccatgactgactgagtctgagaaaaggcagaagaaggggggcacaagggcaccttctcccttgaggctgccctgcccacgtgggattcacaggggcctgagtagggcccggggaagcagagccctaagggattaaggctcagacacctctgagagcaggtgggcactggctgggtacggtgccc

SEQ ID NO: 150090 - DNA, 785 bp, Homo sapiens
  Payload ID: 9636
  Gene Symbol: LTBR
  Gene Name: lymphotoxin beta receptor (TNFR superfamily, member 3)
  ENST ID: ENST00000543190
  CDS Start-End: 428-652
ccaggctctgggctcgggcagccgccgccaccgctgcccaggacgtcgggcctcctgccttcctcccaggcccccacgttgctggccgcctggccgagtggccgccatgctcctgccttgggccacctctgcccccggcctggcctgggggcctctggtgctgggcctcttcgggctcctggcagcatcgcagccccaggcggtgcctccatatgcgtcggagaaccagacctgcagggaccaggaaaaggaatactatgagccccagcaccgcatctgctgctcccgctgcccgccaggcacctatgtctcagctaaatgtagccgcatccgggacacagtttgtgccacatgtgccgagaattcctacaacgagcactggaactacctgaccatctgccagctgtgccgcccctgtgacccagtgatgggcctcgaggagattgccccctgcacaagcaaacggaagacccagtgccgctgccagccgggaatgttctgtgctgcctgggccctcgagtgtacacactgcgagctactttctgactgcccgcctggcactgaagccgagctcaaaggtgtgagaaccaaggtctggtggaggcagctccaggcactgcccagtccgacacaacctgcaaaaatccattagagccactgcccccagagatgtcaggaaccatgctgatgctggccgttctgctgccactggccttctttctgctccttgccaccgtcttctcctgcatctggaagagccacccttctctctgcaggaaactggg

SEQ ID NO: 150091 - DNA, 1665 bp, Homo sapiens
  Payload ID: 9636
  Gene Symbol: LTBR
  Gene Name: lymphotoxin beta receptor (TNFR superfamily, member 3)
  Uniprot ID: P36941
  ENST ID: ENST00000539925
  CDS Start-End: 128-1378
actcccaggttgcggctggactgggactggttcctttccagttgaatctggcagccaaacctctcctccccctcacctgacaggtgcagcggcctggctggggagcccgcccgctggccggccagggatggaagcgacaggaatctcattagcatctcaattaaaggtgcctccatatgcgtcggagaaccagacctgcagggaccaggaaaaggaatactatgagccccagcaccgcatctgctgctcccgctgcccgccaggcacctatgtctcagctaaatgtagccgcatccgggacacagtttgtgccacatgtgccgagaattcctacaacgagcactggaactacctgaccatctgccagctgtgccgcccctgtgacccagtgatgggcctcgaggagattgccccctgcacaagcaaacggaagacccagtgccgctgccagccgggaatgttctgtgctgcctgggccctcgagtgtacacactgcgagctactttctgactgcccgcctggcactgaagccgagctcaaagatgaagttgggaagggtaacaaccactgcgtcccctgcaaggccgggcacttccagaatacctcctcccccagcgcccgctgccagccccacaccaggtgtgagaaccaaggtctggtggaggcagctccaggcactgcccagtccgacacaacctgcaaaaatccattagagccactgcccccagagatgtcaggaaccatgctgatgctggccgttctgctgccactggccttctttctgctccttgccaccgtcttctcctgcatctggaagagccacccttctctctgcaggaaactgggatcgctgctcaagaggcgtccgcagggagagggacccaatcctgtagctggaagctgggagcctccgaaggcccatccatacttccctgacttggtacagccactgctacccatttctggagatgtttccccagtatccactgggctccccgcagccccagttttggaggcaggggtgccgcaacagcagagtcctctggacctgaccagggagccgcagttggaacccggggagcagagccaggtggcccacggtaccaatggcattcatgtcaccggcgggtctatgactatcactggcaacatctacatctacaatggaccagtactggggggaccaccgggtcctggagacctcccagctacccccgaacctccataccccattcccgaagagggggaccctggccctcccgggctctctacaccccaccaggaagatggcaaggcttggcacctagcggagacagagcactgtggtgccacaccctctaacaggggcccaaggaaccaatttatcacccatgactgactgagtctgagaaaaggcagaagaaggggggcacaagggcaccttctcccttgaggctgccctgcccacgtgggattcacaggggcctgagtagggcccggggaagcagagccctaagggattaaggctcagacacctctgagagcaggtgggcactggctgggtacggtgccctccacaggactctccctactgcctgagcaaacctgaggcctcccggcagacccacccaccccctggggctgctcagcctcaggcacggacagggcacatgataccaactgctg

SEQ ID NO: 150092 - DNA, 550 bp, Homo sapiens
  Payload ID: 9637
  Gene Symbol: LYN
  Gene Name: LYN proto-oncogene, Src family tyrosine kinase
  ENST ID: ENST00000520050
  CDS Start-End: 100-550
ggcagtgcttcagaattacacatcacatggggagcagcatgctcccactgtgccccagaagagtttcccggacagtgtccagagaatctgttcggaaatatgggatgtataaaatcaaaagggaaagacagcttgagtgacgatggagtagatttgaagactcaaccagtacgtaatactgaaagaactatttatgtgagagatccaacgtccaataaacagcaaaggccagttccagaatctcagcttttacctggacagaggtttcaaactaaagatccagaggaacaaggagacattgtggtagccttgtacccctatgatggcatccacccggacgacttgtctttcaagaaaggagagaagatgaaagtcctggaggagcatggagaatggtggaaagcaaagtcccttttaacaaaaaaagaaggcttcatccccagcaactatgtggccaaactcaacaccttagaaacagaagagtggtttttcaaggatataaccaggaaggacgcagaaaggcagcttttggcaccaggaaatagcgctg

SEQ ID NO: 150093 - DNA, 5808 bp, Homo sapiens
  Payload ID: 9637
  Gene Symbol: LYN
  Gene Name: LYN proto-oncogene, Src family tyrosine kinase
  Uniprot ID: P07948
  ENST ID: ENST00000520220
  CDS Start-End: 275-1750
agttcctctcccgccgcgccgggccgcgctgccgctcgctccccggccgtggcgcctccgggccagacgcgctgcagcctccagcccgcggcaagcggggcggccgcgccacccccggccccgcgccagcagcccctcgccgcgcgtccagcgttcccggccagcagcctccccatacgcaggtcctgctgggccgccccgtcgcgccccccactctgaactcaagtcaccgtggagctccgccgccccgaaactttcaccgcgagcgggaaatatgggatgtataaaatcaaaagggaaagacagcttgagtgacgatggagtagatttgaagactcaaccagttccagaatctcagcttttacctggacagaggtttcaaactaaagatccagaggaacaaggagacattgtggtagccttgtacccctatgatggcatccacccggacgacttgtctttcaagaaaggagagaagatgaaagtcctggaggagcatggagaatggtggaaagcaaagtcccttttaacaaaaaaagaaggcttcatccccagcaactatgtggccaaactcaacaccttagaaacagaagagtggtttttcaaggatataaccaggaaggacgcagaaaggcagcttttggcaccaggaaatagcgctggagctttccttattagagaaagtgaaacattaaaaggaagcttctctctgtctgtcagagactttgaccctgtgcatggtgatgttattaagcactacaaaattagaagtctggataatgggggctattacatctctccacgaatcacttttccctgtatcagcgacatgattaaacattaccaaaagcaggcagatggcttgtgcagaagattggagaaggcttgtattagtcccaagccacagaagccatgggataaagatgcctgggagatcccccgggagtccatcaagttggtgaaaaggcttggcgctgggcagtttggggaagtctggatgggttactataacaacagtaccaaggtggctgtgaaaaccctgaagccaggaactatgtctgtgcaagccttcctggaagaagccaacctcatgaagaccctgcagcatgacaagctcgtgaggctctacgctgtggtcaccagggaggagcccatttacatcatcaccgagtacatggccaagggcagtttgctggatttcctgaagagcgatgaaggtggcaaagtgctgcttccaaagctcattgacttttctgctcagattgcagagggaatggcatacatcgagcggaagaactacattcaccgggacctgcgagcagctaatgttctggtctccgagtcactcatgtgcaaaattgcagattttggccttgctagagtaattgaagataatgagtacacagcaagggaaggtgctaagttccctattaagtggacggctccagaagcaatcaactttggatgtttcactattaagtctgatgtgtggtcctttggaatcctcctatacgaaattgtcacctatgggaaaattccctacccagggagaactaatgccgacgtgatgaccgccctgtcccagggctacaggatgccccgtgtggagaactgcccagatgagctctatgacattatgaaaatgtgctggaaagaaaaggcagaagagagaccaacgtttgactacttacagagcgtcctggatgatttctacacagccacggaagggcaataccagcagcagccttagagcacagggagacccgtccatttggcaggggtggctgcctcatttagagaggaaaagtaaccatcactggttgcacttatgatttcatgtgcggggatcatctgccgtgcctggatcctgaaatagaggctaaattactcaggaagaacaccctctaaatgggaaagtattctgtactcttagatggattctccactcagttgcaacttggacttgtcctcagcagctggtaatcttgctctgcttgacaacatctgagtgcagccgtttgagaagaaaacatctattctctccaaaaatgcacccaactagctctatgtttacaaatggacataggactcaaagtttcagagaccattgcaatgaatccccaataattgcagaactaaactcatttataaagctaaaataaccggatatatacatagcatgacatttctttgtgctttggcttacttgtttaaaaaaaaaaaaaaactaatccaacctgttagattttgcaggtgaagtcagcagcttaaaaatgtctttcccagatttcaatgatttttttccccctacctcccaaaatctgagactgttaaaacatttttcttctatgaacactgctcagacctgctagacatgccataggagtggcgtgcacatctctctctcttccagcaggaggagcccgtgagcacgcacagctgccctgtctgctcacccgaaggcaccgggctcacctggacctcccaggaaagggagaagagcctcagaaactgctctgtgtttagaaggaatatttttaagagtccagctttttcatttccacaatttcctatatccagatttgttttgacaatgtagtttggaagaactaagattctaatctctgaagaaccttatagggccttctaaaacataagagtttcctttgttgcttcaaatatttgaacattatgttaaagatcaagtattaattttagttgtactctagaaagctaaagtgccacattcggggctatttttatgattcagcaatcttttctaaattgtgtagcatgtgtatgagactatttatacccaaggatatgaaggaacataagtgactacaaggctctaataagccacggtggcaggaggttcaagcggttctgttcactaaatttttctcctgtaagctttgaatggaaacttctgtatcacatgatgtgtttcacttatgctgttgtgtatatacctaatatttctatttttgattttattttaatacacctcgtccaataacatctcaagctttttatttgcatttacattttcagctgtggtcagtgtaaaaattggtcatcagctgggggcggggtggttagaagtgattcaacagagctacatgctttaaacttgcccaagttctacctccttcctttgaacatttcagattggagaaccaaggagttgattgcctgaacacctgaacatccgtttatgggggccagatagaatttgttttcaaataggcttaacaggcatcattaaaatttcattctgtgtgttttgtttaggcttgaggtgcttagaagatgggataaaatattctacttttttctaaattttaactttgtttcctatgtgatttttttaaatgtcctttctaaaatattctaaaattattgattcacaagtgccatgttcagaactatagaatattactgttacataatgtctgcacagctggtcccttgattcagtggtaaggtttttgtgtacacccccctgcttgcattttatttcagaaccacaagtattacccaatatgttacatggagaggaactataaagaatccctaaggcaaaaagaagtctctagaaaatgactagaggttttttttttagcataacaaatttatttaaagaaaattattaaatttatcttcgccttgttttgcttctcccagttcctcctcttcttgccattttccacttgtctttccctcccaatcaagcctgtgatccttacctccatgtgggcccttcaccagcttgggcctcatctctggtgtccagcatgtgtggaagtcacacgttcccttgatgaacagcacacacagtctccttacttagctataggtttccagcctccctgtgacagacaggcataatgaggggctgaataggtgtttgtagcattttcgggtatccagtggtgtgcaaaatggctcatgtcatcacacctcaggttattgtagagaactggaaagacagaatccatactccctaccgccaagattctgacttagctgttgtgcagcgggagatgtatgtcagtctattttaaaagcttctccagtcagctagacacagtggctcatgcctgtaatctcagcactttgggaggctaaggcaggaggatcgcttgagctcaggagttagacaccagcctgagcaatatagcaagtctctacaaaaaattttaaaaattagctaagtgtggtggcacatacctatggtcccagctactcaggaggctgaggtgggaggattgcttgagcccaggaagtcaaggctgcagtgagctatgatcgtgccactgcactccagcctgggcaagagtgagaccctgtctcaaaaaaaaaaaccaaaaaaacaaaaaaacccttccctggtgaatataatgtatgctcagtcttgagagtcaccatttggtttgacccatattacaaagcccagccttctttttcctcagatggtttcatttctcaaaggggagtggaagagaaggaaggaggaaaaaaacgtgccttccttcctggtgaacatgaagctcactgaacctaaaggagactcacaggctagaaaccagtgtccttagtagtaggggccacctggggcttccgtggcttctccaggcatacctcctgaggttccacagaatccccttgcagaaagtacttctgatgagccactgggaacgtgtactgtccaagcccccttctaggggaaattcactgccacagaagccagcagccctggctgtcccaagggtgcataaaaggataataactaaaaggagggaattaattttgttgcctacaccagggatagatcgagggcactgaaagcatcataagtataaactcatctccacgtcagcttgtggagtctgctttctcgctctctcttttttttttttttttgacagagtctcactctgtcacgcaggctagagttgcagtggtgcgatctcagctcattgcaacctccccctctctggttggagcgattcttctcctgcctcagcctccctagtagctggaactacaggcacacaccatctcgcctggctaatttttgtatttttagtagagatggggtttcaccatgttagccaggctggtctcgaactcctgacctcaggcgatccgcctgcctcggcttcccaaagtgctgggattacaagtgtgagccactgtgcccggtcggggtctgctttctctttattccccgtcctctcacaaactacatccaggggcggtagctgctaaaaggactcaattctgcaacctcagcttctgacaccttcaaataaattaaatgctggtcctagggctcgctccccagctcttctgatgtcactgccaggttccacagccagttgtcggacatctcctgcttcctcagccaagaacacctctcagatgagatcaaaccgcccagctttcctcttagcatcttcctttattttccacttctggctggtggaagagagatcgtagttctctattccctacattttaactccacgaatattttagattaagtgaagtcttgctgttcttcctgatggaaatggtaattataaacatacaaagatacccatacacacattctttactcagggccctcttgtgctttggcaaatgataaaaattatctctaactcacacaacgaccctggaagatctggacaatgctatcactatttcacagctgagagatcgggagcatttaaagccacagaaggaatagattggcttcgcttcatattgtttccttgtgaaataaaaccagtgaaacac

SEQ ID NO: 150094 - DNA, 2297 bp, Homo sapiens
  Payload ID: 9637
  Gene Symbol: LYN
  Gene Name: LYN proto-oncogene, Src family tyrosine kinase
  Uniprot ID: P07948
  ENST ID: ENST00000519728
  CDS Start-End: 297-1835
tcggccgagcccagagacagccagttcctctcccgccgcgccgggccgcgctgccgctcgctccccggccgtggcgcctccgggccagacgcgctgcagcctccagcccgcggcaagcggggcggccgcgccacccccggccccgcgccagcagcccctcgccgcgcgtccagcgttcccggccagcagcctccccatacgcaggtcctgctgggccgccccgtcgcgccccccactctgaactcaagtcaccgtggagctccgccgccccgaaactttcaccgcgagcgggaaatatgggatgtataaaatcaaaagggaaagacagcttgagtgacgatggagtagatttgaagactcaaccagtacgtaatactgaaagaactatttatgtgagagatccaacgtccaataaacagcaaaggccagttccagaatctcagcttttacctggacagaggtttcaaactaaagatccagaggaacaaggagacattgtggtagccttgtacccctatgatggcatccacccggacgacttgtctttcaagaaaggagagaagatgaaagtcctggaggagcatggagaatggtggaaagcaaagtcccttttaacaaaaaaagaaggcttcatccccagcaactatgtggccaaactcaacaccttagaaacagaagagtggtttttcaaggatataaccaggaaggacgcagaaaggcagcttttggcaccaggaaatagcgctggagctttccttattagagaaagtgaaacattaaaaggaagcttctctctgtctgtcagagactttgaccctgtgcatggtgatgttattaagcactacaaaattagaagtctggataatgggggctattacatctctccacgaatcacttttccctgtatcagcgacatgattaaacattaccaaaagcaggcagatggcttgtgcagaagattggagaaggcttgtattagtcccaagccacagaagccatgggataaagatgcctgggagatcccccgggagtccatcaagttggtgaaaaggcttggcgctgggcagtttggggaagtctggatgggttactataacaacagtaccaaggtggctgtgaaaaccctgaagccaggaactatgtctgtgcaagccttcctggaagaagccaacctcatgaagaccctgcagcatgacaagctcgtgaggctctacgctgtggtcaccagggaggagcccatttacatcatcaccgagtacatggccaagggcagtttgctggatttcctgaagagcgatgaaggtggcaaagtgctgcttccaaagctcattgacttttctgctcagattgcagagggaatggcatacatcgagcggaagaactacattcaccgggacctgcgagcagctaatgttctggtctccgagtcactcatgtgcaaaattgcagattttggccttgctagagtaattgaagataatgagtacacagcaagggaaggtgctaagttccctattaagtggacggctccagaagcaatcaactttggatgtttcactattaagtctgatgtgtggtcctttggaatcctcctatacgaaattgtcacctatgggaaaattccctacccagggagaactaatgccgacgtgatgaccgccctgtcccagggctacaggatgccccgtgtggagaactgcccagatgagctctatgacattatgaaaatgtgctggaaagaaaaggcagaagagagaccaacgtttgactacttacagagcgtcctggatgatttctacacagccacggaagggcaataccagcagcagccttagagcacagggagacccgtccatttggcaggggtggctgcctcatttagagaggaaaagtaaccatcactggttgcacttatgatttcatgtgcggggatcatctgccgtgcctggatcctgaaatagaggctaaattactcaggaagaacaccctctaaatgggaaagtattctgtactcttagatggattctccactcagttgcaacttggacttgtcctcagcagctggtaatcttgctctgcttgacaacatctgagtgcagccgtttgagaagaaaacatctattctctccaaaaatgcacccaactagctctatgtttacaaatggacataggactcaaagtttcagagaccattgcaatgaatccccaataattgcagaactaaactcatttataaagctaaaataaccggatatatacatagcatgacatttctttgtgctttggcttacttgttt

SEQ ID NO: 150095 - DNA, 1626 bp, Homo sapiens
  Payload ID: 9638
  Gene Symbol: LYRM1
  Gene Name: LYR motif containing 1
  Uniprot ID: O43325
  ENST ID: ENST00000219168
  CDS Start-End: 370-738
ggtttggtccggcctggcctactggaccagcctgtgctcggtcggccacggctctgctgggctcctggcgccgcctcctcccagcccgccgcgggctgcgcgcttctgtgggtgggggaaggcaggactgacgcagaagagtacccagagaaggagaagccagcaaaggagacgacacagacaagacctcagagatcaaaggaagaggccccttaatatcctggaataatgggacccatccccgtaatcagtgaatctcatccacccgcttgccagcttctacccgcagcaagtagaagctaagtcctggctcaaatctcttccctccctccctctcccagctgtcagtgcttttggacttgtgctcagatgacaacggcaacacgacaagaagtccttggcctctaccgcagcattttcaggcttgcgaggaaatggcaggcgacatcagggcagatggaagacaccatcaaagaaaaacagtacatactaaatgaagccagaacgctgttccggaaaaacaaaaatctcacggacacagacctaattaaacagtgtatagatgaatgcacagccaggattgaaattggactgcattacaagattccttacccaaggccaattcatctgcctccaatgggccttaccccactccgaggccggggacttcgaagccaagagaaactgaggaaactttccaaaccagtatatctcagatctcatgatgaagtttcctaatctagaggaaagtttatttctgcaaatgatgagccaactagttattgaatgtaaaccagatggcaaaacacttcttgattaggggcaaaaattcaaatgtcttcttaaaacctccacaattgattctccccctgtgatgtaaacttagatatccctagagtttctcagcatctttcttcctgagtggatggcattatccctagaggtcatggaccttacatcctcactgcagtcacctttggaaacaagaccgaggcctgtagaaggaaagcggaaggatgtaagagctgttcatgggaattccattcaccacacatgccagctgatgcaaagaaatttgccagtcactggaagttactgtggctactataaaactatgtaccactctcagaatattcttaggctttttttttttcaagttatagatttgcttaaagtgaggttttttggtgtgtgcttttttgttgtcttttgacccttccagtttccagacaaacttgtcttaaaaagtgcatcattggattgaccatggtttttcatgaaattttatgagatttctgccttaacaaaatgcatatattccttatcttaaagcctgtcattacttaggatgcacttataggatctgaaaagctcactttaaactcatactacattcgttacgagtattttacgttaacataattgaaaagtacaaggtccaagctggctttcaaattatgtctaaacagaaatgggacaaatagacttgaaaatagaagggatttattccacccctgcaagggtagagtcaggtgagagtcccttggtgagtcatttgtacatcagtgtcatttcttcttaacctctgaagaagatgggcatcagaaataaagacaaagcactatc

SEQ ID NO: 150096 - DNA, 1659 bp, Homo sapiens
  Payload ID: 9638
  Gene Symbol: LYRM1
  Gene Name: LYR motif containing 1
  Uniprot ID: O43325
  ENST ID: ENST00000396052
  CDS Start-End: 401-769
gcctggtgtggggacgctcaggtgccggcgtggggccccctcggaggctgtgaatcttttggacccccgaatgtaaatgggagatgagagtacccagagaaggagaagccagcaaaggagacgacacagacaagacctcagagatcaaaggaagaggccccttaatatcctggaataatgggacccatccccgtaatcagtgaatctcatccacccgcttgccagcttctacccgcagcaagtagaagctaagtcctggctcaaatctcttccctccctccctctcccagctgtcagtgcttttggacttgtgctcaggtgaagtagtatttgaagcttttcatcagttggctcattctttactcaagaataaacctcaagaaacgtcatcagggtcagaatgacaacggcaacacgacaagaagtccttggcctctaccgcagcattttcaggcttgcgaggaaatggcaggcgacatcagggcagatggaagacaccatcaaagaaaaacagtacatactaaatgaagccagaacgctgttccggaaaaacaaaaatctcacggacacagacctaattaaacagtgtatagatgaatgcacagccaggattgaaattggactgcattacaagattccttacccaaggccaattcatctgcctccaatgggccttaccccactccgaggccggggacttcgaagccaagagaaactgaggaaactttccaaaccagtatatctcagatctcatgatgaagtttcctaatctagaggaaagtttatttctgcaaatgatgagccaactagttattgaatgtaaaccagatggcaaaacacttcttgattaggggcaaaaattcaaatgtcttcttaaaacctccacaattgattctccccctgtgatgtaaacttagatatccctagagtttctcagcatctttcttcctgagtggatggcattatccctagaggtcatggaccttacatcctcactgcagtcacctttggaaacaagaccgaggcctgtagaaggaaagcggaaggatgtaagagctgttcatgggaattccattcaccacacatgccagctgatgcaaagaaatttgccagtcactggaagttactgtggctactataaaactatgtaccactctcagaatattcttaggctttttttttttcaagttatagatttgcttaaagtgaggttttttggtgtgtgcttttttgttgtcttttgacccttccagtttccagacaaacttgtcttaaaaagtgcatcattggattgaccatggtttttcatgaaattttatgagatttctgccttaacaaaatgcatatattccttatcttaaagcctgtcattacttaggatgcacttataggatctgaaaagctcactttaaactcatactacattcgttacgagtattttacgttaacataattgaaaagtacaaggtccaagctggctttcaaattatgtctaaacagaaatgggacaaatagacttgaaaatagaagggatttattccacccctgcaagggtagagtcaggtgagagtcccttggtgagtcatttgtacatcagtgtcatttcttcttaacctctgaagaagatgggcatcagaaataaagacaaagcactatcaa

SEQ ID NO: 150097 - DNA, 1399 bp, Homo sapiens
  Payload ID: 9638
  Gene Symbol: LYRM1
  Gene Name: LYR motif containing 1
  ENST ID: ENST00000412082
  CDS Start-End: 410-511
tttctggaaacgacggcggcccggcgggtccaaaccacctaccatccccgctcgcgtttccaggctccctacccccgccgccgccgcctcttcttccaccactgccaccgcctcctcttcatctgcggcccaccggcggcggccgccccgaagccccgccccctccatcgcctcctgcatcatcacttccggtaaccccgccggccgccagctccaggagggagaatgggagaggggcaaggagggaacgagtggaagattgcgtcacgacgcacataaagacgtacgaagccgtcgccaactcacggacacagacctaattaaacagtgtatagatgaatgcacagccaggattgaaattggactgcattacaagattccttacccaaggccaattcatctgcctccaatgggccttaccccactccgaggccggggacttcgaagccaagagaaactgaggaaactttccaaaccagtatatctcagatctcatgatgaagtttcctaatctagaggaaagtttatttctgcaaatgatgagccaactagttattgaatgtaaaccagatggcaaaacacttcttgattaggggcaaaaattcaaatgtcttcttaaaacctccacaattgattctccccctgtgatgtaaacttagatatccctagagtttctcagcatctttcttcctgagtggatggcattatccctagaggtcatggaccttacatcctcactgcagtcacctttggaaacaagaccgaggcctgtagaaggaaagcggaaggatgtaagagctgttcatgggaattccattcaccacacatgccagctgatgcaaagaaatttgccagtcactggaagttactgtggctactataaaactatgtaccactctcagaatattcttaggctttttttttttcaagttatagatttgcttaaagtgaggttttttggtgtgtgcttttttgttgtcttttgacccttccagtttccagacaaacttgtcttaaaaagtgcatcattggattgaccatggtttttcatgaaattttatgagatttctgccttaacaaaatgcatatattccttatcttaaagcctgtcattacttaggatgcacttataggatctgaaaagctcactttaaactcatactacattcgttacgagtattttacgttaacataattgaaaagtacaaggtccaagctggctttcaaattatgtctaaacagaaatgggacaaatagacttgaaaatagaagggatttattccacccctgcaagggtagagtcaggtgagagtcccttggtgagtcatttgtacatcagtgtcatttcttcttaacctctgaagaagatgggcatcagaaataaagacaaagcactatc

SEQ ID NO: 150098 - DNA, 1558 bp, Homo sapiens
  Payload ID: 9638
  Gene Symbol: LYRM1
  Gene Name: LYR motif containing 1
  Uniprot ID: O43325
  ENST ID: ENST00000439021
  CDS Start-End: 302-670
tttctggaaacgacggcggcccggcgggtccaaaccacctaccatccccgctcgcgtttccaggctccctacccccgccgccgccgcctcttcttccaccactgccaccgcctcctcttcatctgcggcccaccggcggcggccgccccgaagccccgccccctccatcgcctcctgcatcatcacttccggtaaccccgccggccgccagctccaggagggagaatgggagaggggcaaggagggaacgagtggaagattgcgtcacgacgcacataaagacgtacgaagccgtcgccaaatgacaacggcaacacgacaagaagtccttggcctctaccgcagcattttcaggcttgcgaggaaatggcaggcgacatcagggcagatggaagacaccatcaaagaaaaacagtacatactaaatgaagccagaacgctgttccggaaaaacaaaaatctcacggacacagacctaattaaacagtgtatagatgaatgcacagccaggattgaaattggactgcattacaagattccttacccaaggccaattcatctgcctccaatgggccttaccccactccgaggccggggacttcgaagccaagagaaactgaggaaactttccaaaccagtatatctcagatctcatgatgaagtttcctaatctagaggaaagtttatttctgcaaatgatgagccaactagttattgaatgtaaaccagatggcaaaacacttcttgattaggggcaaaaattcaaatgtcttcttaaaacctccacaattgattctccccctgtgatgtaaacttagatatccctagagtttctcagcatctttcttcctgagtggatggcattatccctagaggtcatggaccttacatcctcactgcagtcacctttggaaacaagaccgaggcctgtagaaggaaagcggaaggatgtaagagctgttcatgggaattccattcaccacacatgccagctgatgcaaagaaatttgccagtcactggaagttactgtggctactataaaactatgtaccactctcagaatattcttaggctttttttttttcaagttatagatttgcttaaagtgaggttttttggtgtgtgcttttttgttgtcttttgacccttccagtttccagacaaacttgtcttaaaaagtgcatcattggattgaccatggtttttcatgaaattttatgagatttctgccttaacaaaatgcatatattccttatcttaaagcctgtcattacttaggatgcacttataggatctgaaaagctcactttaaactcatactacattcgttacgagtattttacgttaacataattgaaaagtacaaggtccaagctggctttcaaattatgtctaaacagaaatgggacaaatagacttgaaaatagaagggatttattccacccctgcaagggtagagtcaggtgagagtcccttggtgagtcatttgtacatcagtgtcatttcttcttaacctctgaagaagatgggcatcagaaataaagacaaagcactatc

SEQ ID NO: 150099 - DNA, 769 bp, Homo sapiens
  Payload ID: 9638
  Gene Symbol: LYRM1
  Gene Name: LYR motif containing 1
  Uniprot ID: O43325
  ENST ID: ENST00000569023
  CDS Start-End: 401-769
aggagggagaatgggagaggggcaaggagggaacgagtggaagattgcgtcacgacgcacataaagacgtacgaagccgtcgccaaagagtacccagagaaggagaagccagcaaaggagacgacacagacaagacctcagagatcaaaggaagaggccccttaatatcctggaataatgggacccatccccgtaatcagtgaatctcatccacccgcttgccagcttctacccgcagcaagtagaagctaagtcctggctcaaatctcttccctccctccctctcccagctgtcagtgcttttggacttgtgctcaggtgaagtagtatttgaagcttttcatcagttggctcattctttactcaagaataaacctcaagaaacgtcatcagggtcagaatgacaacggcaacacgacaagaagtccttggcctctaccgcagcattttcaggcttgcgaggaaatggcaggcgacatcagggcagatggaagacaccatcaaagaaaaacagtacatactaaatgaagccagaacgctgttccggaaaaacaaaaatctcacggacacagacctaattaaacagtgtatagatgaatgcacagccaggattgaaattggactgcattacaagattccttacccaaggccaattcatctgcctccaatgggccttaccccactccgaggccggggacttcgaagccaagagaaactgaggaaactttccaaaccagtatatctcagatctcatgatgaagtttcctaa

SEQ ID NO: 150100 - DNA, 931 bp, Homo sapiens
  Payload ID: 9638
  Gene Symbol: LYRM1
  Gene Name: LYR motif containing 1
  ENST ID: ENST00000562740
  CDS Start-End: 565-666
tgttggatgcggcgggagatgggtagagtcagtcagtcgagactcccccagacctggaactggtgctcccacagaggtgggcccggtggtttggtccggcctggcctactggaccagcctgtgctcggtcggccacggctctgctgggctcctggcgccgcctcctcccagcccgccgcgggctgcgcgcttctgtgggtgggggaaggcaggactgacgcagaagagtacccagagaaggagaagccagcaaaggagacgacacagacaagacctcagagatcaaaggaagaggccccttaatatcctggaataatgggacccatccccgtaatcagtgaatctcatccacccgcttgccagcttctacccgcagcaagtagaagctaagtcctggctcaaatctcttccctccctccctctcccagctgtcagtgcttttggacttgtgctcagctcacggacacagacctaattaaacagtgtatagatgaatgcacagccaggattgaaattggactgcattacaagattccttacccaaggccaattcatctgcctccaatgggccttaccccactccgaggccggggacttcgaagccaagagaaactgaggaaactttccaaaccagtatatctcagatctcatgatgaagtttcctaatctagaggaaagtttatttctgcaaatgatgagccaactagttattgaatgtaaaccagatggcaaaacacttcttgattaggggcaaaaattcaaatgtcttcttaaaacctccacaattgattctccccctgtgatgtaaacttagatatccctagagtttctcagcatctttcttcctgagtggatggcattatccctagaggtcatggaccttacatcctcactgcagtcacctttggaaacaagaccgaggcctgtagaa

SEQ ID NO: 150101 - DNA, 857 bp, Homo sapiens
  Payload ID: 9638
  Gene Symbol: LYRM1
  Gene Name: LYR motif containing 1
  Uniprot ID: O43325
  ENST ID: ENST00000568663
  CDS Start-End: 342-710
aggacagaggaccagagtctgcaccccctccagggcagctccaaccccatatccccaggccctgggttgaggggtgctggcggtggggaggcagggacagtaggctccctacccccgccgccgccgcctcttcttccaccactgccaccgcctcctcttcatctgcggcccaccggcggcggccgccccgaagccccgccccctccatcgcctcctgcatcatcacttccggtaaccccgccggccgccagctccaggagggagaatgggagaggggcaaggagggaacgagtggaagattgcgtcacgacgcacataaagacgtacgaagccgtcgccaaatgacaacggcaacacgacaagaagtccttggcctctaccgcagcattttcaggcttgcgaggaaatggcaggcgacatcagggcagatggaagacaccatcaaagaaaaacagtacatactaaatgaagccagaacgctgttccggaaaaacaaaaatctcacggacacagacctaattaaacagtgtatagatgaatgcacagccaggattgaaattggactgcattacaagattccttacccaaggccaattcatctgcctccaatgggccttaccccactccgaggccggggacttcgaagccaagagaaactgaggaaactttccaaaccagtatatctcagatctcatgatgaagtttcctaatctagaggaaagtttatttctgcaaatgatgagccaactagttattgaatgtaaaccagatggcaaaacacttcttgattaggggcaaaaattcaaatgtcttcttaaaacctccacaattgattctccccctgtgatgtaaactta

SEQ ID NO: 150102 - DNA, 1695 bp, Homo sapiens
  Payload ID: 9638
  Gene Symbol: LYRM1
  Gene Name: LYR motif containing 1
  ENST ID: ENST00000568820
  CDS Start-End: 278-601
agattgcgtcacgacgcacataaagacgtacgaagccgtcgccaaagagtacccagagaaggagaagccagcaaaggagacgacacagacaagacctcagagatcaaaggaagaggccccttaatatcctggaataatgggacccatccccgtaatcagtgaatctcatccacccgcttgccagcttctacccgcagcaagtagaagctaagtcctggctcaaatctcttccctccctccctctcccagctgtcagtgcttttggacttgtgctcagatgacaacggcaacacgacaagaagtccttggcctctaccgcagcattttcaggcttgcgaggaaatggcaggcgacatcagggcagatggaagacaccatcaaagaaaaacagtacatactaaatgaagccagaacgctgttccggaaaaacaaaaatctcacggacacagacctaattaaacagtgtatagatgaatgcacagccaggattgaaattggactgcattacaagattccttacccaaggccagtaagtgtgactccggttaacaagtgctgggtacttaccctcatcaacctggttatttccaagaatgtgtaacaagagggcgagtgcttgctgagaagcccagagctgctgtgggaggcatgttggaaataagctatcattgcatgctgccagcccatcacaacaaagtaaaatgtcaatgaatgcatgacgtatcctgcttacatagctttccacgtatggaagggaaaaccagctcacactgtagagctttttctcttttcactttcatcttttttatggaaatgtgtttaattataaaaggcaggtttgttgttactaaaagaataaagttcaaacatgaaaggaatgcataaagtagaaagtaaaaatggtcaaaaattctcatccaggctaggcactgcggctcatgcctataatcctagcactttgggaggccaaggcaggaggatcacttgaggctggtcttgaactcctgggctcaagcaatcctcccacctcagcctcccaaagctctgggataacaggcatgagccaccgtgcctggccagaaatcttttttgtttgttcgtttttttggagacagagtcttactctgtcgcccaggctggagtgcagcatgatttctgctcactacaacctctgccttcccagttcaagtgattctcattcctcaacctctcgaataggtggaactacagtcgtgcaccaccacacccagctaattttttgtattttaatagaaacagggtttcaccatgttgcccaggctggtcttgaactcctgagcttaggcaatctgcccaccgtggcctccaaaagtgctaggatgacaggcgtaagccactgcgcccagcccaaatttcttaaaaaaaaaaaaaaaaaaaaaaaatttctcattgtgcagagggtgaacactttaactgttaaatggaaaattgccaatattcaactcttttagctacaaaaacagcaattttatattgtagtggctcaacctaattagtttggtagtatacccttttagtctttttttctgtattcatgtacctacattttctttacatatgtaggattctggatataatgttatactgcgtacttattttacttcatgtcttctgcacatctttgtatgtagctctccctcaatctttttttttttt

SEQ ID NO: 150103 - DNA, 460 bp, Homo sapiens
  Payload ID: 9638
  Gene Symbol: LYRM1
  Gene Name: LYR motif containing 1
  Uniprot ID: O43325
  ENST ID: ENST00000567954
  CDS Start-End: 92-460
cacggctctgctgggctcctggcgccgcctcctcccagcccgccgcgggctgcgcgcttctgtgggtgggggaaggcaggactgacgcagaatgacaacggcaacacgacaagaagtccttggcctctaccgcagcattttcaggcttgcgaggaaatggcaggcgacatcagggcagatggaagacaccatcaaagaaaaacagtacatactaaatgaagccagaacgctgttccggaaaaacaaaaatctcacggacacagacctaattaaacagtgtatagatgaatgcacagccaggattgaaattggactgcattacaagattccttacccaaggccaattcatctgcctccaatgggccttaccccactccgaggccggggacttcgaagccaagagaaactgaggaaactttccaaaccagtatatctcagatctcatgatgaagtttcctaa

SEQ ID NO: 150104 - DNA, 931 bp, Homo sapiens
  Payload ID: 9638
  Gene Symbol: LYRM1
  Gene Name: LYR motif containing 1
  ENST ID: ENST00000567165
  CDS Start-End: 126-449
gcatcatcacttccggtaaccccgccggccgccagctccaggagggagaatgggagaggggcaaggagggaacgagtggaagattgcgtcacgacgcacataaagacgtacgaagccgtcgccaaatgacaacggcaacacgacaagaagtccttggcctctaccgcagcattttcaggcttgcgaggaaatggcaggcgacatcagggcagatggaagacaccatcaaagaaaaacagtacatactaaatgaagccagaacgctgttccggaaaaacaaaaatctcacggacacagacctaattaaacagtgtatagatgaatgcacagccaggattgaaattggactgcattacaagattccttacccaaggccagtaagtgtgactccggttaacaagtgctgggtacttaccctcatcaacctggttatttccaagaatgtgtaacaagagggcgagtgcttgctgagaagcccagagctgctgtgggaggcatgttggaaataagctatcattgcatgctgccagcccatcacaacaaagtaaaatgtcaatgaatgcatgacgtatcctgcttacatagctttccacgtatggaagggaaaaccagctcacactgtagagctttttctcttttcactttcatcttttttatggaaatgtgtttaattataaaaggcaggtttgttgttactaaaagaataaagttcaaacatgaaaggaatgcataaagtagaaagtaaaaatggtcaaaaattctcatccaggctggtcttgaactcctgggctcaagcaatcctcccacctcagcctcccaaagctctgggataacaggcatgagccaccgtgcctggccagaaatcttttttgtttgttcgtttttttggagacagagtcttactctgtcgcccaggctggagtgcagcatg

SEQ ID NO: 150105 - DNA, 791 bp, Homo sapiens
  Payload ID: 9639
  Gene Symbol: LYRM2
  Gene Name: LYR motif containing 2
  ENST ID: ENST00000520441
  CDS Start-End: 19-252
ggcggacctctggtggacatggctgcttcccgcttacccccagcgacgctaacgttaaagcagttcgtaagaaggcaacaagttcttctcctctacagaaggattttgcaaacaattcggcaagttccaaatgattctgatcgcaaatacctgaaagattgggcaagagaagaattcagaagaaacaaaagtgccaccgaagaggtgagaacaaaatcatggcttcgcccacgactgaagcgcaagacctgaaggaggcaaacggcattgttacaaccactggtgtgcgcagcatctgtgtgagagaattctccttggacctggggctctgacctaatggaatttacagcttagagggtgagagcaggtgttcacatcaagcaagcacctctggaccacctaccatcctcctaggtcttgtcctgggcaccacggggactcggagacaggtaggatattatccctgacctcaagaagcttaaagtctatgatgataataactacagacactgatgctgggccgggactgccaactacatgcacagagactgtgctccagggagtgccattcacataaactaggatatgaatggcgtctcctggagttgtgcaacgcagcagccccgtgtgaggcacagtctcactctccatcttggtacactggacttgagctagcccagcagatgttcccttggccaaactgtgtccaagtcacatcaatttgattcaaaatattattaaagtgtatctatgagccatagtaccaaccacgggacagttatctcttcccc

SEQ ID NO: 150106 - DNA, 677 bp, Homo sapiens
  Payload ID: 9639
  Gene Symbol: LYRM2
  Gene Name: LYR motif containing 2
  ENST ID: ENST00000520318
  CDS Start-End: 34-252
gcgcgctgaggctccggcggacctctggtggacatggctgcttcccgcttacccccagcgacgctaacgttaaagcagttcgtaagaaggcaacaagttcttctcctctacagaaggattttgcaaacaattcggcaagttccaaatgattctgatcgcaaatacctgaaagattgggcaagagaagaattcagaagaaacaaaagtgccaccgaagaggtgagaacaaaatcatggatacaatccggatgatgattactcaaggcaatatgcagctcaaggagttagaaaaaacacttgctttagcaaaatcttaactatagcattattctgaaggattttcaaagtctccatgtgttttgttgcatttaggattaacaatggacaacacaaagcccagtcttactatttatatgtacagtatttggtgatagagagcaaaggaaaaacacatcagaacagttgccttaacactgaaaaacataccctgcattttgaaaatgtttatggatgtctcagcagttcttaaaagaagaaaaaaaccactaacaaatggccagtagatgctggacacaatcattagggaagtgtaaatcaaaactactatgaggtcgggtgtagtggctcatgcttgtaatcccagtactttaggaggctgtggtaggtggatcacttga

SEQ ID NO: 150107 - DNA, 5353 bp, Homo sapiens
  Payload ID: 9639
  Gene Symbol: LYRM2
  Gene Name: LYR motif containing 2
  Uniprot ID: Q9NU23
  ENST ID: ENST00000523377
  CDS Start-End: 38-304
tcctgcgcgctgaggctccggcggacctctggtggacatggctgcttcccgcttacccccagcgacgctaacgttaaagcagttcgtaagaaggcaacaagttcttctcctctacagaaggattttgcaaacaattcggcaagttccaaatgattctgatcgcaaatacctgaaagattgggcaagagaagaattcagaagaaacaaaagtgccaccgaagaggatacaatccggatgatgattactcaaggcaatatgcagctcaaggagttagaaaaaacacttgctttagcaaaatcttaactatagcattattctgaaggattttcaaagtctccatgtgttttgttgcatttaggattaacaatggacaacacaaagcccagtcttactatttatatgtacagtatttggtgatagagagcaaaggaaaaacacatcagaacagttgccttaacactgaaaaacataccctgcattttgaaaatgtttatggatgtctcagcagttcttaaaagaagaaaaaaaccactaacaaatggccagtagatgctggacacaatcattagggaagtgtaaatcaaaactactatgaggtcgggtgtagtggctcatgcttgtaatcccagtactttaggaggctgtggtaggtggatcacttgaggtcaggagttcaagaccagcctggccagcatggtgaaacctcatctctactaaaaatacaaaaattagcttggtgtggtggtgcattgcctgtagtcccagctacttgggaggctgaggcaggagaatcacttgaacccaggaagtggaggttgcagtgagctgaggtcgtgccactgcacttcagcctgggtgacagagtgagacagtctctaaaaaaaaaaaaaaaaaacaaccctgagattcacattcactagaatggctgtaattaaaaagagaaataataataagtcttggtgaagatgtacagaaattacagaaccctcatacattgctggtgggaatgtaaaatggtgtagccacttcagaaaacagacggtcagttcctcaaaagatgaaacagctgctgtatgagttagcacttctaccccatgcccatagccattatttggcactaaaaagaaacgaaggacttatatatactaaacatggataaaccttgaaaacgttaagtgaaagaagccggtcacaaaagatcacatgatgattccattcatacgaaatgtccagaataggcagaaagattagtggttgcctaggctggctgtagatggaatggagtaactgctaatgggtgtagggttccttttcagggtgatgaaaatatcctacagttagcttgtggtgtaggctgcacaactcttgaatatattcaaatccactgaactgtacattttaaatgtaaggtatgaattgtatctcaataaagctgttattaaaaaactcttgaggtgtaggactgaaagtatactgacaccaggagataccctggaactttctcgaaaaatcctgcattatccctgagggttgttcaggtacgttcttcagatgtgtcatagtttgatagagaactcatcaaaaagatcaccactgggaatctagatctttgttgaaaagggaagagaaagagaagcttaatgagcacattgaagcacttaccagaaagaagagggaagacttctggatgaaacctctgtgagtaccttaacattcacatggaagtagtaaaaataagattctgggtgcagttctccaatgacaggaaaaaaaacaaagagaatttgaagaatacgtcagagacaaatacattacaaccaaaattgacttcaaggcacttttgaaggagatcaaatttataacaaaataatttagtgaaagtgaaagcttgtggaagatgttggaatcatccatcctgaaaattgaagtcttctgtttatcaacagaacagctaagaagctaatctaagaatgaccagcacctgaaagatgtagacaacattttgcagaatgataaatggtatccagtactggactgtgtctgagaggcatcaactgaatgtggatgttaatgacctggactgtcagggtccacctctacctcccagagcctcagagcccacaagacaaaataattctgaatactgttccatgggggtaatctactaattcaaaatgcctgcctgtgccaattttcaggtttttatgtagataagtattagttaacctgttgcaaaatgatctgacaaacagaagcatttgtgacgtttctgaacagagaacactttggaaatattttttgtgtgacatgattgatagatacatgctatctctagtaaatctaaaatcttgaaactcaaaatcatccttttatgggtgtagaagtcagtgatttaatgatgctcttcctaacagtggtgtgcatggaaaggttttcattaaagagcgtatgtggtttgcatttgcaagattcaactagcacagactccaagaaaacctaagtttttttgttttttaaagcaggtaaggccgggcactgtggcttacacaagtaatccacacactttgggaggctgaggtgggtggatcactttaggtcaggatttcgagactagctaggccactagctagcctaacctggtggcacgtgcctgtaattccagctactcaggagggctgcctcatattgaacccgggaggcagaggctgcagtgagccgagaacacactactgcactacagcctgggcgaaagagtgagactcttgtctcaaaaaaaataaaaaagtgccatcaagttagaagttttaaattcatggtacaagcattgccatagatgtgcctgcaagaaacacacagatgacttttttttgagacagggtctctgttgcacaagctggagtgtggtggcgcgaacatggctcactgcaaccttgagctcctgggctcaagagatccacctgcttcagattttcatttagctgggaccacaggcatgtgccaccatgaccggctaattttttttacttttcagagagaggagggggaatctcactttgttgccaggctagtctcaaactcctgggctcaagcaatccacctgcctcggtggccagagtgctaggattacaggtgtgagttgtttttttttttaaagagacagtcttacctcattctgtcacccagaatggaatgactttctaaaattgcagaaagcagaacatattccttgctgtttataatattatagtcgtatcaaagggaaagagtatttctccttaaataaaattacaaataagaaatgtatgttttactcttactcataaaaggtattgtagaatacaaaaggtttttcaaactggttttgtctttgattggcttttataatccacacttcaaagaagaaatgcatttaacttttaataacttagtcaaaaagtataatgttgccttgccttgcataacctttaactattgcaaatgatgttttgtccttcccctttgtccagtattttccaaatggtcaacagtttaaacatttaagcttgcactgagaaaccttgccacatttcagcagttttgttttgcttttggtggagagcacctgatcgcgactttacagccaatgtatttactctaaattacacttttatagatacaaggtaaagtgtagctgggtgaaggcactcaggagccataaaatgtggtcaaccacaataaattaaaatgtaagctaaacaaagtattcacacttgcatttttttaataaggaatttaagatccatagtatctttaatgcttggaagagacacaaattcaaggtgataaaaatattaattagaagacacataacatgcctcaagtatatcaacacttgactccacaaacaaggcataaccatgaaaacaacactccctttattttgggctcccaaaatcaaaagttagaactaatttatttaatcacagatatttagtatactcaataatgcactaacaatttctttaaaaaaacactaatactgtacagtatttctgtgttttagtttttcccacagctgttgaaaatttcagccttgatttgaaacatgacctgcatgacaggctataagttgtcaatagttctttttctttggaaaagtacagttgtggcatttactcactttagcagatagctaaaagggaaaaataaggaaaaatatacactggacctgcagttaagtttttgacaatgccaaggatcaaaaacagatgaaacaacatttgctgaagatgaaaaggtattgcattggtcttaatagatgttgccatctctgggtgaggatgctgactgagcctgttctgtgtcttcatcacctctatttgtttcttcttctacgacagacctccaagagacaagatccatgtagtaagccacactaggtccttttgacccttctcattcttctgtagtctcttccctgtgacttttgacaaaaatactcagttcacaatattagctgcctgcttctgatgggtaggaggtaatcaaaatactcccaccaaagcactctatggtctagacttgatacttaaaatttagttttcagcattcctcaacaaggataccttgaggtaataggagatattttggtaagtgaaaataattcctgcttggaacacagcctactgaactcaggatttaatttcttgagtattaggcagttctcaataaattgatgtatactgaggaatgattctaaagaggttagtgatatcctgtttgagaatagatttagaaaactgaaggtactctccagctctacaattctgtattaggaacaatagggaaatgagaaagtgcctctatattgcaatctaatgagtctctgggggaagactgtctacctgcgtagtagttgagaacaagacaagctcccaaacacatgaaaatcaacttgaaataacatcaaattcagcctgggcaatatcatgagaccttatatctacaaaaaattagccaggactggtggcacacgcctgtagtcccaagctacttgcgaggttgaggcaggaggatcacgagcctgagaggccaaggctgcagtgaggtgtgatcatgccactgcactccagtctgggtgacagagcaagaccctgtctcaacaaaataaaaaacatcaaattcattccatattcaggtaacagtgacatatatctactgaattatttttcttttaggaatgtctatatctatggattgtcactataaaaaaaagaaaaaaccctaaaactgagcttgacaaagggaataaaagcatactttgtttttcttggtgtccccatgttaataaatcatttcttctctttggctcaa

SEQ ID NO: 150108 - DNA, 1941 bp, Homo sapiens
  Payload ID: 9639
  Gene Symbol: LYRM2
  Gene Name: LYR motif containing 2
  ENST ID: ENST00000412237
  CDS Start-End: 19-315
ggcggacctctggtggacatggctgcttcccgcttacccccagcgacgctaacgttaaagcagttcgtaagaaggcaacaagttcttctcctctacagaaggattttgcaaacaattcggcaagttccaaatgattctgatcgcaaatacctgaaagattgggcaagagaagaattcagaagaaacaaaagtgccaccgaagaggcttcgcccacgactgaagcgcaagacctgaaggaggcaaacggcattgttacaaccactggtgtgcgcagcatctgtgtgagagaattctccttggacctggggctctgacctaatggaatttacagcttagagggtgagagcaggtgttcacatcaagcaagcacctctggaccacctaccatcctcctaggtcttgtcctgggcaccacggggactcggagacagggcacacccttcgtggatgagcgccgcgatgatctccgtgttccccaccactgtggcccggtgcaaggcggtctggtccccctgcaaagtgacacaaaggcaggaacagcagtcagctcccctgcaccccctgcttgcactactcacttgacacttggacacaaggacccctcccgtccccacacagagcagagcggttattcgcagaagggcttggttaccacaggcaaggcgggctttgtggtcttgttagtagacaacgcacgctggcagagaaattttgttcataaactaagagggggaccttaagccgacagcaagaatagccctcggccacagagccaacctcaaaatgagggtcaggctctctcctgccatccaggggctatgactatcacaggtgtgaagagtgggtgtgagggcaggtgtgtgctatgcaattaaagcagcaatgcctggaatctctactgcctgccgagtttccagcttgcagggggaccactgtccagctctgccagttagcagcactcatgatttgatgacaggcgggtcatttgttcattgacctgtactagtcaacggcaatgcaggggtttgccctatttcatctgaggactccagggactgcagctatcactgcatatttctaagaagcctcttcagagagttcatgacaacatcctcactgatttatgctgcactctgagccctcttctctatgatcggattcctgggattgccggccgttgttctcctttaggcgccaaagggaacttgactcttcctaattgcagttgagtgaaggatgaaacactcccagaggtaagcaggtcaagactgtaacaggagagttctgaagtctctaagagcaccctttatctctgacaggtcctcaggaagctaagttgaggtaaatcaagctgagcctgtggtccagccttgaaagggaggatgggtgggcagtgtggaaatgttctggtggaaagcaatgagcacgagacaaggggtcaggaggcctgggctgtgcatggcttgctagaagcctgtcaccctgctggacctcaggtgtgtcaccctggatgatcccagggtccctccattgccttcttggattctatgatgtggctggtcagagttttgtgaagtttcctggcagagcaccagaggggcaaagaaaacattctggggcgtccctggtgcttggcccaaaagaggacagaggccatcataagataaaacagattttttaaaagaaggatgcactgctacctataaacaaccttaacgaaatactgattctacttactaaactccccagatctgtaacaaacaatgcacattaaaaacatgtaatctgaaacaaagttctaaagatagatggtggtgatggttgcacaacaatgtgagtgtacttaatgccactgaaccgtatacgtaaatatgttcagacagtaaatttaatgctatgtatattttattacaataaaaaatcctagttaaaactcaaaa

SEQ ID NO: 150109 - DNA, 696 bp, Homo sapiens
  Payload ID: 9639
  Gene Symbol: LYRM2
  Gene Name: LYR motif containing 2
  ENST ID: ENST00000626778
  CDS Start-End: 1-297
atggctgcttcccgcttacccccagcgacgctaacgttaaagcagttcgtaagaaggcaacaagttcttctcctctacagaaggattttgcaaacaattcggcaagttccaaatgattctgatcgcaaatacctgaaagattgggcaagagaagaattcagaagaaacaaaagtgccaccgaagaggcttcgcccacgactgaagcgcaagacctgaaggaggcaaacggcattgttacaaccactggtgtgcgcagcatctgtgtgagagaattctccttggacctggggctctgacctaatggaatttacagcttagagggtgagagcaggtgttcacatcaagcaagcacctctggaccacctaccatcctcctaggtcttgtcctgggcaccacggggactcggagacaggcagctgggattcccagagaaaattctgcaaaacccatgctgaagtgaagaggaaccgaggccagaggccaaatgcaccttagcagagagctcctggagagaaggctagaaagataagaaactgaggctcaaagaagttaagcaacttgcacaattagcaaacaaagcagagttaaaatctgtgagcaggtgccctaactacagagtctgcactctctcccatttgtgattgcctgggccctggaaagtgctatgggtagatcacacaagctctgagttaag

SEQ ID NO: 150110 - DNA, 1487 bp, Homo sapiens
  Payload ID: 9640
  Gene Symbol: LYRM4
  Gene Name: LYR motif containing 4
  ENST ID: ENST00000463032
  CDS Start-End: 1-223
aacatatgctgtcaggaggataagagatgccttcagagaaaataaaaatgtaaaggatcctgtagaaattcaaaccctagtgaataaagccaagagagaccttggagtaattcgtcgacagataacggaatctcgctctgtcacccaggctggagtgcagtggcgtgatctcagcaacctccacctcccaggttcaaaccattcttctgcctcagcctcctgagtagctgggattattggcgcgtgccaccatggcctatatatttttagtagagacagggtttcaccgtgttggtcaggctggtctcagacttgtgacctcgtgatccacccgtctcgacctcccgaagtgctggaattataggcgtaagccactgcacccatcctcacctgcactcttactggccccttaactgggtcccctcgccacaactctccacctcttcttcgccttgacctgaagacaaggtccacattggccaactgtattcaactgacaagctgatcattgagaatcgagacatgcccaggacctagcaagccggggaccagccaccagtggcggccagggaccaccttcagcatccactctctgtttgagatgggggctcccaaaaccagcttacaatagccttttgcgctgcctgtcctgtgggagctgataaaccaagtcacatttgcattctgttgcaggcttagtgaaaaaggactgctgtctttccttggttcaagtgttagaatggagagctggagttcgttcagaatagtgctgtgtgttaccacgtctcccctgcaccccattcctaccttgtagctcatgaccattgtgtatagcatttctacactttgtttcttggtccttggcaataaaaagaatgatctccctgagcctttgaccccagataaacccctcccaattaatgcattttcatttcctactgatacaaggcctggagagggctgttgggggccctcagggagggttcaactctgagacgagaactgccttggtgaaggcaagttcaagcaccacttgagactgggggcagcatggagtagggcagggctacggggatacacggtgcaccctgcaacttatacctgagcccagtacaacaaaggtgacgggtgtgtaggtacacacccagagatggagcactgcagatcagcaacctcagccccacctgggaatttgctggaaatgcaggctcaagcccctccccacacctggtgaatgagagagccccagcctgacccaagcccagggcgactcccataccctgaagcctggggcatgctgggcagcaccggtgcccaaatctggctggtggacagaagcacctggagagttggagagctttttaaaaagacatctctcagcacttccctctctgcagattctgactcagtaagtgaggggtgaggcacagtcatttttctctattctgaagctctcccactgttttcaatgtttaaccaactgggga

SEQ ID NO: 150111 - DNA, 1168 bp, Homo sapiens
  Payload ID: 9640
  Gene Symbol: LYRM4
  Gene Name: LYR motif containing 4
  ENST ID: ENST00000468929
  CDS Start-End: 10-132
ctttccaaaatggcagcctccagtcgcgcacaagtgttatctctgtaccgggcgatgctgagagagagcaagcgtttcagcgcctacaattacaggtccacattggccaactgtattcaactgacaagctgatcattgagaatcgagacatgcccaggacctagcaagccggggaccagccaccagtggcggccagggaccaccttcagcatccactctctgtttgagatgggggctcccaaaaccagcttacaatagccttttgcgctgcctgtcctgtgggagctgataaaccaagtcacatttgcattctgttgcaggcttagtgaaaaaggactgctgtctttccttggttcaagtgttagaatggagagctggagttcgttcagaatagtgctgtgtgttaccacgtctcccctgcaccccattcctaccttgtagctcatgaccattgtgtatagcatttctacactttgtttcttggtccttggcaataaaaagaatgatctccctgagcctttgaccccagataaacccctcccaattaatgcattttcatttcctactgatacaaggcctggagagggctgttgggggccctcagggagggttcaactctgagacgagaactgccttggtgaaggcaagttcaagcaccacttgagactgggggcagcatggagtagggcagggctacggggatacacggtgcaccctgcaacttatacctgagcccagtacaacaaaggtgacgggtgtgtaggtacacacccagagatggagcactgcagatcagcaacctcagccccacctgggaatttgctggaaatgcaggctcaagcccctccccacacctggtgaatgagagagccccagcctgacccaagcccagggcgactcccataccctgaagcctggggcatgctgggcagcaccggtgcccaaatctggctggtggacagaagcacctggagagttggagagctttttaaaaagacatctctcagcacttccctctctgcagattctgactcagtaagtgaggggtgaggcacagtcatttttctctattctgaagctctcccactgttttcaatgtttaaccaactggggacccctgctctttaagtatattacaggtaataaagatattgtttgtatgctttta

SEQ ID NO: 150112 - DNA, 7312 bp, Homo sapiens
  Payload ID: 9640
  Gene Symbol: LYRM4
  Gene Name: LYR motif containing 4
  Uniprot ID: Q9HD34
  ENST ID: ENST00000330636
  CDS Start-End: 207-482
gcgcccgcccccgaagcggcgcgggacgcctggcgccgtccgcgatccgcagggctgcccgcttaggcttaggcccggcccgctggcaaagccgagccgcagcattttatttcgttcgtggtttccgcacaggctggagtttcgtgggttgggtcgtacttgggacctcggcgaagaggacccgtttatttttttttctttccaaaatggcagcctccagtcgcgcacaagtgttatctctgtaccgggcgatgctgagagagagcaagcgtttcagcgcctacaattacagaacatatgctgtcaggaggataagagatgccttcagagaaaataaaaatgtaaaggatcctgtagaaattcaaaccctagtgaataaagccaagagagaccttggagtaattcgtcgacaggtccacattggccaactgtattcaactgacaagctgatcattgagaatcgagacatgcccaggacctagcaagccggggaccagccaccagtggcggccagggaccaccttcagcatccactctctgtttgagatgggggctcccaaaaccagcttacaatagccttttgcgctgcctgtcctgtgggagctgataaaccaagtcacatttgcattctgttgcaggcttagtgaaaaaggactgctgtctttccttggttcaagtgttagaatggagagctggagttcgttcagaatagtgctgtgtgttaccacgtctcccctgcaccccattcctaccttgtagctcatgaccattgtgtatagcatttctacactttgtttcttggtccttggcaataaaaagaatgatctccctgagcctttgaccccagataaacccctcccaattaatgcattttcatttcctactgatacaaggcctggagagggctgttgggggccctcagggagggttcaactctgagacgagaactgccttggtgaaggcaagttcaagcaccacttgagactgggggcagcatggagtagggcagggctacggggatacacggtgcaccctgcaacttatacctgagcccagtacaacaaaggtgacgggtgtgtaggtacacacccagagatggagcactgcagatcagcaacctcagccccacctgggaatttgctggaaatgcaggctcaagcccctccccacacctggtgaatgagagagccccagcctgacccaagcccagggcgactcccataccctgaagcctggggcatgctgggcagcaccggtgcccaaatctggctggtggacagaagcacctggagagttggagagctttttaaaaagacatctctcagcacttccctctctgcagattctgactcagtaagtgaggggtgaggcacagtcatttttctctattctgaagctctcccactgttttcaatgtttaaccaactggggacccctgctctttaagtatattacaggtaataaagatattgtttgtatgcttttattcttggaaacagattcattccaaacatagaaagaacatattaaataacttgcttgtcatctggggagtttacgagggaccagacctggcagagcggtttcttgtttccctttgcatacagtgctcagtggatttggtatctgtgggttaaggtttggaacaggctcctataaatagcaccggtcctggaatagctgcagcactgtcaccccctcattttaactccgacggtcatgggagtgagtacgcactgtctgagcccgtgttcttctcaccctcatatgagaactcatgtcttccagtcgcttttagagagcatagatttgctgcaatgatgcgttcaaatagatgtaacgtgtagccattctatttggcagtacaacttttgatttcaggataaagtctttttttttgagatggagtctcgctctgtcacccaggctggagtgcagcggtgcgatcttggctcactgcaacctccacctcctgggttcaagccattctcctgcctcagcctcccgagtagctgggattacaggggcctgccaccacgcccagctaattttttgtatttttaatagagacggggtttcactatgttggccaggctggtcttgaactcctcggccccccaaagtgctggtattacaggcatgaaccaccaccccctgccaatttcaggataaagtcctgagcatctgtgaaaataatgaagctcttagcaagtcccagatctcttaccctctaaccagttcctgcctgggagctgcagtgttagagcatatgcaaagccctaattgggggagagctgttcggtggacagtgaacggaggtgatgtggcaagtataatcactcccttcagctgactgtcacggggcagagccgcccagcccagccctgtgtgtggctctggctcaggttttccaccttgcatcagtgcagtggagttcgtggtcactcagcagtgaatgcatccaaccacgctactaacgcacggcactgctgatttatacttaatttaagcaactgctacttggaaccgaagtccagatttgaacctccgtgctgaaggcatcaaattgccggcaagataacagctccagaggagacttctcccactcccccaggttttacgcaatgaggcagtccacccaaacttaacgtgggctgcaggctgtaacagcaggttgcttttgtgttcattaaactgcatgaatgggtttgaacatgcccaaagccttgctaatgcagacttaattttgtaaaattaactatgcctttggaatctgcagaaagatacaaatccgaattctgtggcaggaaacgccacaaacaggccttggtcctccacctttcaggtgtatatctggcaggcagagcctggcactgggtactccccaactgagatgacccaatattgatgctagagcttcgaataaagtggcattcccatgggggtgacccctggtgtttctctagggaagtattccacctccttgactatgcaccaactgaggggaatgtgggcaactccaacatccatcatggccagcctcacagaactctctagaacttgtgcctgctttgaagataggatccgggctggggtctggagatcactttgcagcactaatattgagcaaatgagaactactatcattagttaacttcccaggcagaactcattggccgagcaaggctatatcctagactttcagagacagctctgggctgggctggctgtcatgacataatagctgggagatcttgcacggccaagtacagggctgtgttgttctgatggctgttggaatctggattttggaactgaaagaattggctagattgctttaggtatactccgtcctgctgctaactaagtagcagtgacctttaactcccttcatccacagcctctcccgttaatctcaagccccaccatacaacccaccatcatccaggagcaaaagggacaggcagagggtgaagcctacaaagatgacaaacatcagagctcacctagtccaaccctcaaatcttcaggtgttaaaacaaagagcctgaacatctgcagatcacgtacagagtcagggcctttcccctaaacccctttcactcattcatttattcactcagtattgactaaggccacctagtgccaggtgccaggtgccagggagcaaccagtgaacaagacagacgtaccttcataaagcctgtgtctagcagggaaatctgagaagaaaatgacaagtcttatgaatgttacaaagagggaaatatgagtgctgccagagccgatgggacgggccagggaagggctccccaggggatatttacacgtgcaaattaatgatgaggattggctgtgtgaaggtggggagaggagctctctaggcaggaggaacagcacatgcaaagcccttaattgggggagagggtagttccatgcaaagaactaaagggagtctgggatggtggcagccaaggaagagggctctttccacatcgtggacggccttggagcctcagcctaaggatggtgagcaactcgggagtttttaggcaagatgaggtttttgttttgttttgttttgtttttttgagacagagtctcgctctgttgcccaggctggagtgcagtggcataatctcagctcactacaacctctgcctcccgggttcaagcaattctcctgcctcagcctcctgagtagctgggactacaggcgcacgccaccatgcccagctaagttttatattttttagtagacacaggatttcgccatgttggccaggctgctcttgaactcctgaccccagatgatccgcctgcctcggcctcccaaagtgctgggattacaggcgtgagccaccgcccccgaccgaagtttgtattttttaaaaggtcacattgtctgcttttgaggggatacactgggagagatgcagggagaccagcttttcggaggagtgggggattgggtgtggcattccaggcaagcgatggtgacttcaccaagaggcaacagctgaacagaagcagagtcagcatcaccctgagaactggctggggtgggccgccattgaaggaggacaggaaacctggagcagagctgccccagctgagcacagcccgagctccccagcccacctgccgatgcgcgagaaagtccacagagtcccctagcctggtctagcttaggtcagtcatattcagccacccctcagacatgtgctaaataattaactgttacattagtcactgagtttggaggtagattattatgaagtaacagcaaactaatacagagagcatctctgtattaatgtattaatgtattactttctcagggccacatagcaaaccaaagagtaggcagacaaacggccaaaactgcaggtctcctgtatggggacatttccacaaatatcttcagaatactggtcactccctttagagaacaagtcctggagaaacagtcgaaacagtcatcacgtgtcctacagatggaagggctggccaaccagaaagaaaagaaaaagtcgagtcagcagaacttggtgattgattggatgaggagaccaggcctgagggctgcagggagtctaggaggagtctcaggagcagggcctgaggaactaagaaggggctctggctgagaccagacaggagcagccactgtctggaattttgtccccactgctgacttcgaacaacctcaacttcaaacagaaagcccagactcgatgaatttatcttttcttcaaagtagagaaagggtagctcttttcttcccaggaaattgtttatccatttaataatttttaaaaatcactggagttgggtgtggtggctcatacctggtaatctcagcactttgagaggccgaagtgggcagatcacttgagctcaggagttcgagaccagcctgggcaacatagtgaaaccctgtctatacagaaaatacaaaaattagctgggtgtggtggcatgcaactgttgtcctagctactctggagcctgaggtgggaggatcacttgagcctggaaggcggaggttgcagtgagccatgatcgcaccactgcactccagcctggatgacagagtgataccctgtctaaaaaaaaaaaaataactgggataaaacaactcgaaagacccttataaagattttacccgtaactctgtagagcaaataacttcctgctttaggcaaagctctttgtgtgtaagttcgattggaagaggagggctggtggggggagattctctactttggtcatgagattaacattaaaagtttgaggaaggttgctctatatattggctgcctgtttctaagactgaaaataaaagcacagtaaaatatcaacaagtatacagaaaatatacatttgtagaaaattagcttttttttttttttttgctaagtacttcatataaactagtatttgctttctagattaaagaatatctcctccaggtgtggtggctcacacctgtaatcccagcactttgggaagccgaggtggatggaccacgatgtcaggagttcaagaccagcctggccaacatggtgaaaccccatctctcctaaagatacaaaaaaaattagccaggcgtggcagtgggcgcctgtaatcccagctactcaggagactgaggcagagaattgcttgaagccagaggcagaggttgcaatgagccgggatcacgccactgaactccagcctgggtgacagagtgagactcttgtctcaaaaaaaaaaaaaaaaaaaaaaatatctcagatattgaagcgaacctataaataacagcagaagctgaagaaaagataacggatcaaaaagcagaaggagaaagcttccctgtccccaaggacctgcccacagtcgtggatgagaagtcccttgataagtagggtctgaacccacgtgatcaaatgttagctctgtgaacctgtgccagtggctgtgtgtcagtagcccagggtgattcagaagctccatgaagcagccatctttcctggatctctggaatgtacacatttgctgagatcacaaagatgaagctggcagaacccgagtggatattcattattacgaacagaagaacagccaacaggagccgtgccatgtgcaaccccgagttgacagatgcctccccgcttcttctgtgtttgccagttgttacaaaatgatctagagaaaaactggaacttgatggagaaagcaatggcttacgattcagcaggctttcttggagagtttacctaaagtctatgtggacggtggctcagctcacctctgagaacaatacgatcttcacttttcaatctttctgcagctctaattagtgccacagggaaccatggatgaaaatggcttctcgtgttgatatccatttggggaataggatggatgcagctgcttttgctcaagggcagagttttgacttcaaagaccctgaagagaacccagaaggaaaactctcagaggtcaatggactatattctttacctgggggatcgttgacaccacagcagtaaaagcgaagtcagtgtcgtgctgtcttgaaattagatgacaagaatgactgacaccaatagagctggaactgcacttggagcctgagtagccggtctcaggctaaccacacctgtgctgaccacagcgtggcccgtgttgttcatgaggcattctggctgtacctccacagggatgcaagacttccagtgagaggctgcttctgcaagaaaatacctgcctagaaatggtccgctttctcttcctaataaagtgataagctttcttagtccaa

SEQ ID NO: 150113 - DNA, 941 bp, Homo sapiens
  Payload ID: 9640
  Gene Symbol: LYRM4
  Gene Name: LYR motif containing 4
  ENST ID: ENST00000480566
  CDS Start-End: 10-222
ctttccaaaatggcagcctccagtcgcgcacaagtgttatctctgtaccgggcgatgctgagagagagcaagcgtttcagcgcctacaattacagaacatatgctgtcaggaggataagagatgccttcagagaaaataaaaatgtaaaggatcctgtagaaattcaaaccctagtgaataaagccaagagagaccttggagtaattcgtcgacaggcataaagtccatagtcattgtctgccaccagatttgatggtgtatgaattatatctccataaagctgttaagagacatcaggaagagaccagagtttcttctgtgcggagccctctgccacaggaaaggaaggaagtctacccagtcttcctacaggcgctgctccttggggcggtttagcatgtcattaccacagactgtggctaggacctgtgggactcatttgtaaatgccaccttctttgacaacacctgggattgttgaaatggaagtaatcgattactagaagccattaattgaaagctgtgtgccaggcattgtagtaagacattataaataccatctaacttatgtaaaattgacattatcccattctgtaggtaaggaaactgagactacagggttaggtgaaacccaaggtttcggagccagtgattggcagagcaggtgtttaaaccaggtttgtcttgggacaaaccccaggctcttaagtactacattatcgtgtcttcccgcttctccaccctcaacccagccccagtcaaaaaggcagcaggaaaggggacaagttatcatttagaagaatactgatttggttttaaaagtattgaatagaatgaccaaatgatctagtgattccatttctcagtatataccccagagaactgaaagcagggactcaaaaggatacttgcccaccagtgttcagagcagtattattcac

SEQ ID NO: 150114 - DNA, 1401 bp, Homo sapiens
  Payload ID: 9640
  Gene Symbol: LYRM4
  Gene Name: LYR motif containing 4
  ENST ID: ENST00000464010
  CDS Start-End: 1-291
atggcagcctccagtcgcgcacaagtgttatctctgtaccgggcgatgctgagagagagcaagcgtttcagcgcctacaattacagaacatatgctgtcaggaggataagagatgccttcagagaaaataaaaatgtaaaggatcctgtagaaattcaaaccctagtgaataaagccaagagagaccttggagtaattcgtcgacaggtagctgagcaaggcacagccgccaggaggaagtcggggaacagcagccggagcctggggaagccctgcacaagttggccttgaggaaaccacctgacagacgtttgctcttcctcacagagctggtccacattggccaactgtattcaactgacaagctgatcattgagaatcgagacatgcccaggacctagcaagccggggaccagccaccagtggcggccagggaccaccttcagcatccactctctgtttgagatgggggctcccaaaaccagcttacaatagccttttgcgctgcctgtcctgtgggagctgataaaccaagtcacatttgcattctgttgcaggcttagtgaaaaaggactgctgtctttccttggttcaagtgttagaatggagagctggagttcgttcagaatagtgctgtgtgttaccacgtctcccctgcaccccattcctaccttgtagctcatgaccattgtgtatagcatttctacactttgtttcttggtccttggcaataaaaagaatgatctccctgagcctttgaccccagataaacccctcccaattaatgcattttcatttcctactgatacaaggcctggagagggctgttgggggccctcagggagggttcaactctgagacgagaactgccttggtgaaggcaagttcaagcaccacttgagactgggggcagcatggagtagggcagggctacggggatacacggtgcaccctgcaacttatacctgagcccagtacaacaaaggtgacgggtgtgtaggtacacacccagagatggagcactgcagatcagcaacctcagccccacctgggaatttgctggaaatgcaggctcaagcccctccccacacctggtgaatgagagagccccagcctgacccaagcccagggcgactcccataccctgaagcctggggcatgctgggcagcaccggtgcccaaatctggctggtggacagaagcacctggagagttggagagctttttaaaaagacatctctcagcacttccctctctgcagattctgactcagtaagtgaggggtgaggcacagtcatttttctctattctgaagctctcccactgttttcaatgtttaaccaactggggacccctgctctttaagtatattacaggtaataaagatattgtttgtatgct

SEQ ID NO: 150115 - DNA, 592 bp, Homo sapiens
  Payload ID: 9640
  Gene Symbol: LYRM4
  Gene Name: LYR motif containing 4
  ENST ID: ENST00000500576
  CDS Start-End: 5-397
caaaatggcagcctccagtcgcgcacaagtgttatctctgtaccgggcgatgctgagagagagcaagcgtttcagcgcctacaattacagaacatatgctgtcaggaggataagagatgccttcagagaaaataaaaatgtaaaggatcctgtagaaattcaaaccctagtgaataaagccaagagagaccttggagtaattcgtcgacagatggactctcactctgtcgcccaggctggagtgcattggaacgatctcagctcactacaacctctgcctccctggttcaagcaattctcctgcctcagcctcccgagtagctgggattataggcgcacgccaccacgcctggctaatttttgtattcttagtagagatgtgatttcactgtattagtcaggctggtctcgaagtcctgacctcaagtgatccacctgcctcagcctcccaaagtgctgggattacaggtgtgaaccactgtgcccggcagacaattataatttttatgtagttacatttcacttcattgtctttgaattttgtgtcatgctgaattcccactccaagacaataaaaattctcttgcatttc

SEQ ID NO: 150116 - DNA, 1134 bp, Homo sapiens
  Payload ID: 9641
  Gene Symbol: LYRM5
  Gene Name: LYR motif containing 5
  Uniprot ID: Q6IPR1
  ENST ID: ENST00000381356
  CDS Start-End: 160-432
ggccggcgccccgccccctttactgacaggttgcccacctcccccaacgccaccccgcttcgcagtagacggacagaggagtcgtagcggtcgaggcttttgcggctccggcgtgccggaaagtatgttatgcataaaagtggataatttacatgataaatgaaaatggccaattctttaagaggagaagtactaaaactttataaaaatctgctgtatcttggacgagactatccaaaaggagcagactattttaaaaagcgtttgaagaacattttccttaaaaacaaagatgtgaagaatccagagaagatcaaagaacttattgcacagggcgaatttgtaatgaaagagctagaagctttgtacttccttaggaaatacagagctatgaaacaacgctattattcagataccaacaaaactaattgatcattactactttaatttagctatcagtgccagctgtttatgtataccagatgttgtaaaataattctaacttaaaatgggaagatatacatgttgtgtaaaaaatccctgagctgccctactgaactaaataggtttcaacttctgttcatacggagaaagtatcagcaactttatgctcaattttgatacaaacatagcaatttagctatactaccgatcataaattaatgagcacccaattttgaatgaaaatataatacacttaatcctctaacttaataggacttagccaattatttttagcttatttctccattttactgacaagagaatgccatttaccgaacatttaataagcaaaataatttcttacacacttacttctcttaacttttgaaaggaatcccttattttttcacccaatttggtatattaacagcacatactcaaggttcactacaaaacaaacagttcctggtaatgatttaaatgtagttatagaaataaataatatgtatggagtcattacttctgaccttgaaatagcctgctggtgactggcattaacatacataactaactattcaattatttccattattaatgttgctgctgctacctttgggcctaaaaccaagtcacctgttgtgtatcaattaccttctttgataaaaggaaataaataaataatgttatcct

SEQ ID NO: 150117 - DNA, 833 bp, Homo sapiens
  Payload ID: 9641
  Gene Symbol: LYRM5
  Gene Name: LYR motif containing 5
  ENST ID: ENST00000556927
  CDS Start-End: 209-475
gcttcgcagtagacggacagaggagtcgtagcggtcgaggcttttgcggctccggcgtgccggaaagaaaacgtcaattatgacagcaggtaattttatcggaagtgtttataactatatcccagtacgtggaacgaaaaagttatcaagaaatatttattgaatgtatgttatgcataaaagtggataatttacatgataaatgaaaatggccaattctttaagaggagaagtactaaaactttataaaaatctgctgtatcttggacgagactatccaaaaggagcagactattttaaaaagcgtttgaagaacattttccttaaaaacaaagatgtgaagaatccagagaagatcaaagaacttattgcacagggcgaatttgtaatgaaagagctagaagctttgtacttccttaggaaatacagagctatgaaacaacgctattattcagataccaacaaaactaattgatcattactactttaatttagctatcagtgccagctgtttatgtataccagatgttgtaaaataattctaacttaaaatgggaagatatacatgttgtgtaaaaaatccctgagctgccctactgaactaaataggtttcaacttctgttcatacggagaaagtatcagcaactttatgctcaattttgatacaaacatagcaatttagctatactaccgatcataaattaatgagcacccaattttgaatgaaaatataatacacttaatcctctaacttaataggacttagccaattatttttagcttatttctccattttactgacaagagaatgccatttaccgaacatttaata

SEQ ID NO: 150118 - DNA, 1259 bp, Homo sapiens
  Payload ID: 9641
  Gene Symbol: LYRM5
  Gene Name: LYR motif containing 5
  ENST ID: ENST00000557540
  CDS Start-End: 170-436
ggccggcgccccgccccctttactgacaggttgcccacctcccccaacgccaccccgcttcgcagtagacggacagaggagtcgtagcggtcgaggcttttgcggctccggcgtgccggaaagtgcgtatgttatgcataaaagtggataatttacatgataaatgaaaatggccaattctttaagaggagaagtactaaaactttataaaaatctgctgtatcttggacgagactatccaaaaggagcagactattttaaaaagcgtttgaagaacattttccttaaaaacaaagatgtgaagaatccagagaagatcaaagaacttattgcacagggcgaatttgtaatgaaagagctagaagctttgtacttccttaggaaatacagagctatgaaacaacgctattattcagataccaacaaaactaattgatcattactactttaatttagctatcagtgccagctgtttatgtataccagatgttgtaaaataattctaacttaaaatgggaagatatacatgttgtgtaaaaaatccctgagctgccctactgaactaaataggtttcaacttctgttcatacggagaaagtatcagcaactttatgctcaattttgatacaaacatagcaatttagctatactaccgatcataaattaatgagcacccaattttgaatgaaaatataatacacttaatcctctaacttaataggacttagccaattatttttagcttatttctccattttactgacaagagaatgccatttaccgaacatttaataagcaaaataatttcttacacacttacttctcttaacttttgaaaggaatcccttattttttcacccaatttggtatattaacagcacatactcaaggttcactacaaaacaaacagttcctggtaatgatttaaatgtagttatagaaataaataatatgtatggagtcattacttctgaccttgaaatagcctgctggtgactggcattaacatacataactaactattcaattatttccattattaatgttgctgctgctacctttgggcctaaaaccaagtcacctgttgtgtatcaattaccttctttgataaaaggaaataaataaataatgttatcctatttttttgtcataaaggcagatttgttttgcatctacttctaaatatggttttaagtttaagcaaacacgcctttacataatatccacagcaccttttagaaataaaggatacttctaac

SEQ ID NO: 150119 - DNA, 783 bp, Homo sapiens
  Payload ID: 9641
  Gene Symbol: LYRM5
  Gene Name: LYR motif containing 5
  ENST ID: ENST00000555711
  CDS Start-End: 121-237
aacgccaccccgcttcgcagtagacggacagaggagtcgtagcggtcgaggcttttgcggctccggcgtgccggaaagtatgttatgcataaaagtggataatttacatgataaatgaaaatggccaattctttaagaggagaagtactaaaactttataaaaataaatatataatctttctttttgaagctgctgtatcttggacgagactatccaaaaggagcagactattttaaaaagcgtttgaagaacattttccttaaaaacaaagatgtgaagaatccagagaagatcaaagaacttattgcacagggcgaatttgtaatgaaagagctagaagctttgtacttccttaggaaatacagagctatgaaacaacgctattattcagataccaacaaaactaattgatcattactactttaatttagctatcagtgccagctgtttatgtataccagatgttgtaaaataattctaacttaaaatgggaagatatacatgttgtgtaaaaaatccctgagctgccctactgaactaaataggtttcaacttctgttcatacggagaaagtatcagcaactttatgctcaattttgatacaaacatagcaatttagctatactaccgatcataaattaatgagcacccaattttgaatgaaaatataatacacttaatcctctaacttaataggacttagccaattatttttagcttatttctccattttactgacaagagaatgccatttaccgaacatttaataagcaaaataattt

SEQ ID NO: 150120 - DNA, 1086 bp, Homo sapiens
  Payload ID: 9641
  Gene Symbol: LYRM5
  Gene Name: LYR motif containing 5
  ENST ID: ENST00000556885
  CDS Start-End: 117-383
ccaccccgcttcgcagtagacggacagaggagtcgtagcggtcgaggcttttgcggctccggcgtgccggaaagtatgttatgcataaaagtggataatttacatgataaatgaaaatggccaattctttaagaggagaagtactaaaactttataaaaatctgctgtatcttggacgagactatccaaaaggagcagactattttaaaaagcgtttgaagaacattttccttaaaaacaaagatgtgaagaatccagagaagatcaaagaacttattgcacagggcgaatttgtaatgaaagagctagaagctttgtacttccttaggaaatacagagctatgaaacaacgctattattcagataccaacaaaactaattgatcattactactttaatttagctatcagtgccagctgtttatgtataccagatgttgtaaaataattctaacttaaaatgggaagatatacatgttgtgtaaaaaatccctgagctgccctactgaactaaataggtttcaacttctgttcatacggagaaagtatcagcaactttatgctcaattttgatacaaacatagcaatttagctatactaccgatcataaattaatgagcacccaattttgaatgaaaatataatacacttaatcctctaacttaataggacttagccaattatttttagcttatttctccattttactgacaagagaatgccatttaccgaacatttaataagcaaaataatttcttacacacttacttctcttaacttttgaaaggaatcccttattttttcacccaatttggtatattaacagcacatactcaaggttcactacaaaacaaacagttcctggtaatgatttaaatgtagttatagaaataaataatatgtatggagtcattacttctgaccttgaaatagcctgctggtgactggcattaacatacataactaactattcaattatttccattattaatgttgctgctgctacctttgggcctaaaaccaagtcacctgttgtgtatcaattaccttctttgataaaaggaaataaataaataatgttatccta

SEQ ID NO: 150121 - DNA, 429 bp, Homo sapiens
  Payload ID: 9641
  Gene Symbol: LYRM5
  Gene Name: LYR motif containing 5
  ENST ID: ENST00000554266
  CDS Start-End: 220-345
ccgcttcgcagtagacggacagaggagtcgtagcggtcgaggcttttgcggctccggcgtgccggaaagaaaacgtcaattatgacagcaggtaattttatcggaagtgtttataactatatcccagtacgtggaacgaaaaagttatcaagaaatatttattgaatgtaaaaaaggtatgttatgcataaaagtggataatttacatgataaatgaaaatggccaattctttaagaggagaagtactaaaactttataaaaatgtaagtaattatgttgccaattttataaaaatgttattatatgacatggattgtttagaaatatataatctttctttttgaagctgctgtatcttggacgagactatccaaaaggagcagactattttaaaaagcgtttgaagaacattttccttaaaaacaaag

SEQ ID NO: 150122 - DNA, 708 bp, Homo sapiens
  Payload ID: 9641
  Gene Symbol: LYRM5
  Gene Name: LYR motif containing 5
  ENST ID: ENST00000553788
  CDS Start-End: 213-326
gcagtagacggacagaggagtcgtagcggtcgaggcttttgcggctccggcgtgccggaaagaaaacgtcaattatgacagcaggtaattttatcggaagtgtttataactatatcccagtacgtggaacgaaaaagttatcaagaaatatttattgaatgtaaaaaaggtatgttatgcataaaagtggataatttacatgataaatgaaaatggccaattctttaagaggagaagtactaaaactttataaaaataaaaaatataatattttggggagagtgaccatgactaatagcagtggaaaggagacaaaacctttgtgaacagtgtaactttacattcatcagggatgacaaactataggacatgatgcctagaagaatcatcatcaggaagcccataaatttgtgttccctcaatgtttcagtaaaaaccaattagaaggtctcaactgaaattagtaattaatccatttatgtgactagataaaacacagaatagggatgattcaaaagcttcattaatttgtttcacaccaacattcacaattggtaagaaaaataagaagtaatcaactgcatgcaccaaaagccccaagacagaaatcttaggtattcagtttctttttcacaggcattgctagttcaaaaaccaaaactctgggaatactggcacttagaggaaaaaaaaacttccactgtcatt

SEQ ID NO: 150123 - DNA, 233 bp, Homo sapiens
  Payload ID: 9641
  Gene Symbol: LYRM5
  Gene Name: LYR motif containing 5
  ENST ID: ENST00000556198
  CDS Start-End: 132-233
tgggaggcctgggcctctgcggtttaatccagcagggggatggggctcattccgcaatttaaagagagaaataagttggctccagagggtatgttatgcataaaagtggataatttacatgataaatgaaaatggccaattctttaagaggagaagtactaaaactttataaaaatctgctgtatcttggacgagactatccaaaaggagcagactattttaaaaagcgtttg

SEQ ID NO: 150124 - DNA, 838 bp, Homo sapiens
  Payload ID: 9641
  Gene Symbol: LYRM5
  Gene Name: LYR motif containing 5
  ENST ID: ENST00000556351
  CDS Start-End: 218-484
gcttcgcagtagacggacagaggagtcgtagcggtcgaggcttttgcggctccggcgtgccggaaagaaaacgtcaattatgacagcaggtaattttatcggaagtgtttataactatatcccagtacgtggaacgaaaaagttatcaagaaatatttattgaatgtaaaaaaggtatgttatgcataaaagtggataatttacatgataaatgaaaatggccaattctttaagaggagaagtactaaaactttataaaaatctgctgtatcttggacgagactatccaaaaggagcagactattttaaaaagcgtttgaagaacattttccttaaaaacaaagatgtgaagaatccagagaagatcaaagaacttattgcacagggcgaatttgtaatgaaagagctagaagctttgtacttccttaggaaatacagagctatgaaacaacgctattattcagataccaacaaaactaattgatcattactactttaatttagctatcagtgccagctgtttatgtataccagatgttgtaaaataattctaacttaaaatgggaagatatacatgttgtgtaaaaaatccctgagctgccctactgaactaaataggtttcaacttctgttcatacggagaaagtatcagcaactttatgctcaattttgatacaaacatagcaatttagctatactaccgatcataaattaatgagcacccaattttgaatgaaaatataatacacttaatcctctaacttaataggacttagccaattatttttagcttatttctccattttactgacaagagaatgccatttaccgaacattt

SEQ ID NO: 150125 - DNA, 874 bp, Homo sapiens
  Payload ID: 9641
  Gene Symbol: LYRM5
  Gene Name: LYR motif containing 5
  ENST ID: ENST00000556402
  CDS Start-End: 105-230
gcagtagacggacagaggagtcgtagcggtcgaggcttttgcggctccggcgtgccggaaagtatgttatgcataaaagtggataatttacatgataaatgaaaatggccaattctttaagaggagaagtactaaaactttataaaaatgtaagtaattatgttgccaattttataaaaatgttattatatgacatggattgtttagaaatatataatctttctttttgaagctgctgtatcttggacgagactatccaaaaggagcagactattttaaaaagcgtttgaagaacattttccttaaaaacaaagatgtgaagaatccagagaagatcaaagaacttattgcacagggcgaatttgtaatgaaagagctagaagctttgtacttccttaggaaatacagagctatgaaacaacgctattattcagataccaacaaaactaattgatcattactactttaatttagctatcagtgccagctgtttatgtataccagatgttgtaaaataattctaacttaaaatgggaagatatacatgttgtgtaaaaaatccctgagctgccctactgaactaaataggtttcaacttctgttcatacggagaaagtatcagcaactttatgctcaattttgatacaaacatagcaatttagctatactaccgatcataaattaatgagcacccaattttgaatgaaaatataatacacttaatcctctaacttaataggacttagccaattatttttagcttatttctccattttactgacaagagaatgccatttaccgaacatttaataagcaaaataatttcttacacacttacttctcttaacttttgaaaggaatcccttattttttc

SEQ ID NO: 150126 - DNA, 6351 bp, Homo sapiens
  Payload ID: 9642
  Gene Symbol: LYRM7
  Gene Name: LYR motif containing 7
  Uniprot ID: Q5U5X0
  ENST ID: ENST00000379380
  CDS Start-End: 212-526
agcaaacgcctttagcaaacgcccgtttagcaaacgcctcctccgtcctttggaggagggcggggctaaaagggagatgctgcctagtgattcgttgtggcgcattagtaacgcgactacagggggctggaaacagttcagtctttgattggttgctgagaggcggggctactcgactgctctggaggtagcggccgcggtgaggagagccatgggacgggcagtcaaggttttacagctctttaaaacactgcacaggaccagacaacaagtttttaaaaatgatgccagagcattagaagcagccagaataaagataaatgaagaattcaaaaataataaaagtgaaacttcttctaagaaaatagaagagctaatgaaaataggttctgatgttgaattattactcagaacatctgttatacaaggtattcacacagaccacaatacactgaaactggtccctaggaaagaccttcttgtagaaaatgtgccatattgtgatgcaccaactcagaagcaatgagttttctagaatacaacaagtctttgtactttttaactttaaaatctacaactctggcaaaagtcctggaaatgcagacattttccctgaactggcatattgaaaatgaatgaattacagaatagcttcatatttaaatttcatgttaaaaggtcattactgagaactaaagaacataattaagtatttctaaaggaaattagataagaaaacatttcattttcattgaaaatcaaatttcataaagcaaagtaaatgcttagggagatatattcaatctttgaccttgatgagtatttgatcttaccatagctatttgagaatgtggtgcttttacaaattggtgagttttcctgccatgtgaaatgcaattattacatttaaattgttagattaaaatgatatttagtcctgaaaaatattaaattggtcaaaaaaatcacagtgtatgccagctctctacagaaagtggcctttgttttctaaagcactgggattatttctgtagctaatatataattgtacagtttctttttagagatagagagtatctctgtgttcttatgaagacattttttatcagttttctgaaaatagatgaataaaatattatagtcacctagggtcactatggaataaagaaatcctagtttaaagaggaaatagtggcccttgatcaaactatttaatatggccttagtagaattagctgtatttagacaaagttagactttagtgtgaaatgtaatcggtggctacattctcatcgttttaattaatgaaacttaaatggcttctcttcttccacatgtcctgtccttgacaagatgggcagtatcacaaaaggtcctggcattctaccatctaacactaggaactgtaaaatactgtttaatattcttcttgtttctcttttatctgtgtatctttgccattctattttctcagtgaatagtatgttttctcccattcactgataaattctctcatttgatgatgatacagggtttttaatttttgcaagattctcaatgcaagcattgttatgtatctagaaattatacctagagaaaaatgaaagtcgtttcaaatttgaaatttgcccttttaagagaatgctgaatgtcatcgcagtatataatcactatataaatgtgctgacttacagttattttagtgtctatatgacatattttgaggaaagttggctgacgttatttaaatttaatatatattctatattttagtgttattgaatattttatcactgagcttttttctttaacctgaattccctgttccatttttcattcatattaatttaaataactccagatttctttcttatagtcattattagtagcagatgagattaataattcacatgtttattaaagatagtggcttagaaattttaagatatattgatataggcccgggcgctgtggctcacacctgtaatcccgcactttgggaggctgaggcgggcagatcacaaggtcaggagttcgagaccagcctggccaatgtggtgaaaccccatctctactaaaaacacaaaaattagccaggtatggtggcgggcgcctgtagtcccagctactcgggaggctgaggcaggaaaatcacttgaacccgggaggtggaggttgcagtgaactgagattgtgccactgcactccagcctgggggacagagtgagactctgtctcaaaaaaaaaaaagaaaaaaaaaggaaaaaggaaaaaaaaaagatatattgatacagataggtagatatgatattgtactttcatgccataagactacacaataaagttcctgaaagttcctggctgggcgcagtggctcacgcctgtaatcccagcactttgggaggccgaggcaggcagatcacctgaggtcaggagttctagaccagcctgaccaacatggggaaaccctgtctctactaaaaaaaatacagaattagccaggtgtggtggcacatgtctgtaatcccagctactcgggagactgaggcaggagaattgcttgaacccaggagacggaggttgcagtgagccgagatcgcaccattgcactccagcctaggcaacaagagtgaaactccgtctcaaaaataaataaataaataaagttcctgtgaagtatataaacatgtcaacaacaggcttgactgtcacaaaattctgaaagatgtcgcactctattcttatatagcatatgctaatttatttatttattttttgagattgagttctgctgtgtcacccaggttggagtgcagtggcatggtcatggtccactaaagccttgacccctggggctcagcagttatgccaactaagcctcccaaatagctgagactagaggtatgcgccaccacacctagctattttttttatttttagtaaggacaaggtctcattatgttggccaggctggtctcaaattcctgagctcagttgatcctcccacctcagcctcccaaagtgctgggattacaggtgtaagccactgcaccctgcctattcttataatcatatatttatatttcaaatggattttaactggttatttaatagtttaattagataaagtaattcatggctgggtgtggtggctcacgcctgtaatcccagcactttggcaggctgaggcaggtggattacctgaggtcggaagttcgagaccagcccaaccaacgtggagaaaccccatctctattaaaaatgcaaaattagcaggacatggtgatacacacctgtaatcccagctagtcaggaggctgaggcaggagaattacttgagccagggaagcagaggttgtggtgagctaagattgtgccactgcactccagcctgagagaacaagactccgtctcaaaaaaagaaaaaaagaaaacttttttacacatgggtatctcaccatgttgcccaggctggagtgcagtagctattcataggcacagtcatagcacactgcagcctagaatttctgacctcaagcaatcatcctgcctcagcctcctaagtagctaggactacaggtgcataccaccataaccagctttaattaaatgttttttatttggttattttttttaagttttctgtattcacacaaggggttgcccaaatataattttgctttgactattgagatctagtgaaagtggggtatatgaattctaattgcaaatatccaggctcagaggcccagcaggactttctaacacaatcttttagcggaagttagaaatggtatatagcaggagagtcagatttgagaagcatatgtagattcgaagctgggggaatatggcaggtagtttgtacaacatctaattcagaacattaaaattaagattttagtcaaactgtgtttaagttagttcttattttcctgtagatgcatctcacagcatcagtacaataccaaaaaagcacacaagaataagaatatgtggaatttctatacctattgacaaagcacataatttaaccataaacacaaagccataggtcaacaaagaaatgaagattccagttctgaaggtgagttttctgaagccaaagtggatacatgcaaaattaatatagttttactgtatatcagttgtcaccaatcagaaatggaaaacagatcctatttataattgcaaacaaaactgtaaaatagactttttaaagtctgggaatagacttctaaaataagctataacacttaaaaaggagagatatactatgttcctagataggacaattgaaaattctggagatgacagtttttcaaaaatctattgaggccaggtgcagtggcccatgcctgtagttccagtactttgggaggcctaggtgggtggatcacctgaggttgggagtttgagaccagcctgaccaacatggagaaaccccgtctctactaaaaatacaaaattagccaggcgtggtggtgcatgcctgtaatcccagctactcgggaggctgaggcgtgagaatcgcttgaacccggtaggcagatgttgcagtgagccgagatcgcaccattgcactccagcctaggcaacaagagcgaaactccatctcaaaaatagaaaaaacatttatcgaaatcccaacaagttgacaaatatatccacataaaaatataaaacttctgtattctgtgaaagctactataaataaagtttagagaaagttatttgccacctatgtcatgattgaaatagttaattgatcctgtgaatcagttagcaaaacataactcaatggaaagataggcaaatgatacaaataagaaattcacaaaagaagaaatactaagtctctagtgatgagagaaatgtaaattaaaatgaaacatgtttgttcatcaagttgtcacaagttagacaatcatatccaatatttttaaaggttgtaagactataaggaaatagccactgtcatatcatttttaaaggaatataaattatagggccttttgtttctttgggttttttttttttagagacaagatctctccgtgttgtctaggctggactcaaacttctggactcaagcaatcctcgcaacatcattaatagctgagagtagagacttgagccaccacacctgactatagggcctttttgaaaggaaaattgacatcatcaaaattttaaatatattcagtctatttctcaaaaactcaaagaatactaataaatgtgtactcaggtatatgtacagaaattgctgtaacattataattttaaacaatttaaaacagactgagtttccaaagttagggtacaatgaaagaaaaggtggcttatttatactctggaatattttccaagagttgaaaaggatgaggatacacacacacacacacacacacacacacacacacacacacacacacagtttgggtatccctaatccagaaattcaaatgctccaaagtccaaaactttctgacccaccaacatgactgatgctcaaaggaaatggccactggaagatttcagattttcagatttggagtgctcaaccagtaagtatataatgcaaataatccaaaatacaaaaaaaaaaaaaaagaaatctgaaacacttctgatcccaagcatttcagaaaacggatgttcatttgtgtgtgtgtgtgtgtgtaagcaggtgttgctagaaattcacttatatacaagaaaactttttgtgtacatatttgcatatatatgtacaaatgggtagaaacgatacatgattaatcttaatcgggaaggaaaagagatttagggaaggaagcagtaagtgagaacttttattctatttactcctgcacgtttaaatattgtttacagtgagtatatcaacatgtaagtgttaaaagacaataagctactagtgatttttaatataaaattaactataaaatattttaaatattagcaaataatatagcacactcatgaacctaattcccacatttgatagttgttacattttgccatgtttgtttaaaggtctaagtcataaaatcttataaagctaaaccccacccttctctttctcctctctctccaggataattactgttttatagtttgtggatatcattcccttacttgtgtttatacttttaccaagtgtgtatgtattcaaaaaacagttgttttgtgattttaaaatgtaaatgaatggcgttatgctccatgtattctgcaacttttcatcatacattaggttttggcgatttagccataatttggcatgaattcaggtcttttaagttttattccattgtaagaataaacaagtttgttcattcatgtctc

SEQ ID NO: 150127 - DNA, 604 bp, Homo sapiens
  Payload ID: 9642
  Gene Symbol: LYRM7
  Gene Name: LYR motif containing 7
  ENST ID: ENST00000510516
  CDS Start-End: 78-239
agttcagtctttgattggttgctgagaggcggggctactcgactgctctggaggtagcggccgcggtgaggagagccatgggacgggcagtcaaggttttacagctctttaaaacactgcacaggaccagacaacaagtttttaaaaatgatgccagagcattagaagaactggtccctaggaaagaccttcttgtagaaaatgtgccatattgtgatgcaccaactcagaagcaatgagttttctagaatacaacaagtctttgtactttttaactttaaaatctacaactctggcaaaagtcctggaaatgcagacattttccctgaactggcatattgaaaatgaatgaattacagaatagcttcatatttaaatttcatgttaaaaggtcattactgagaactaaagaacataattaagtatttctaaaggaaattagataagaaaacatttcattttcattgaaaatcaaatttcataaagcaaagtaaatgcttagggagatatattcaatctttgaccttgatgagtatttgatcttaccatagctatttgagaatgtggtgcttttacaaattggtgagttttcctgccatgtgaa

SEQ ID NO: 150128 - DNA, 317 bp, Homo sapiens
  Payload ID: 9642
  Gene Symbol: LYRM7
  Gene Name: LYR motif containing 7
  ENST ID: ENST00000507584
  CDS Start-End: 33-224
ctctggaggtagcggccgcggtgaggagagccatgggacgggcagtcaaggttttacagctctttaaaacactgcacaggaccagacaacaagtttttaaaaatgatgccagagcattagaagcagccagaataaagataaatgaagaattcaaaaataataaaagtgaaacttcttctaagaaaatagaagagaactggtccctaggaaagaccttcttgtagaaaatgtgccatattgtgatgcaccaactcagaagcaatgagttttctagaatacaacaagtctttgtactttttaactttaaaatctacaac

SEQ ID NO: 150129 - DNA, 501 bp, Homo sapiens
  Payload ID: 9643
  Gene Symbol: LYRM9
  Gene Name: LYR motif containing 9
  Uniprot ID: A8MSI8
  ENST ID: ENST00000379102
  CDS Start-End: 86-322
agtccccggggcgcaggcgcactcgtcgccgcggcggcgtccggggctggcgttcccctggaggctgggacagagggtctcacggatggccccgctgccaggagcagaactggttcggaggccactgcagctctaccgatacttgctgcgctgttgccagcagctgccgaccaagggcatccagcagcattacaagcatgctgtcaggcagagttttcgggttcattcagatgaagacaaccctgagagaatccagcagattattaaaagagccattgaagatgctgactggatcatgaacaaatataaaaaacaaaactgagagctccgagggtgagccttcctggcctctggaagttgagaggcccctcttctggagctcagcagcagcagctggtttggaagagccattggccttgttggctgaaagccagaaatcaggggagaagctgaccttgctccagaggctcctcttgccgcggccatgttgctagcatcctt

SEQ ID NO: 150130 - DNA, 1685 bp, Homo sapiens
  Payload ID: 9643
  Gene Symbol: LYRM9
  Gene Name: LYR motif containing 9
  Uniprot ID: A8MSI8
  ENST ID: ENST00000379103
  CDS Start-End: 290-526
gaactaatacagtatagtttcttgttcttcagaagcttacagtcagcaaggaacagaaagccaaataaagtaggaaagggctcaggcctgtaggcattctcccctctgtggcttggtgccctcgccagaccatggctgatgtcagagctggtttcctagtgattgcccctcagggtcttcctgcttttctaccctaccctgccggtgagggacacctactcatgcaccacttgaagttgagttccagaaagaagacgccagggatgaggctggacagagggtctcacggatggccccgctgccaggagcagaactggttcggaggccactgcagctctaccgatacttgctgcgctgttgccagcagctgccgaccaagggcatccagcagcattacaagcatgctgtcaggcagagttttcgggttcattcagatgaagacaaccctgagagaatccagcagattattaaaagagccattgaagatgctgactggatcatgaacaaatataaaaaacaaaactgagagctccgagggtgagccttcctggcctctggaagttgagaggcccctcttctggagctcagcagcagcagctggtttggaagagccattggccttgttggctgaaagccagaaatcaggggagaagctgaccttgctccagaggctcctcttgccgcggccatgttgctagcatcctttatgtttgcacttccagccacttacgatgtgaaatttggggagaatgtagtatttttttgcttcttttgtgtgttttttatttttgtgtttttgttcttttacttttctctgaaagtgattcatttattctggagatctctttatcattctctgagtcccagagcagatgtcccctcaggtagcaacctgtacagaagaaagcacgtgggttttagaaccagacagatctggatttgaatcccagatgcaataagatgaaggtgaagtgcctcacacaggatgtggcacatgacagtgcctgaagggctcccttcaaggaagccgtcctgccccgccccctcctctgctcctgcagcgccctgcacagctctgctccccgcatgcaccgcatcgggtctcagttttttgtttgcgagcttgccctgtccctgcttgtagcccctgagccctcacagttgtcacacacccagcagtctgccaaggagctgcttttcctgactactgtctctccatgcctagggaagtcaaagccctgggccttgccttcagggagttgacagtgtccttgaagtggtgaagtgcccaccacatgaaccaaggagagacgccaaagcagctgccatggactctggcctgtccaagcctctgtgcacctgcagtctctttccactggcacttccctgctttgctaccatcgtggaagaatggaagggagggggagaaggtgggtgggctcagggagaacggccagagtggccagaagatgcagagagaagccccactgggatctgagtattccccaagggcactcagccacagggatgaactagtgtttgtttgtatccttgcagttatgtgacttaaagtgactcagagatatctatgtatgcgagtgtactccgctggcaatgaagtaaatatatcaatttgtggaagctcgtgtgtcttctcaactgataaaccatacgttccctaagca

SEQ ID NO: 150131 - DNA, 432 bp, Homo sapiens
  Payload ID: 9643
  Gene Symbol: LYRM9
  Gene Name: LYR motif containing 9
  ENST ID: ENST00000503642
  CDS Start-End: 131-391
ctgggttcacctgccataggttcttgacttcaggacagtttcctgctggctttagtttcctctggtaacttgggaatcaattgacatctatggaacttctgttatggttcagggacagagggtctcacggatggccccgctgccaggagcagaactggttcggaggccactgcagctctaccgatacttgctgcgctgttgccagcagctgccgaccaagggcatccagcagcattacaagcatgctgtcaggcagagttttcgggttcattcagatgaagacaaccctgagagaatccagcagattattaaaagagccattgaagatgctgactggatcatgaacaaagtaggtgcttggcccctgggctctgcctgcgagctggggtgatgatggctgtgatccccatgaccactagaggccactcctgc

SEQ ID NO: 150132 - DNA, 807 bp, Homo sapiens
  Payload ID: 9643
  Gene Symbol: LYRM9
  Gene Name: LYR motif containing 9
  ENST ID: ENST00000508862
  CDS Start-End: 86-364
agtccccggggcgcaggcgcactcgtcgccgcggcggcgtccggggctggcgttcccctggaggctgggacagagggtctcacggatggccccgctgccaggagcagaactggttcggaggccactgcagctctaccgatacttgctgcgctgttgccagcagctgccgaccaagggcatccagcagcattacaagcatgctgtcaggcagagttttcgggttcattcagatgaagacaaccctgagagaatccagcagattattaaaagagccattgaagatgctgactggatcatgaacaaattgagaatggtccctgtggaggaggccaccagccagctgcttccctcctccagaagctgaaagtataaaaaacaaaactgagagctccgagggtgagccttcctggcctctggaagttgagaggcccctcttctggagctcagcagcagcagctggtttggaagagccattggccttgttggctgaaagccagaaatcaggggagaagctgaccttgctccagaggctcctcttgccgcggccatgttgctagcatcctttatgtttgcacttccagccacttacgatgtgaaatttggggagaatgtagtatttttttgcttcttttgtgtgttttttatttttgtgtttttgttcttttacttttctctgaaagtgattcatttattctggagatctctttatcattctctgagtcccagagcagatgtcccctcaggtagcaacctgtacagaagaaagcacgtgggttttagaaccagacagatctggatttgaatccc

SEQ ID NO: 150133 - DNA, 460 bp, Homo sapiens
  Payload ID: 9643
  Gene Symbol: LYRM9
  Gene Name: LYR motif containing 9
  ENST ID: ENST00000508816
  CDS Start-End: 378-460
gattcatgcttctcagactttaaaatgtgcctgcaaatctcctggcatccttgttaaaatgcaggtttgatctggtgggtctttggggtggggcccaagactacatttgtgatgagctcccgatgctgtgggttttgctggttcaggagcacactttgaatttcaaggctcaggcctgtaggcattctcccctctgtggcttggtgccctcgccagaccatggctgatgtcagagctggtttcctagtgattgcccctcagggtcttcctgcttttctaccctaccctgccggtgagggacacctactcatgcaccacttgaagttgagttccagaaagaagacgccagggatgaggctggacagagggtctcacggatggccccgctgccaggagcagaactggttcggaggccactgcagctctaccgatacttgctgcgctgttgccagcagctgcc

SEQ ID NO: 150134 - DNA, 2196 bp, Homo sapiens
  Payload ID: 9643
  Gene Symbol: LYRM9
  Gene Name: LYR motif containing 9
  ENST ID: ENST00000460380
  CDS Start-End: 62-322
gtcgccgcggcggcgtccggggctggcgttcccctggaggctgggacagagggtctcacggatggccccgctgccaggagcagaactggttcggaggccactgcagctctaccgatacttgctgcgctgttgccagcagctgccgaccaagggcatccagcagcattacaagcatgctgtcaggcagagttttcgggttcattcagatgaagacaaccctgagagaatccagcagattattaaaagagccattgaagatgctgactggatcatgaacaaagtaggtgcttggcccctgggctctgcctgcgagctggggtgatgatggctgtgatccccatgaccactagaggccactcctgccccacagttgagaatggtccctgtggaggaggccaccagccagctgcttccctcctccagaagctgaaaggtgaagacaaatcccttctggttgcatttatattctgcaagtggggaggggctctcactcttcatccttaaaggcaaatttctgcccaacagtgctgatcgagctgagagggggcagcaggaagaaggagggaaagctatagtgccagagccggcggtggcactgtgatgccgcagagagggaagctgtcctggcgggggactccctgtctctggggggtattcacactggggcagaattatggaggaaacattcagtatgttttggtggaggaagggagtgagtcaggaatgtagactggcgtcttggcccttagatgctggtattagaaggacctagagagttggagtgtgaccatacctccctgtccttctaactcactctccagagtgagttatcactatcctccctccccagccctgtcagcttcctttttcactaaagaagaaagggagtccaggcatgaactagagatttggctgcccagtgcctcctgcttgggtttcaccacctccaagaagcccctgcaggaggcaggtgaggtccagatgatggaggcctgagatttctccagagtcctcctgcccctgttggcttccctcctccacttcgaatctctctgtcttgcagtataaaaaacaaaactgagagctccgagggtgagccttcctggcctctggaagttgagaggcccctcttctggagctcagcagcagcagctggtttggaagagccattggccttgttggctgaaagccagaaatcaggggagaagctgaccttgctccagaggctcctcttgccgcggccatgttgctagcatcctttatgtttgcacttccagccacttacgatgtgaaatttggggagaatgtagtatttttttgcttcttttgtgtgttttttatttttgtgtttttgttcttttacttttctctgaaagtgattcatttattctggagatctctttatcattctctgagtcccagagcagatgtcccctcaggtagcaacctgtacagaagaaagcacgtgggttttagaaccagacagatctggatttgaatcccagatgcaataagatgaaggtgaagtgcctcacacaggatgtggcacatgacagtgcctgaagggctcccttcaaggaagccgtcctgccccgccccctcctctgctcctgcagcgccctgcacagctctgctccccgcatgcaccgcatcgggtctcagttttttgtttgcgagcttgccctgtccctgcttgtagcccctgagccctcacagttgtcacacacccagcagtctgccaaggagctgcttttcctgactactgtctctccatgcctagggaagtcaaagccctgggccttgccttcagggagttgacagtgtccttgaagtggtgaagtgcccaccacatgaaccaaggagagacgccaaagcagctgccatggactctggcctgtccaagcctctgtgcacctgcagtctctttccactggcacttccctgctttgctaccatcgtggaagaatggaagggagggggagaaggtgggtgggctcagggagaacggccagagtggccagaagatgcagagagaagccccactgggatctgagtattccccaagggcactcagccacagggatgaactagtgtttgtttgtatccttgcagttatgtgacttaaagtgactcagagatatctatgtatgcgagtgtactccgctggcaatgaagtaaatatatcaatttgtggaa

SEQ ID NO: 150135 - DNA, 3033 bp, Homo sapiens
  Payload ID: 9644
  Gene Symbol: KDM1A
  Gene Name: lysine (K)-specific demethylase 1A
  Uniprot ID: O60341
  ENST ID: ENST00000356634
  CDS Start-End: 150-2708
ggcgcggcgggagcgcgcttggcgcgtgcgtacgcgacggcggttggcggcgcgcgggcagcgtgaagcgaggcgaggcaaggcttttcggacccacggagcgacagagcgagcggcccctacggccgtcggcggcccggcggcccgagatgttatctgggaagaaggcggcagccgcggcggcggcggctgcagcggcagcaaccgggacggaggctggccctgggacagcaggcggctccgagaacgggtctgaggtggccgcgcagcccgcgggcctgtcgggcccagccgaggtcgggccgggggcggtgggggagcgcacaccccgcaagaaagagcctccgcgggcctcgccccccgggggcctggcggaaccgccggggtccgcagggcctcaggccggccctactgtcgtgcctgggtctgcgacccccatggaaactggaatagcagagactccggaggggcgtcggaccagccggcgcaagcgggcgaaggtagagtacagagagatggatgaaagcttggccaacctctcagaagatgagtattattcagaagaagagagaaatgccaaagcagagaaggaaaagaagcttcccccaccaccccctcaagccccacctgaggaagaaaatgaaagtgagcctgaagaaccatcgggtgtggagggcgcagctttccagagccgacttcctcatgaccggatgacttctcaagaagcagcctgttttccagatattatcagtggaccacaacagacccagaaggtttttcttttcattagaaaccgcacactgcagttgtggttggataatccaaagattcagctgacatttgaggctactctccaacaattagaagcaccttataacagtgatactgtgcttgtccaccgagttcacagttatttagagcgtcatggtcttatcaacttcggcatctataagaggataaaacccctaccaactaaaaagacaggaaaggtaattattataggctctggggtctcaggcttggcagcagctcgacagttacaaagttttggaatggatgtcacacttttggaagccagggatcgtgtgggtggacgagttgccacatttcgcaaaggaaactatgtagctgatcttggagccatggtggtaacaggtcttggagggaatcctatggctgtggtcagcaaacaagtaaatatggaactggccaagatcaagcaaaaatgcccactttatgaagccaacggacaagctgttcctaaagagaaagatgaaatggtagagcaagagtttaaccggttgctagaagctacatcttaccttagtcatcaactagacttcaatgtcctcaataataagcctgtgtcccttggccaggcattggaagttgtcattcagttacaagagaagcatgtcaaagatgagcagattgaacattggaagaagatagtgaaaactcaggaagaattgaaagaacttcttaataagatggtaaatttgaaagagaaaattaaagaactccatcagcaatacaaagaagcatctgaagtaaagccacccagagatattactgccgagttcttagtgaaaagcaaacacagggatctgaccgccctatgcaaggaatatgatgaattagctgaaacacaaggaaagctagaagaaaaacttcaggagttggaagcgaatcccccaagtgatgtatatctctcatcaagagacagacaaatacttgattggcattttgcaaatcttgaatttgctaatgccacacctctctcaactctctcccttaagcactgggatcaggatgatgactttgagttcactggcagccacctgacagtaaggaatggctactcgtgtgtgcctgtggctttagcagaaggcctagacattaaactgaatacagcagtgcgacaggttcgctacacggcttcaggatgtgaagtgatagctgtgaatacccgctccacgagtcaaacctttatttataaatgcgacgcagttctctgtacccttcccctgggtgtgctgaagcagcagccaccagccgttcagtttgtgccacctctccctgagtggaaaacatctgcagtccaaaggatgggatttggcaaccttaacaaggtggtgttgtgttttgatcgggtgttctgggatccaagtgtcaatttgttcgggcatgttggcagtacgactgccagcaggggtgagctcttcctcttctggaacctctataaagctccaatactgttggcactagtggcaggagaagctgctggtatcatggaaaacataagtgacgatgtgattgttggccgatgcctggccattctcaaagggatttttggtagcagtgcagtacctcagcccaaagaaactgtggtgtctcgttggcgtgctgatccctgggctcggggctcttattcctatgttgctgcaggatcatctggaaatgactatgatttaatggctcagccaatcactcctggcccctcgattccaggtgccccacagccgattccacgactcttctttgcgggagaacatacgatccgtaactacccagccacagtgcatggtgctctgctgagtgggctgcgagaagcgggaagaattgcagaccagtttttgggggccatgtatacgctgcctcgccaggccacaccaggtgttcctgcacagcagtccccaagcatgtgagacagatgcattctaagggaagaggcccatgtgcctgtttctgccatgtaaggaaggctcttctagcaatactagatcccactgagaaaatccaccctggcatctgggctcctgatcagctgatggagctcctgatttgacaaaggagcttgcctcctttgaatgacctagagcacagggaggaacttgtccattagtttggaattgtgttcttcgtaaagactgaggcaagcaagtgctgtgaaataacatcatcttagtcccttggtgtgtggggtttttgttttttttttatattttgagaataaaacttcatataaaattg

SEQ ID NO: 150136 - DNA, 3059 bp, Homo sapiens
  Payload ID: 9644
  Gene Symbol: KDM1A
  Gene Name: lysine (K)-specific demethylase 1A
  Uniprot ID: O60341
  ENST ID: ENST00000400181
  CDS Start-End: 105-2735
ggcggcgcgcgggcagcgtgaagcgaggcgaggcaaggcttttcggacccacggagcgacagagcgagcggcccctacggccgtcggcggcccggcggcccgagatgttatctgggaagaaggcggcagccgcggcggcggcggctgcagcggcagcaaccgggacggaggctggccctgggacagcaggcggctccgagaacgggtctgaggtggccgcgcagcccgcgggcctgtcgggcccagccgaggtcgggccgggggcggtgggggagcgcacaccccgcaagaaagagcctccgcgggcctcgccccccgggggcctggcggaaccgccggggtccgcagggcctcaggccggccctactgtcgtgcctgggtctgcgacccccatggaaactggaatagcagagactccggaggggcgtcggaccagccggcgcaagcgggcgaaggtagagtacagagagatggatgaaagcttggccaacctctcagaagatgagtattattcagaagaagagagaaatgccaaagcagagaaggaaaagaagcttcccccaccaccccctcaagccccacctgaggaagaaaatgaaagtgagcctgaagaaccatcggggcaagcaggaggacttcaagacgacagttctggagggtatggagacggccaagcatcaggtgtggagggcgcagctttccagagccgacttcctcatgaccggatgacttctcaagaagcagcctgttttccagatattatcagtggaccacaacagacccagaaggtttttcttttcattagaaaccgcacactgcagttgtggttggataatccaaagattcagctgacatttgaggctactctccaacaattagaagcaccttataacagtgatactgtgcttgtccaccgagttcacagttatttagagcgtcatggtcttatcaacttcggcatctataagaggataaaacccctaccaactaaaaagacaggaaaggtaattattataggctctggggtctcaggcttggcagcagctcgacagttacaaagttttggaatggatgtcacacttttggaagccagggatcgtgtgggtggacgagttgccacatttcgcaaaggaaactatgtagctgatcttggagccatggtggtaacaggtcttggagggaatcctatggctgtggtcagcaaacaagtaaatatggaactggccaagatcaagcaaaaatgcccactttatgaagccaacggacaagctgacactgtcaaggttcctaaagagaaagatgaaatggtagagcaagagtttaaccggttgctagaagctacatcttaccttagtcatcaactagacttcaatgtcctcaataataagcctgtgtcccttggccaggcattggaagttgtcattcagttacaagagaagcatgtcaaagatgagcagattgaacattggaagaagatagtgaaaactcaggaagaattgaaagaacttcttaataagatggtaaatttgaaagagaaaattaaagaactccatcagcaatacaaagaagcatctgaagtaaagccacccagagatattactgccgagttcttagtgaaaagcaaacacagggatctgaccgccctatgcaaggaatatgatgaattagctgaaacacaaggaaagctagaagaaaaacttcaggagttggaagcgaatcccccaagtgatgtatatctctcatcaagagacagacaaatacttgattggcattttgcaaatcttgaatttgctaatgccacacctctctcaactctctcccttaagcactgggatcaggatgatgactttgagttcactggcagccacctgacagtaaggaatggctactcgtgtgtgcctgtggctttagcagaaggcctagacattaaactgaatacagcagtgcgacaggttcgctacacggcttcaggatgtgaagtgatagctgtgaatacccgctccacgagtcaaacctttatttataaatgcgacgcagttctctgtacccttcccctgggtgtgctgaagcagcagccaccagccgttcagtttgtgccacctctccctgagtggaaaacatctgcagtccaaaggatgggatttggcaaccttaacaaggtggtgttgtgttttgatcgggtgttctgggatccaagtgtcaatttgttcgggcatgttggcagtacgactgccagcaggggtgagctcttcctcttctggaacctctataaagctccaatactgttggcactagtggcaggagaagctgctggtatcatggaaaacataagtgacgatgtgattgttggccgatgcctggccattctcaaagggatttttggtagcagtgcagtacctcagcccaaagaaactgtggtgtctcgttggcgtgctgatccctgggctcggggctcttattcctatgttgctgcaggatcatctggaaatgactatgatttaatggctcagccaatcactcctggcccctcgattccaggtgccccacagccgattccacgactcttctttgcgggagaacatacgatccgtaactacccagccacagtgcatggtgctctgctgagtgggctgcgagaagcgggaagaattgcagaccagtttttgggggccatgtatacgctgcctcgccaggccacaccaggtgttcctgcacagcagtccccaagcatgtgagacagatgcattctaagggaagaggcccatgtgcctgtttctgccatgtaaggaaggctcttctagcaatactagatcccactgagaaaatccaccctggcatctgggctcctgatcagctgatggagctcctgatttgacaaaggagcttgcctcctttgaatgacctagagcacagggaggaacttgtccattagtttggaattgtgttcttcgtaaagactgaggcaagcaagtgctgtgaaataacatcatcttagtcccttggtgtgtggggtttttgttttttttttatattttgagaataaaacttcatataaaatt

SEQ ID NO: 150137 - DNA, 905 bp, Homo sapiens
  Payload ID: 9644
  Gene Symbol: KDM1A
  Gene Name: lysine (K)-specific demethylase 1A
  ENST ID: ENST00000494920
  CDS Start-End: 1-905
gactttgagttcactggcagccacctgacagtaaggaatggctactcgtgtgtgcctgtggctttagcagaaggcctagacattaaactgaatacagcagtgcgacaggttcgctacacggcttcagtcttttcccacccaacctctgcaggatgtgaagtgatagctgtgaatacccgctccacgagtcaaacctttatttataaatgcgacgcagttctctgtacccttcccctgggtgtgctgaagcagcagccaccagccgttcagtttgtgccacctctccctgagtggaaaacatctgcagtccaaaggatgggatttggcaaccttaacaaggtggtgttgtgttttgatcgggtgttctgggatccaagtgtcaatttgttcgggcatgttggcagtacgactgccagcaggggtgagctcttcctcttctggaacctctataaagctccaatactgttggcactagtggcaggagaagctgctggtatcatggaaaacataagtgacgatgtgattgttggccgatgcctggccattctcaaagggatttttggtagcagtgcagtacctcagcccaaagaaactgtggtgtctcgttggcgtgctgatccctgggctcggggctcttattcctatgttgctgcaggatcatctggaaatgactatgatttaatggctcagccaatcactcctggcccctcgattccaggtgccccacagccgattccacgactcttctttgcgggagaacatacgatccgtaactacccagccacagtgcatggtgctctgctgagtgggctgcgagaagcgggaagaattgcagaccagtttttgggggccatgtatacgctgcctcgccaggccacaccaggtgttcctgcacagcagtcccc

SEQ ID NO: 150138 - DNA, 568 bp, Homo sapiens
  Payload ID: 9644
  Gene Symbol: KDM1A
  Gene Name: lysine (K)-specific demethylase 1A
  ENST ID: ENST00000465864
  CDS Start-End: 1-568
gaatatgatgaattagctgaaacacaaggaaagctagaagaaaaacttcaggagttggaagcgaatcccccaagtcctttgttcttttgcagtgatgtatatctctcatcaagagacagacaaatacttgattggcattttgcaaatcttgaatttgctaatgccacacctctctcaactctctcccttaagcactgggatcaggatgatgactttgagttcactggcagccacctgacagtaaggaatggctactcgtgtgtgcctgtggctttagcagaaggcctagacattaaactgaatacagcagtgcgacaggttcgctacacggcttcaggatgtgaagtgatagctgtgaatacccgctccacgagtcaaacctttatttataaatgcgacgcagttctctgtacccttcccctgggtgtgctgaagcagcagccaccagccgttcagtttgtgccacctctccctgagtggaaaacatctgcagtccaaaggatgggatttggcaaccttaacaaggtggtgttgtgttttgatcgggtgttctgggatccaagtgtca

SEQ ID NO: 150139 - DNA, 3811 bp, Homo sapiens
  Payload ID: 9645
  Gene Symbol: KDM1B
  Gene Name: lysine (K)-specific demethylase 1B
  Uniprot ID: Q8NB78
  ENST ID: ENST00000297792
  CDS Start-End: 178-1950
gcggccgagaagaggctggggctcgcggcgcggctgcagccgtcctgtgcgcgcggcgcgcggctccggagaggcgcccgcagtccagggcggcgcgcaccgcctcgctggcgctcagagcggtgccttttccccgagactcccggcacctcttcagcgcaaagattatttaatgtaatggcaactccacgggggaggacaaagaaaaaagcatcttttgatcattctccggatagccttcctttgaggagctccggtaggcaggcgaagaagaaagcaacagagacaacagatgaggatgaagatggtggctcagagaagaagtacaggaaatgtgaaaaggcaggctgtacggcaacatgtcctgtgtgctttgcaagtgcttctgaaagatgtgccaaaaatggctacacctcccgatggtatcatctctcctgtggggaacatttctgtaatgaatgctttgaccattactacagaagccataaggatggatatgacaaatatactacatggaaaaaaatatggactagcaatggcaaaaccgaacctagtcccaaagctttcatggcagaccagcaactcccctactgggttcagtgtacaaaacctgagtgtagaaaatggaggcagcttaccaaggaaatccagcttactccacagatagccaagacttatcgatgcggtatgaaaccaaatactgctattaagcctgagacctcagatcattgttccctcccagaggatctagaagctcttactcctcagaaatgtattcctcacatcatcgtccggggtctcgtgcgtattcgatgcgttcaggaagtggagagaatactgtattttatgaccagaaaaggtctcatcaacactggagttctcagcgtgggagccgaccagtatcttctccctaaggactaccacaataaatcagtcatcattatcggggctggtccagcaggattagcagctgctaggcaactgcataactttggaattaaggtgactgtcctggaagccaaagacagaattggaggccgagtctgggatgataaatcttttaaaggcgtcacagtgggaagaggagctcagattgtcaatgggtgtattaacaacccagtagcattaatgtgtgaacaagtatctgctcgctcgtgggaccacaatgaattctttgcccagtttgctggtgaccacactctgctaactcccgggtactcggtgataattgaaaaactggcagaagggcttgacattcaactcaaatctccagtgcagtgtattgattattctggagatgaagtgcaggttaccactacagatggcacagggtattctgcacaaaaggtattagtcactgtaccactggctttactacagaaaggtgccattcagtttaatccaccgttgtcagagaagaagatgaaggctatcaacagcttaggcgcaggcatcattgaaaagattgccttgcaatttccgtatagattttgggacagtaaagtacaaggggctgacttttttggtcacgttcctcccagtgccagcaagcgagggctttttgccgtgttctatgacatggatccccagaagaagcacagcgtgctgatgtctgtgattgccggggaggctgtcgcatccgtgaggaccctggatgacaaacaggtgctgcagcagtgcatggccacgctccgggagctgttcaaggagcaggaggtcccagatcccacaaagtattttgtcactcggtggagcacagacccatggatccagatggcatacagttttgtgaagacaggtggaagtggggaggcctacgatatcattgctgaagacattcaaggaaccgtctttttcgctggtgaggcaacaaacaggcatttcccacaaactgttacaggggcatatttgagtggcgttcgagaagcaagcaagattgcagcattttaagaattcggtggacccagctttcttctgtaccccagatggggaaatttgaatcacatgttaaacctcagttttataagagggggaaaaaaccgtctctacatagtaaaactgaaatgtttctaaggcgatatgataatgcaaacctatttcatcactctaaaagcactgacctcaaaaaaccttataagcacttagatttaattgcattttccataggttcaactactgctgaaagtctggatttcagaataaagcagaatgtaagtttcagttgaggccatggatttgattgttccatggctggaagttccctttagatttcacattttatatggctgatcaattttcatacattgagaaaccaagtcaatcaagcaggaatcatttaaaaaccagataaagccatgtttttcttctgtgacaatttatcagtatctttaccaatgagccttaatttttatataggtccaatattgagcttttacttaaaatttagatagaacttttttttggatacagcacaaactccagttgacagtaaaatgaagcttctaggtattttgtattgtacatatttcctcctactgggtgttcaaaagaaatttaaattcaagtaccttttgtgataaaatgttttagatttgtgcacccattggcaaaacaggaaagtttccagataggtattgtatcattgagaatgcagcacagatagtgtgggcttcacactatagacacagaatatagctttttcttaaagccaaatttgggtgataggacactttaaatatccttaattttggcaaccactagcaaaaaaacttgtcagaataatttaaccaagcccctctccacttcttttatttaaaagcactgattcaattgctaggaatatttttgcagatttttctttacagtattccataggcaggtccactggaaaactgcagaaaaatgtgagctctcctggtaaatagtatacattttataagctatattttaaaggcctaagaacatggcaagtatttacttttatcttttttttaaaaacactcatgacagaaaacagtttaataatatctcattctaaaataaaacactggttgcagggtcttcaggatgcctattttgccaagaaacttcagtatacaggttagaaatatgcttttgtttttgaacaataatatactggtttgctttaaagaagggactaaatatgactttaaagagacttcaaaatattgagtattttaaaaatttaaaagtaggtcagtttataacgagtaaatacctaacacaccaagaatgtgcagtgaacctcaggcatttaagacacctcccccaccgcccgccccccgccccccccaatcaaagtgtggtcccaaaacaagccaacagctgtatatctcaaaagttaacccaagacaactctgatatttaggttatttgttgagactcattggtactgactggcaagtattctgctttaaagtatcatgtattaaaatgtttagacagcatgtgttttaaagtgataaatgcaaaatgttaagtttgaaatggttaacagtaaattattatgttagtttccaggcacttgaactgtgctacaagtaggggaaaacctactttaaagtatggtaaatgtgtgttttaaacttcctatcaagtgacatacttcatttgattttttgtttaagaagccatggtacttttttcttgagttactttggatatgttttttcaatgccatctgaagattttgtaattgagtagcagtaaatatacagatttacaatgttttaactacagttcatgaatagctggttgtgtaaaactaataaaaaactagactttcacatgt

SEQ ID NO: 150140 - DNA, 2045 bp, Homo sapiens
  Payload ID: 9645
  Gene Symbol: KDM1B
  Gene Name: lysine (K)-specific demethylase 1B
  ENST ID: ENST00000449850
  CDS Start-End: 1-1922
attgttccctcccagaggatctaagagtattggaagtttccaaccattggtggtactctatgctcatcctacctcctttgctgaaagacagtgtggcagcgcccctgctgtctgcctactaccctgactgtgttggcatgagcccctcctgcaccagcacaaaccgcgccgctgccactggcaatgccagccctgggaagctggagcactccaaggctgccctctccgtgcacgttccaggcatgaaccgatacttccagcctttctaccagcccaatgagtgtggcaaagccctctgtgtgaggccggatgtgatggaactggatgagctctatgagtttccagagtattcccgagaccccaccatgtacctggctttgagaaacctcatcctcgcactgtggtatactaactgcaaagaagctcttactcctcagaaatgtattcctcacatcatcgtccggggtctcgtgcgtattcgatgcgttcaggaagtggagagaatactgtattttatgaccagaaaaggtctcatcaacactggagttctcagcgtgggagccgaccagtatcttctccctaaggactaccacaataaatcagtcatcattatcggggctggtccagcaggattagcagctgctaggcaactgcataactttggaattaaggtgactgtcctggaagccaaagacagaattggaggccgagtctgggatgataaatcttttaaaggcgtcacagtgggaagaggagctcagattgtcaatgggtgtattaacaacccagtagcattaatgtgtgaacaacttggcatcagcatgcataaatttggagaaagatgtgacttaattcaggaaggtggaagaataactgaccccactattgacaagcgcatggattttcattttaatgctctcttggatgttgtctctgagtggagaaaggataagactcagctccaagatgtccctttaggagaaaagatagaagaaatctacaaggcatttattaaggaatctggtatccaattcagtgagctggagggacaggtgcttcagttccatctcagtaacctggagtacgcctgtggcagcaaccttcaccaggtatctgctcgctcgtgggaccacaatgaattctttgcccagtttgctggtgaccacactctgctaactcccgggtactcggtgataattgaaaaactggcagaagggcttgacattcaactcaaatctccacaggtgcagtgtattgattattctggagatgaagtgcaggttaccactacagatggcacagggtattctgcacaaaaggtattagtcactgtaccactggctttactacagaaaggtgccattcagtttaatccaccgttgtcagagaagaagatgaaggctatcaacagcttaggcgcaggcatcattgaaaagattgccttgcaatttccgtatagattttgggacagtaaagtacaaggggctgacttttttggtcacgttcctcccagtgccagcaagcgagggctttttgccgtgttctatgacatggatccccagaagaagcacagcgtgctgatgtctgtgattgccggggaggctgtcgcatccgtgaggaccctggatgacaaacaggtgctgcagcagtgcatggccacgctccgggagctgttcaaggagcaggaggtcccagatcccacaaagtattttgtcactcggtggagcacagacccatggatccagatggcatacagttttgtgaagacaggtggaagtggggaggcctacgatatcattgctgaagacattcaaggaaccgtctttttcgctggtgaggcaacaaacaggcatttcccacaaactgttacaggggcatatttgagtggcgttcgagaagcaagcaagattgcagcattttaagaattcggtggacccagctttcttctgtaccccagatggggaaatttgaatcacatgttaaacctcagttttataagagggggaaaaaaccgtctctacatagtaaaactgaaatgtttctaa

SEQ ID NO: 150141 - DNA, 496 bp, Homo sapiens
  Payload ID: 9645
  Gene Symbol: KDM1B
  Gene Name: lysine (K)-specific demethylase 1B
  ENST ID: ENST00000546309
  CDS Start-End: 104-445
atgggcagggcggagcgagcgctgcggctaaagcgaaggcggggaccctacccatccctagtcctgtcggctcctcccaccccggaagaagcacagcgtgctgatgtctgtgattgccggggaggctgtcgcatccgtgaggaccctggatgacaaacaggtgctgcagcagtgcatggccacgctccgggagctgttcaaggagcaggaggtcccagatcccacaaagtattttgtcactcggtggagcacagacccatggatccagatggcatacagttttgtgaagacaggtggaagtggggaggcctacgatatcattgctgaagacattcaaggaaccgtctttttcgctggtgaggcaacaaacaggcatttcccacaaactgttacaggggcatatttgagtggcgttcgagaagcaagcaagattgcagcattttaagaattcggtggacccagctttcttctgtaccccagatggggaaatttgaat

SEQ ID NO: 150142 - DNA, 3666 bp, Homo sapiens
  Payload ID: 9646
  Gene Symbol: KDM2A
  Gene Name: lysine (K)-specific demethylase 2A
  ENST ID: ENST00000308783
  CDS Start-End: 222-3659
cagccctggagtggtttctttacagtaatttcaacagaagagtgagagatggaacccgaagaagaaaggattcgttacagccagagattggttcttggggtttttctctgtctgtgagtacttggtaaaaagttaaaccctaaagataaaaggcagcaaatagtgaccaaacgaatgtttttggcaaatacattggtgaaggcctccttcagcgtggtaccatgcgacgacgctatgaagatgatggcatttcagatgatgaaattgaaggaaaaagaacttttgacttggaagagaaactgcacaccaacaaatataatgccaattttgttacttttatggaaggaaaagattttaatgtagagtatattcagcggggtggcttgagagatcctctgattttcaagaattctgatggactcggaataaaaatgccggatccagacttcactgtgaatgatgtcaaaatgtgtgtggggagtcgtcgcatggtggatgtcatggacgtgaacacacagaaaggcattgaaatgaccatggctcagtggacacgctactatgagaccccagaggaggagcgagagaaactctataatgtcatcagcctcgagtttagccacaccaggctggagaatatggtgcagaggccctccacggtggatttcattgactgggtagacaacatgtggccaaggcacttgaaggaaagccagactgaatcaacaaatgccatcttggagatgcagtaccctaaagtgcagaagtactgtctaatgagtgttcgaggctgctatactgacttccatgtggactttggtggtacctctgtttggtatcacatccatcaagggggaaaggtcttctggctcatcccccctacagcccacaacctggagctgtacgagaattggctgctgtcagggaaacagggagacatctttctgggtgaccgggtatcagattgtcagcgcattgagctcaagcagggctataccttcgtcattccctcaggctggattcatgctgtgtatactcctacagacacattagtgtttgggggcaattttttgcatagcttcaacatccctatgcagttaaaaatatacaacattgaagatcggacacgggttccaaataagtttcgctatccattctactatgagatgtgttggtatgtgttggagcgctatgtgtactgcataaccaaccgttcccacctaactaaggaatttcagaaagagtccctcagcatggatttggagttaaatgggttggagtctgggaatggggatgaggaagcagtggatcgagaaccccgacgcttgagcagcaggcgttctgtcctcactagccctgtagcgaatggagtcaacctggattatgatggactgggcaaaacctgccgaagtcttccaagtctgaagaaaactttggctggggactcatcttctgactgtagccggggctcccacaatggacaagtgtgggatccccagtgtgctccccgaaaggacaggcaagtgcatctgacccattttgagcttgaaggccttcgctgccttgtagataagttggagtctctgccactgcacaagaaatgtgtccccacagggatagaagatgaagatgctctcattgctgatgtaaagattttgctggaggagcttgccaacagcgatcccaagttagccctcactggagttcctatagtacagtggccaaaaagggataagcttaaattccccactcggccaaaggtgcgggttcctaccatccccattacgaagcctcacactatgaaaccagctccacggttaacacctgtgaggccagctgctgcctccccgattgtgtcaggagccagacggagacgagtgcgatgtcgaaaatgcaaagcctgtgtgcaaggagagtgtggtgtttgccactactgcagagacatgaagaagtttggggggcctggacgcatgaagcagtcctgtgtcctccgacagtgcttggcacccagactgcctcactcagtcacatgttccctctgtggagaggtggatcagaatgaagagacacaagactttgagaagaaactcatggaatgctgtatctgcaatgagattgttcatcctggctgcctccagatggacggagaggggttgcttaacgaagaattgccaaattgctgggaatgtccaaagtgctaccaggaggacagctcggagaaagcccagaagcggaaaatggaagagagtgacgaagaagctgtgcaagccaaagtcctgcggcccctgcggagctgcgatgagcctctcacgcccccgcctcattcacccacttccatgctgcagctcatccatgacccggtttccccccggggtatggtgactcggtcatcccctggggctggccccagcgaccaccacagtgccagccgcgatgagcgcttcaaacggcggcagttgctgcggctgcaggccacagagcgcaccatggtacgggaaaaggagaacaatcccagcggcaaaaaggagctgtctgaagttgagaaagccaagatccggggatcgtacctcactgtcacgctacagaggcccaccaaagagctccacgggacatccattgtgcccaagctgcaggccatcacggcctcctctgccaaccttcgccattccccccgtgtgctagtgcagcactgcccagcccgaaccccccagcgtggggatgaggaggggctggggggagaggaggaggaagaggaggaggaggaggaggaagatgacagtgcagaggaggggggtgcagccaggctgaatggccggggcagttgggctcaggatggagacgaaagctggatgcagcgggaggtctggatgtctgtcttccgctacctcagccgcagagaactttgtgaatgtatgcgagtgtgcaagacgtggtataaatggtgctgcgacaagagactttggacaaaaattgacttgagtaggtgtaaggccattgtgccccaggccctcagtggcatcatcaagaggcagccagtcagccttgacctcagttggaccaacatctctaaaaagcaactgacatggctcgtcaataggctgccaggactgaaagacctcctcctagcaggctgctcctggtctgcagtctctgccctcagcacctccagctgcccccttctcaggacccttgatcttcggtgggcagtaggaatcaaggaccctcaaattcgggacttgcttactccaccggctgataaaccaggtcaggacaatcgcagcaagctccggaacatgaccgacttccggctggcaggccttgacatcacagatgccacgcttcgcctcataattcgccacatgcccctcctgtctcgactcgacctcagtcactgcagccaccttacagatcagtcctccaatctactcactgctgtcgggtcttccactcgctactctctcacagagctcaatatggcaggttgcaataaattgacagaccagaccctgatctacctacggcgcattgccaacgtcaccttgatcgaccttcgaggatgcaagcagatcactcgaaaagcctgcgagcacttcatctcagacttgtccatcaacagcctctactgcctgtctgacgagaagctgatacagaagatcagctaagacacac

SEQ ID NO: 150143 - DNA, 6511 bp, Homo sapiens
  Payload ID: 9646
  Gene Symbol: KDM2A
  Gene Name: lysine (K)-specific demethylase 2A
  Uniprot ID: Q9Y2K7
  ENST ID: ENST00000398645
  CDS Start-End: 865-3213
gagtctgacgggttcaaaatggcggcggctgcttcagcggctcctcctgtgtgagggaaacaacacccctccccggcagcggcggcggcggcggcggctctcggagcaccttcccagcggctgggcccgtggccgctctgtctttcctgggcaggggacgctccgggaggaggggcaacgccagggggcccatcccccggaatccctcttctgcgactggggagtagccggggggctcgtcccgcagcgcggagccagacctgagggggagacgcgaggggagccagggcccccatcccggcgcgccgcgccgctcccgccctgtccgccccccggggccggggcccgcgttccggggggccggggcggcgcggggagcctcgggccggccggtctcagctgatcggccgctgctcccgcaggcgaccagcccctgctggccgagggcacggcgaggagggcgctccctgcggccggggccggcccggggctcgggcccgggctgctgaccgctggcctgggggaggcgggggcgccccgggctcggcgccgaggggtcgcgctcctctctcctgacgcctccgactcccggtctccaaagccagaagagaaggtttgattcagcaactgtttgctcccttttcctggtcgctctgaccctctctggatactgggttgatccacggaaaaaccgaagacgacgtttgggatttaattattcctctcagctttggaatcttttacttctcacttggacaagaactcaagagcagaatctccgtgttgcaatctggttcctaaggaggaagaggaaggcagccctggagtggtttctttacagtaatttcaacagaagagtgagagatggaacccgaagaagaaaggattcgttacagccagagattgcgtggtaccatgcgacgacgctatgaagatgatggcatttcagatgatgaaattgaaggaaaaagaacttttgacttggaagagaaactgcacaccaacaaatataatgccaattttgttacttttatggaaggaaaagattttaatgtagagtatattcagcggggtggcttgagagatcctctgattttcaagaattctgatggactcggaataaaaatgccggatccagacttcactgtgaatgatgtcaaaatgtgtgtggggagtcgtcgcatggtggatgtcatggacgtgaacacacagaaaggcattgaaatgaccatggctcagtggacacgctactatgagaccccagaggaggagcgagagaaactctataatgtcatcagcctcgagtttagccacaccaggctggagaatatggtgcagaggccctccacggtggatttcattgactgggtagacaacatgtggccaaggcacttgaaggaaagccagactgaatcaacaaatgccatcttggagatgcagtaccctaaagtgcagaagtactgtctaatgagtgttcgaggctgctatactgacttccatgtggactttggtggtacctctgtttggtatcacatccatcaagggggaaaggtcttctggctcatcccccctacagcccacaacctggagctgtacgagaattggctgctgtcagggaaacagggagacatctttctgggtgaccgggtatcagattgtcagcgcattgagctcaagcagggctataccttcgtcattccctcaggctggattcatgctgtgtatactcctacagacacattagtgtttgggggcaattttttgcatagcttcaacatccctatgcagttaaaaatatacaacattgaagatcggacacgggttccaaataagtttcgctatccattctactatgagatgtgttggtatgtgttggagcgctatgtgtactgcataaccaaccgttcccacctaactaaggaatttcagaaagagtccctcagcatggatttggagttaaatgggttggagtctgggaatggggatgaggaagcagtggatcgagaaccccgacgcttgagcagcaggcgttctgtcctcactagccctgtagcgaatggagtcaacctggattatgatggactgggcaaaacctgccgaagtcttccaagtctgaagaaaactttggctggggactcatcttctgactgtagccggggctcccacaatggacaagtgtgggatccccagtgtgctccccgaaaggacaggcaagtgcatctgacccattttgagcttgaaggccttcgctgccttgtagataagttggagtctctgccactgcacaagaaatgtgtccccacagggatagaagatgaagatgctctcattgctgatgtaaagattttgctggaggagcttgccaacagcgatcccaagttagccctcactggagttcctatagtacagtggccaaaaagggataagcttaaattccccactcggccaaaggtgcgggttcctaccatccccattacgaagcctcacactatgaaaccagctccacggttaacacctgtgaggccagctgctgcctccccgattgtgtcaggagccagacggagacgagtgcgatgtcgaaaatgcaaagcctgtgtgcaaggagagtgtggtgtttgccactactgcagagacatgaagaagtttggggggcctggacgcatgaagcagtcctgtgtcctccgacagtgcttggcacccagactgcctcactcagtcacatgttccctctgtggagaggtggatcagaatgaagagacacaagactttgagaagaaactcatggaatgctgtatctgcaatgagattgttcatcctggctgcctccagatggacggagaggggttgcttaacgaagaattgccaaattgctgggaatgtccaaagtgctaccaggaggacagctcggagaaagcccagaagcggaaaatggaagagagtgacgaagaagctgtgcaagccaaagtcctgcggcccctgcggagctgcgatgagcctctcacgcccccgcctcattcacccacttccatgctgcagctcatccatgacccggtttccccccggggtatggtgactcggtcatcccctggggctggccccagcgaccaccacagtgccagccgcgatgagcgcttcaaacggcggcagttgctgcggctgcaggccacagagcgcaccatggtgctgcgacaagagactttggacaaaaattgacttgagtaggtgtaaggccattgtgccccaggccctcagtggcatcatcaagaggcagccagtcagccttgacctcagttggaccaacatctctaaaaagcaactgacatggctcgtcaataggctgccaggactgaaagacctcctcctagcaggctgctcctggtctgcagtctctgccctcagcacctccagctgcccccttctcaggacccttgatcttcggtgggcagtaggaatcaaggaccctcaaattcgggacttgcttactccaccggctgataaaccaggtcaggacaatcgcagcaagctccggaacatgaccgacttccggctggcaggccttgacatcacagatgccacgcttcgcctcataattcgccacatgcccctcctgtctcgactcgacctcagtcactgcagccaccttacagatcagtcctccaatctactcactgctgtcgggtcttccactcgctactctctcacagagctcaatatggcaggttgcaataaattgacagaccagaccctgatctacctacggcgcattgccaacgtcaccttgatcgaccttcgaggatgcaagcagatcactcgaaaagcctgcgagcacttcatctcagacttgtccatcaacagcctctactgcctgtctgacgagaagctgatacagaagatcagctaagacacacccagcccagattcaacaggaaaccgatcttcccctgactccccaccgaggagagcctctcctcgaccctgcacgggctctgaggccagcgtcacactccctctctgctctcctgtcccttgagcccttcctctacaggtggggcagagagggtggtggacaccaggcttatctgcctgctcctctccctcctaaggaaaagggagtagcagattgatctgaggggaaagcacaggctgtgctgtcgaggcgcctgctcgcttactcgcctgccaggaggccgggctctcagtttggggtgtttgtgcaaccttcatctgcactgggccctgtgcccctcctccccatccatggtccccagcagtgcctggttctgagcaaactcccagggaagaaaacggccctgtctccatggccaggttcttgtggtgtccagtgcgcgtctctcctccatcacactctcccggcttgcgcaggaggggccagcagccccaggagtcccagacccgtgccgatcacactggtgctgttgagatctcccaaacctcacgtccttaactgtgctctccctcctttcctctcccttgagcttggttctgcccagcactcgtgcttgttcacataattaggtttcccaccccagcctacccgacttacttgctagtctctatgaggtccttattgcacttattggggttgaagctcttcagaggagctggaactgtctaccccagggacacacccatttcgttgctacccaagtggattctgagacaggcaccatctccttgttccccctctctcttttgcctcccactgactgcccttttccatgtgtcttcattctgcctgaagaaggctttcccaggatgcacgtcctcagagggagcagcctatctcccccaagctggaggcggcagaggactgggccaagccccaacctgcctcccagccaggctcctccaggcctctggtttagcggagccccctgagcccaggcctgtgtctagccccagtggctcactgaactttcagggcagtcagggggtcctgcttagaagccagtcaccagccctctgcctgcagccatggaagggggtgtgcacgtgcctctgtgtgtgtggctgagtgtattctgcgcgtgtgtgtggagggagggagggaggggagcatggtgtctcccgctccaccgccctttgttgagccccatcagctgcccccttttactttgcattgaacggcctgtccaaagatcctctctctagggcagcagagagctttttgcactttaaaaaaaaaaagaaagaaagaaaggtcggaatttcttttgggtcaatatttttaagtgtgtgaggagatgctcagtagcagcagcctatggcaagagcttataaatgattgatgcaaatttgcactctgctccccctctgtaaggatactgatagcacaacctcttccccccaccccgccccgccttttggtcgtccatccctgtccctttctggccctcttcctgtagcccagtctcaggctttcctcttcctgaagccctacagagttagggaatggagcccaggcaccaggggtctaaagtgtgagccactgagaagagagacgccaactgcacccttgccacttccaaagcaatagaggcagagtggtcccctctttgccacctaggccagttttgaccctggcattaactggccttagaagaaactggatcctggtagggggtggcattttgtttgtttcttccaatctgctgaatcttttgactgcaccttacaaacagcagtctgctcccatgaccctctgcccacttccattggtctccaggccccaataatctggggttgaaactttgaggaaatgccagtgacttattccagagtgcctcagttaggggaacttctctgtaaagaaccctgggtattgagcaaaaaccttattatcgttaatgacctataattggaagcttcctgcctttttctttggttgctcctgtggaaaatactgaaaagattactttgttttattttgttgtctttttataaaaggggaggtggagagaccccttcagagcagggattgtgccgggagagtgcctctgactttgggacatttcatccacagaaatttccaagccaatggtttcttttgggttttggtttttatgtttgttttttggggtttggaaaaacatgcatttttaccgtgcacgtaaattggtcagcagaaaagggagcccagaaaaggcagcagatggaccatgcccttgctgggttttccttttctttgggactgtgaggggaaatggtttttagaggtgagggttggtccatgtggaggaaagaagtgtctctgttgggggacagaggaacctggggagtccatcgcatgtcctacaatctgctcttagacacggccttgccaggagagcctgccctcagactgcaggaccagaacccctgcctccatctttccaagcaccggggcgaaaaaccacaaaggaaaggaagaaaatttatatatatataatataaaatcacttggtgattaaaaaaataactgctccataaataaaactcctaaagtcactta

SEQ ID NO: 150144 - DNA, 6967 bp, Homo sapiens
  Payload ID: 9646
  Gene Symbol: KDM2A
  Gene Name: lysine (K)-specific demethylase 2A
  Uniprot ID: Q9Y2K7
  ENST ID: ENST00000529006
  CDS Start-End: 447-3935
gcaggcgaccagcccctgctggccgagggcacggcgaggagggcgctccctgcggccggggccggcccggggctcgggcccgggctgctgaccgctggcctgggggaggcgggggcgccccgggctcggcgccgaggggtcgcgctcctctctcctgacgcctccgactcccggtctccaaagccagaagagaaggtttgattcagcaactgtttgctcccttttcctggtcgctctgaccctctctggatactgggttgatccacggaaaaaccgaagacgacgtttgggatttaattattcctctcagctttggaatcttttacttctcacttggacaagaactcaagagcagaatctccgtgttgcaatctggttcctaaggaggaagaggaaggcagccctggagtggtttctttacagtaatttcaacagaagagtgagagatggaacccgaagaagaaaggattcgttacagccagagattgcgtggtaccatgcgacgacgctatgaagatgatggcatttcagatgatgaaattgaaggaaaaagaacttttgacttggaagagaaactgcacaccaacaaatataatgccaattttgttacttttatggaaggaaaagattttaatgtagagtatattcagcggggtggcttgagagatcctctgattttcaagaattctgatggactcggaataaaaatgccggatccagacttcactgtgaatgatgtcaaaatgtgtgtggggagtcgtcgcatggtggatgtcatggacgtgaacacacagaaaggcattgaaatgaccatggctcagtggacacgctactatgagaccccagaggaggagcgagagaaactctataatgtcatcagcctcgagtttagccacaccaggctggagaatatggtgcagaggccctccacggtggatttcattgactgggtagacaacatgtggccaaggcacttgaaggaaagccagactgaatcaacaaatgccatcttggagatgcagtaccctaaagtgcagaagtactgtctaatgagtgttcgaggctgctatactgacttccatgtggactttggtggtacctctgtttggtatcacatccatcaagggggaaaggtcttctggctcatcccccctacagcccacaacctggagctgtacgagaattggctgctgtcagggaaacagggagacatctttctgggtgaccgggtatcagattgtcagcgcattgagctcaagcagggctataccttcgtcattccctcaggctggattcatgctgtgtatactcctacagacacattagtgtttgggggcaattttttgcatagcttcaacatccctatgcagttaaaaatatacaacattgaagatcggacacgggttccaaataagtttcgctatccattctactatgagatgtgttggtatgtgttggagcgctatgtgtactgcataaccaaccgttcccacctaactaaggaatttcagaaagagtccctcagcatggatttggagttaaatgggttggagtctgggaatggggatgaggaagcagtggatcgagaaccccgacgcttgagcagcaggcgttctgtcctcactagccctgtagcgaatggagtcaacctggattatgatggactgggcaaaacctgccgaagtcttccaagtctgaagaaaactttggctggggactcatcttctgactgtagccggggctcccacaatggacaagtgtgggatccccagtgtgctccccgaaaggacaggcaagtgcatctgacccattttgagcttgaaggccttcgctgccttgtagataagttggagtctctgccactgcacaagaaatgtgtccccacagggatagaagatgaagatgctctcattgctgatgtaaagattttgctggaggagcttgccaacagcgatcccaagttagccctcactggagttcctatagtacagtggccaaaaagggataagcttaaattccccactcggccaaaggtgcgggttcctaccatccccattacgaagcctcacactatgaaaccagctccacggttaacacctgtgaggccagctgctgcctccccgattgtgtcaggagccagacggagacgagtgcgatgtcgaaaatgcaaagcctgtgtgcaaggagagtgtggtgtttgccactactgcagagacatgaagaagtttggggggcctggacgcatgaagcagtcctgtgtcctccgacagtgcttggcacccagactgcctcactcagtcacatgttccctctgtggagaggtggatcagaatgaagagacacaagactttgagaagaaactcatggaatgctgtatctgcaatgagattgttcatcctggctgcctccagatggacggagaggggttgcttaacgaagaattgccaaattgctgggaatgtccaaagtgctaccaggaggacagctcggagaaagcccagaagcggaaaatggaagagagtgacgaagaagctgtgcaagccaaagtcctgcggcccctgcggagctgcgatgagcctctcacgcccccgcctcattcacccacttccatgctgcagctcatccatgacccggtttccccccggggtatggtgactcggtcatcccctggggctggccccagcgaccaccacagtgccagccgcgatgagcgcttcaaacggcggcagttgctgcggctgcaggccacagagcgcaccatggtacgggaaaaggagaacaatcccagcggcaaaaaggagctgtctgaagttgagaaagccaagatccggggatcgtacctcactgtcacgctacagaggcccaccaaagagctccacgggacatccattgtgcccaagctgcaggccatcacggcctcctctgccaaccttcgccattccccccgtgtgctagtgcagcactgcccagcccgaaccccccagcgtggggatgaggaggggctggggggagaggaggaggaagaggaggaggaggaggaggaagatgacagtgcagaggaggggggtgcagccaggctgaatggccggggcagttgggctcaggatggagacgaaagctggatgcagcgggaggtctggatgtctgtcttccgctacctcagccgcagagaactttgtgaatgtatgcgagtgtgcaagacgtggtataaatggtgctgcgacaagagactttggacaaaaattgacttgagtaggtgtaaggccattgtgccccaggccctcagtggcatcatcaagaggcagccagtcagccttgacctcagttggaccaacatctctaaaaagcaactgacatggctcgtcaataggctgccaggactgaaagacctcctcctagcaggctgctcctggtctgcagtctctgccctcagcacctccagctgcccccttctcaggacccttgatcttcggtgggcagtaggaatcaaggaccctcaaattcgggacttgcttactccaccggctgataaaccaggtcaggacaatcgcagcaagctccggaacatgaccgacttccggctggcaggccttgacatcacagatgccacgcttcgcctcataattcgccacatgcccctcctgtctcgactcgacctcagtcactgcagccaccttacagatcagtcctccaatctactcactgctgtcgggtcttccactcgctactctctcacagagctcaatatggcaggttgcaataaattgacagaccagaccctgatctacctacggcgcattgccaacgtcaccttgatcgaccttcgaggatgcaagcagatcactcgaaaagcctgcgagcacttcatctcagacttgtccatcaacagcctctactgcctgtctgacgagaagctgatacagaagatcagctaagacacacccagcccagattcaacaggaaaccgatcttcccctgactccccaccgaggagagcctctcctcgaccctgcacgggctctgaggccagcgtcacactccctctctgctctcctgtcccttgagcccttcctctacaggtggggcagagagggtggtggacaccaggcttatctgcctgctcctctccctcctaaggaaaagggagtagcagattgatctgaggggaaagcacaggctgtgctgtcgaggcgcctgctcgcttactcgcctgccaggaggccgggctctcagtttggggtgtttgtgcaaccttcatctgcactgggccctgtgcccctcctccccatccatggtccccagcagtgcctggttctgagcaaactcccagggaagaaaacggccctgtctccatggccaggttcttgtggtgtccagtgcgcgtctctcctccatcacactctcccggcttgcgcaggaggggccagcagccccaggagtcccagacccgtgccgatcacactggtgctgttgagatctcccaaacctcacgtccttaactgtgctctccctcctttcctctcccttgagcttggttctgcccagcactcgtgcttgttcacataattaggtttcccaccccagcctacccgacttacttgctagtctctatgaggtccttattgcacttattggggttgaagctcttcagaggagctggaactgtctaccccagggacacacccatttcgttgctacccaagtggattctgagacaggcaccatctccttgttccccctctctcttttgcctcccactgactgcccttttccatgtgtcttcattctgcctgaagaaggctttcccaggatgcacgtcctcagagggagcagcctatctcccccaagctggaggcggcagaggactgggccaagccccaacctgcctcccagccaggctcctccaggcctctggtttagcggagccccctgagcccaggcctgtgtctagccccagtggctcactgaactttcagggcagtcagggggtcctgcttagaagccagtcaccagccctctgcctgcagccatggaagggggtgtgcacgtgcctctgtgtgtgtggctgagtgtattctgcgcgtgtgtgtggagggagggagggaggggagcatggtgtctcccgctccaccgccctttgttgagccccatcagctgcccccttttactttgcattgaacggcctgtccaaagatcctctctctagggcagcagagagctttttgcactttaaaaaaaaaaagaaagaaagaaaggtcggaatttcttttgggtcaatatttttaagtgtgtgaggagatgctcagtagcagcagcctatggcaagagcttataaatgattgatgcaaatttgcactctgctccccctctgtaaggatactgatagcacaacctcttccccccaccccgccccgccttttggtcgtccatccctgtccctttctggccctcttcctgtagcccagtctcaggctttcctcttcctgaagccctacagagttagggaatggagcccaggcaccaggggtctaaagtgtgagccactgagaagagagacgccaactgcacccttgccacttccaaagcaatagaggcagagtggtcccctctttgccacctaggccagttttgaccctggcattaactggccttagaagaaactggatcctggtagggggtggcattttgtttgtttcttccaatctgctgaatcttttgactgcaccttacaaacagcagtctgctcccatgaccctctgcccacttccattggtctccaggccccaataatctggggttgaaactttgaggaaatgccagtgacttattccagagtgcctcagttaggggaacttctctgtaaagaaccctgggtattgagcaaaaaccttattatcgttaatgacctataattggaagcttcctgcctttttctttggttgctcctgtggaaaatactgaaaagattactttgttttattttgttgtctttttataaaaggggaggtggagagaccccttcagagcagggattgtgccgggagagtgcctctgactttgggacatttcatccacagaaatttccaagccaatggtttcttttgggttttggtttttatgtttgttttttggggtttggaaaaacatgcatttttaccgtgcacgtaaattggtcagcagaaaagggagcccagaaaaggcagcagatggaccatgcccttgctgggttttccttttctttgggactgtgaggggaaatggtttttagaggtgagggttggtccatgtggaggaaagaagtgtctctgttgggggacagaggaacctggggagtccatcgcatgtcctacaatctgctcttagacacggccttgccaggagagcctgccctcagactgcaggaccagaacccctgcctccatctttccaagcaccggggcgaaaaaccacaaaggaaaggaagaaaatttatatatatataatataaaatcacttggtgattaaaaaaataactgctccataaataaaactcctaaagtcacttatgtttaaagggtttggttgtgttttttgtttttcggagaaatattgtaaatatatatttttttgttgctgatttagagtcaatctccaatgttgtgctaaaaagtttaaattaaatgtaagcattaaggggataagtcttatgctatctcagttgacacattgaggttattttgggccagagaaggaggaagctagttggactttgttttgttttccaaaagttctccactattggttttagagagagcaaggacatctttcctctgacacgtgggaatgggtgatatttgtgtaataaaatttttaaaagacaaaaaaagaaatagcctccaatgggaaatattttaatttaggttttgtttttgtttgggggtttttgtttttttaaaaaaataaaaaggctttaaaaacaaaaactaaa

SEQ ID NO: 150145 - DNA, 3651 bp, Homo sapiens
  Payload ID: 9646
  Gene Symbol: KDM2A
  Gene Name: lysine (K)-specific demethylase 2A
  Uniprot ID: Q9Y2K7
  ENST ID: ENST00000530342
  CDS Start-End: 162-2333
gttgcaaagcatttctgggagctgcatgtgggtgacgcagcagcattgttcgcaggcacaggaagccgcggctgagctgaagggctcgagaaggagcccagagcgctgcacgctgctccctctgggtagtctgaagggtcagagctggactgccctgccctatgtgctctgggagattccagaatattcaagtaaatccggattttcccagaggcagaatatctaactccttcaggagaacttccagtacagaaaacaaaacaaagacgctggggaaacttcaccaagagcctcggcagctccagagcgacgggaaacgaaagattttgctggaggagcttgccaacagcgatcccaagttagccctcactggagttcctatagtacagtggccaaaaagggataagcttaaattccccactcggccaaaggtgcgggttcctaccatccccattacgaagcctcacactatgaaaccagctccacggttaacacctgtgaggccagctgctgcctccccgattgtgtcaggagccagacggagacgagtgcgatgtcgaaaatgcaaagcctgtgtgcaaggagagtgtggtgtttgccactactgcagagacatgaagaagtttggggggcctggacgcatgaagcagtcctgtgtcctccgacagtgcttggcacccagactgcctcactcagtcacatgttccctctgtggagaggtggatcagaatgaagagacacaagactttgagaagaaactcatggaatgctgtatctgcaatgagattgttcatcctggctgcctccagatggacggagaggggttgcttaacgaagaattgccaaattgctgggaatgtccaaagtgctaccaggaggacagctcggagaaagcccagaagcggaaaatggaagagagtgacgaagaagctgtgcaagccaaagtcctgcggcccctgcggagctgcgatgagcctctcacgcccccgcctcattcacccacttccatgctgcagctcatccatgacccggtttccccccggggtatggtgactcggtcatcccctggggctggccccagcgaccaccacagtgccagccgcgatgagcgcttcaaacggcggcagttgctgcggctgcaggccacagagcgcaccatggtacgggaaaaggagaacaatcccagcggcaaaaaggagctgtctgaagttgagaaagccaagatccggggatcgtacctcactgtcacgctacagaggcccaccaaagagctccacgggacatccattgtgcccaagctgcaggccatcacggcctcctctgccaaccttcgccattccccccgtgtgctagtgcagcactgcccagcccgaaccccccagcgtggggatgaggaggggctggggggagaggaggaggaagaggaggaggaggaggaggaagatgacagtgcagaggaggggggtgcagccaggctgaatggccggggcagttgggctcaggatggagacgaaagctggatgcagcgggaggtctggatgtctgtcttccgctacctcagccgcagagaactttgtgaatgtatgcgagtgtgcaagacgtggtataaatggtgctgcgacaagagactttggacaaaaattgacttgagtaggtgtaaggccattgtgccccaggccctcagtggcatcatcaagaggcagccagtcagccttgacctcagttggaccaacatctctaaaaagcaactgacatggctcgtcaataggctgccaggactgaaagacctcctcctagcaggctgctcctggtctgcagtctctgccctcagcacctccagctgcccccttctcaggacccttgatcttcggtgggcagtaggaatcaaggaccctcaaattcgggacttgcttactccaccggctgataaaccaggtcaggacaatcgcagcaagctccggaacatgaccgacttccggctggcaggccttgacatcacagatgccacgcttcgcctcataattcgccacatgcccctcctgtctcgactcgacctcagtcactgcagccaccttacagatcagtcctccaatctactcactgctgtcgggtcttccactcgctactctctcacagagctcaatatggcaggttgcaataaattgacagaccagaccctgatctacctacggcgcattgccaacgtcaccttgatcgaccttcgaggatgcaagcagatcactcgaaaagcctgcgagcacttcatctcagacttgtccatcaacagcctctactgcctgtctgacgagaagctgatacagaagatcagctaagacacacccagcccagattcaacaggaaaccgatcttcccctgactccccaccgaggagagcctctcctcgaccctgcacgggctctgaggccagcgtcacactccctctctgctctcctgtcccttgagcccttcctctacaggtggggcagagagggtggtggacaccaggcttatctgcctgctcctctccctcctaaggaaaagggagtagcagattgatctgaggggaaagcacaggctgtgctgtcgaggcgcctgctcgcttactcgcctgccaggaggccgggctctcagtttggggtgtttgtgcaaccttcatctgcactgggccctgtgcccctcctccccatccatggtccccagcagtgcctggttctgagcaaactcccagggaagaaaacggccctgtctccatggccaggttcttgtggtgtccagtgcgcgtctctcctccatcacactctcccggcttgcgcaggaggggccagcagccccaggagtcccagacccgtgccgatcacactggtgctgttgagatctcccaaacctcacgtccttaactgtgctctccctcctttcctctcccttgagcttggttctgcccagcactcgtgcttgttcacataattaggtttcccaccccagcctacccgacttacttgctagtctctatgaggtccttattgcacttattggggttgaagctcttcagaggagctggaactgtctaccccagggacacacccatttcgttgctacccaagtggattctgagacaggcaccatctccttgttccccctctctcttttgcctcccactgactgcccttttccatgtgtcttcattctgcctgaagaaggctttcccaggatgcacgtcctcagagggagcagcctatctcccccaagctggaggcggcagaggactgggccaagccccaacctgcctcccagccaggctcctccaggcctctggtttagcggagccccctgagcccaggcctgtgtctagccccagtggctcactgaactttcagggcagtcagggggtcctgcttagaagccagtcaccagccctctgcctgcagccatggaagggggtgtgcacgtgcctctgtgtgtgtggctgagtgtattctgcgcgtgtgtgtggagggagggagggaggggagcatggtgtctcccgctccaccgccctttgttgagccccatcagctgcccccttttactttgcattgaacggcctgtccaaagatcctctctctagggcagcagagagctttttgcactttaaaaaaaaaaagaaagaaagaa

SEQ ID NO: 150146 - DNA, 5224 bp, Homo sapiens
  Payload ID: 9647
  Gene Symbol: KDM2B
  Gene Name: lysine (K)-specific demethylase 2B
  Uniprot ID: Q8NHM5
  ENST ID: ENST00000377069
  CDS Start-End: 408-4205
ccaacaacaaaacagcgatgccacggcgctaacggcgcccggtgcctcccgggctccctccccgccccatacctcctcgggccgccgcccccacccccccaagcccgggccgagagcccccccaaatagcccggccgcgggctccgagcgcgatcggcaacaatgtttacgttccggggattatgacgtcgacgcctccccccccccacaactgctgaaaatggtttcctaggactttgcaaacggatctgcctaagtgttggtgcaaaactttgtagatctcggctctggcttgctttatttatttattttttggtttgttttctttggtcttccctccttcccccctcggccaaaatgcagggggcaggagtgttgacaattaattggtgaactctcctaaaaaaatggaggcagagaaagactctggaagaagattgcgcccgattgaccgccagcgatacgacgagaacgaggacttgtcggacgtggaggagatcgtcagcgtccgcggcttcagcctggaggagaagcttcgcagccagctgtaccagggggacttcgtgcacgccatggagggcaaagatttcaactatgagtacgtacagagagaagctctcagggttcccctgatatttcgagaaaaggatggactgggaattaagatgcctgaccctgatttcacagtccgagacgtcaaactcctagtggggagccggcggcttgtggacgtgatggatgtgaacacccagaagggcacggagatgagcatgtcccagtttgtgcgttactacgagacgcccgaggcccagcgggacaagctgtacaacgtcatcagcctagagttcagccacaccaagctggagcacttggtcaagcgtccgactgtggtagacctggtggactgggtggacaacatgtggccccagcatctgaaggagaagcagacagaagccacgaacgccattgcagagatgaagtacccgaaagtgaaaaagtactgtctgatgagcgtgaaaggttgtttcaccgacttccacatcgactttggaggcacttccgtttggtaccatgttttccggggtgggaagattttttggctgattcctccaacgctgcacaatttggcgctgtacgaggagtgggtgctgtcaggcaaacagagtgacatctttctgggagaccgtgtggaacgatgccaaagaattgagctgaagcagggctacacatttttcatcccttccggttggatccatgccgtctacacccctgtagactctttggtgttcggcggaaacatcctgcacagctttaacgtgcccatgcagctgcggatctacgagatcgaggacaggacgcgggtgcagcccaaattccgttaccccttctactatgagatgtgctggtatgtcctggagagatacgtgtactgtgtgacccagcgctcccacctcactcaggaataccagagggagtcgatgcttattgatgccccgaggaagcccagcatagacggcttctcttcggattcctggctggagatggaggaggaggcctgtgatcagcagcctcaggaggaggaggagaaggacgaggagggcgagggcagggacagggcacccaaaccgcccaccgatggctccacttcacccaccagcacgccctctgaggaccaggaggccctcgggaagaagcccaaagcacctgccctgcgattcctcaaaaggactttgtctaatgagtcggaggaaagtgtgaagtccaccacattggccgtagactaccccaagacccccaccggctctcccgccacggaggtctctgccaaatggacccatctcactgagtttgaactgaagggcctgaaagctctggtggagaaactggaatccctcccggagaacaagaagtgtgtccccgagggcatcgaggacccccaggcactcctggagggtgtgaagaacgtcctgaaggagcacgcagatgatgaccctagtctggccatcactggggtccctgtggtgacttggccaaagaagactccaaagaaccgggctgtgggtcggcccaaggggaagctgggcccggcctccgcggtgaagttggccgccaaccggacaacggcaggagctcggcggcgccggacgcgatgccgcaagtgcgaggcctgcctgcggaccgagtgcggagagtgccacttctgcaaggacatgaagaagttcgggggccccgggcgcatgaagcagagctgcatcatgcggcagtgcatcgcgccagtgctgccccacaccgccgtgtgccttgtgtgtggcgaggcggggaaggaagacacggtggaagaggaggaaggcaagtttaacctcatgctcatggagtgctccatctgcaatgaaatcatccaccctggatgccttaagattaaggagtcagagggtgtggtcaacgacgagcttccaaactgctgggagtgtccgaagtgtaaccacgccggcaagaccgggaaacaaaagcgtggccctggctttaagtacgcctccaacctgcccggctccctgctcaaggagcagaagatgaaccgggacaacaaggaagggcaggaacctgccaagcggaggagtgagtgtgaggaggcgccccggcgcaggtcggatgagcactcgaagaaggtgccgccggacggccttctgcgcagaaagtctgacgacgtgcacctgaggaagaagcggaaatacgagaagccccaggagctgagtggacgcaagcggctcaaacctggcaaagaagataagcttttcaggaaaaagcggcggtcctggaagaacgccgaggaccgcatggcgctggccaacaagcccctccggcgcttcaagcaggaacccgaggacgaactgcccgaggcgccccccaagaccagggagagcgaccactcccgctccagctcccccaccgcgggacccagcaccgaaggggccgagggcccggaggagaagaagaaggtgaagatgcgccggaagcggcggcttcccaacaaggagctgagcagggagctgagcaaggagctcaaccacgagatccagaggacggagaacagcctggccaacgagaaccagcagcccatcaagtcggagcctgagagcgagggcgaggagcccaagcggcccccgggcatctgcgagcgtccccaccgcttcagcaaggggctcaacggcaccccccgggagctgcggcaccagctggggcccagcctgcgcagcccgccccgtgtcatctcccggcccccaccctccgtgtccccgcccaagtgtatccagatggagcgccatgtgatccggccaccccccatcagccccccgcctgactcgctacccctggacgatggggcagcccacgtcatgcacagggaggtgtggatggccgtcttcagctacctcagccaccaagacctgtgtgtgtgcatgcgggtctgcaggacctggaaccgctggtgctgcgataagcggttgtggacccgcattgacctgaaccactgcaagtctatcacacccctgatgctgagtggcatcatccggcgacagcccgtctccctcgacctcagctggaccaatatctccaagaagcagctgagctggctcatcaaccggctgcctgggctccgggacttggtgctgtcaggctgctcatggatcgcggtctcggccctttgcagctccagttgtccgctgctccggaccctggatgtccagtgggtggagggactaaaggatgcccagatgcgggatctcctgtccccgcccacagacaacaggccaggtcagatggacaatcggagcaagctccggaacatcgtggagctgcgcctggcaggcctggacatcacagatgcctccctgcggctcatcatccgccacatgcccctgctctccaagctccacctcagttactgtaaccacgtcaccgaccagtctatcaacctgctcactgctgttggcaccaccacccgagactccttaaccgagatcaacctgtctgactgcaataaggtcactgatcagtgcctgtccttcttcaaacgctgtggaaacatctgtcatattgacctgaggtactgcaagcaagtcaccaaggaaggctgtgagcagttcatagccgagatgtcttctttccaagggagaagctgttcaaccacccgtttgggggatgagtgagccgacactttcctttggtctttctgaatcgtaactgcactgctttctggaccatttctaaggcggcctttacaagaagacattcctgtcggagaggagggtggacttcggagaaattctcatactgaagcatgagcttaggagtttctgttagtggtagtggtgttttggacacttcattccttgcaacaccgaggttttgggtgttgacataaagtggaccacacaccacatctgctgccgtcttgacacttttttttgtttggttggttttgttacatcttacattatgcagaactatttttgtacaaattgtttaaaagttatttatgcaaggtttgaatgcataccagtgtttttattgttttgagattgccaattttcctgatttccttaaggtaggagagaatttaacgtgtacttcatcgacacaacccatctacaaatgtgcccagatctaacaaagtaggctaagaccttccacttaaaagcatgtttaactggaagttgagagtctgctttgtacctcaagagttacatgagcatgttgtggataaatgtaaattatagtcaaagtaagatactctgccaagtttcctctgtagagaattcacttttctcaaattttaaaatttcgacttcagcctttgcactcaggaggttctgctccagcatgagctcttgtacttacatagatctaatttatacagtgagtcaagacgtagaataaatgctcccacatagcctttcttttgcttttgcttctctcctctgaagtgtgagttgagttctcatttaggtttgtaacatggctatttcctagttgtaaagttctgcatttataagtgccattgttgtaaggtggtgtttcctagaccttccctgatgcgattttacctttgttgaatttgtataaacaattgtacaaaaaaaaccactcttgaactttgagggtttctgttctaggagtggactagaagtttaagcccagagtcagtaaacactgttttgaagtccaa

SEQ ID NO: 150147 - DNA, 4595 bp, Homo sapiens
  Payload ID: 9647
  Gene Symbol: KDM2B
  Gene Name: lysine (K)-specific demethylase 2B
  Uniprot ID: Q8NHM5
  ENST ID: ENST00000377071
  CDS Start-End: 74-4084
aaaagttaggcagtccttataggtatggaagccgagctaatttccttctgagccccccaaatgcctcctccacatggcgggtccgcaaatggggggatctgcagaggatcaccccccacgaaaaagacatgcagcagaaaagcaaaaaaagaaaacagttatatatacaaaatgctttgaatttgagtcggccacacagcgcccgattgaccgccagcgatacgacgagaacgaggacttgtcggacgtggaggagatcgtcagcgtccgcggcttcagcctggaggagaagcttcgcagccagctgtaccagggggacttcgtgcacgccatggagggcaaagatttcaactatgagtacgtacagagagaagctctcagggttcccctgatatttcgagaaaaggatggactgggaattaagatgcctgaccctgatttcacagtccgagacgtcaaactcctagtggggagccggcggcttgtggacgtgatggatgtgaacacccagaagggcacggagatgagcatgtcccagtttgtgcgttactacgagacgcccgaggcccagcgggacaagctgtacaacgtcatcagcctagagttcagccacaccaagctggagcacttggtcaagcgtccgactgtggtagacctggtggactgggtggacaacatgtggccccagcatctgaaggagaagcagacagaagccacgaacgccattgcagagatgaagtacccgaaagtgaaaaagtactgtctgatgagcgtgaaaggttgtttcaccgacttccacatcgactttggaggcacttccgtttggtaccatgttttccggggtgggaagattttttggctgattcctccaacgctgcacaatttggcgctgtacgaggagtgggtgctgtcaggcaaacagagtgacatctttctgggagaccgtgtggaacgatgccaaagaattgagctgaagcagggctacacatttttcatcccttccggttggatccatgccgtctacacccctgtagactctttggtgttcggcggaaacatcctgcacagctttaacgtgcccatgcagctgcggatctacgagatcgaggacaggacgcgggtgcagcccaaattccgttaccccttctactatgagatgtgctggtatgtcctggagagatacgtgtactgtgtgacccagcgctcccacctcactcaggaataccagagggagtcgatgcttattgatgccccgaggaagcccagcatagacggcttctcttcggattcctggctggagatggaggaggaggcctgtgatcagcagcctcaggaggaggaggagaaggacgaggagggcgagggcagggacagggcacccaaaccgcccaccgatggctccacttcacccaccagcacgccctctgaggaccaggaggccctcgggaagaagcccaaagcacctgccctgcgattcctcaaaaggactttgtctaatgagtcggaggaaagtgtgaagtccaccacattggccgtagactaccccaagacccccaccggctctcccgccacggaggtctctgccaaatggacccatctcactgagtttgaactgaagggcctgaaagctctggtggagaaactggaatccctcccggagaacaagaagtgtgtccccgagggcatcgaggacccccaggcactcctggagggtgtgaagaacgtcctgaaggagcacgcagatgatgaccctagtctggccatcactggggtccctgtggtgacttggccaaagaagactccaaagaaccgggctgtgggtcggcccaaggggaagctgggcccggcctccgcggtgaagttggccgccaaccggacaacggcaggagctcggcggcgccggacgcgatgccgcaagtgcgaggcctgcctgcggaccgagtgcggagagtgccacttctgcaaggacatgaagaagttcgggggccccgggcgcatgaagcagagctgcatcatgcggcagtgcatcgcgccagtgctgccccacaccgccgtgtgccttgtgtgtggcgaggcggggaaggaagacacggtggaagaggaggaaggcaagtttaacctcatgctcatggagtgctccatctgcaatgaaatcatccaccctggatgccttaagattaaggagtcagagggtgtggtcaacgacgagcttccaaactgctgggagtgtccgaagtgtaaccacgccggcaagaccgggaaacaaaagcgtggccctggctttaagtacgcctccaacctgcccggctccctgctcaaggagcagaagatgaaccgggacaacaaggaagggcaggaacctgccaagcggaggagtgagtgtgaggaggcgccccggcgcaggtcggatgagcactcgaagaaggtgccgccggacggccttctgcgcagaaagtctgacgacgtgcacctgaggaagaagcggaaatacgagaagccccaggagctgagtggacgcaagcgggcctcatcgcttcaaacgtcccccggttcctcctctcacctctcgccgaggccccctctaggcagcagcctcagcccctggtggagatccagtctcacttacttccagcagcagctcaaacctggcaaagaagataagcttttcaggaaaaagcggcggtcctggaagaacgccgaggaccgcatggcgctggccaacaagcccctccggcgcttcaagcaggaacccgaggacgaactgcccgaggcgccccccaagaccagggagagcgaccactcccgctccagctcccccaccgcgggacccagcaccgaaggggccgagggcccggaggagaagaagaaggtgaagatgcgccggaagcggcggcttcccaacaaggagctgagcagggagctgagcaaggagctcaaccacgagatccagaggacggagaacagcctggccaacgagaaccagcagcccatcaagtcggagcctgagagcgagggcgaggagcccaagcggcccccgggcatctgcgagcgtccccaccgcttcagcaaggggctcaacggcaccccccgggagctgcggcaccagctggggcccagcctgcgcagcccgccccgtgtcatctcccggcccccaccctccgtgtccccgcccaagtgtatccagatggagcgccatgtgatccggccaccccccatcagccccccgcctgactcgctacccctggacgatggggcagcccacgtcatgcacagggaggtgtggatggccgtcttcagctacctcagccaccaagacctgtgtgtgtgcatgcgggtctgcaggacctggaaccgctggtgctgcgataagcggttgtggacccgcattgacctgaaccactgcaagtctatcacacccctgatgctgagtggcatcatccggcgacagcccgtctccctcgacctcagctggaccaatatctccaagaagcagctgagctggctcatcaaccggctgcctgggctccgggacttggtgctgtcaggctgctcatggatcgcggtctcggccctttgcagctccagttgtccgctgctccggaccctggatgtccagtgggtggagggactaaaggatgcccagatgcgggatctcctgtccccgcccacagacaacaggccaggtcagatggacaatcggagcaagctccggaacatcgtggagctgcgcctggcaggcctggacatcacagatgcctccctgcggctcatcatccgccacatgcccctgctctccaagctccacctcagttactgtaaccacgtcaccgaccagtctatcaacctgctcactgctgttggcaccaccacccgagactccttaaccgagatcaacctgtctgactgcaataaggtcactgatcagtgcctgtccttcttcaaacgctgtggaaacatctgtcatattgacctgaggtactgcaagcaagtcaccaaggaaggctgtgagcagttcatagccgagatgtctgtgagtgtccagtttgggcaagtagaagaaaaactcctgcaaaaactgagttagtccaaggataagtatgtaaatacggggcgggctctgggaggggagagactttacaaaaatgagggcttttattttccatttggaacgtgggacaacagaccacaacgcaattccattttgcaagtctttccaagggagaagctgttcaaccacccgtttgggggatgagtgagccgacactttcctttggtctttctgaatcgtaactgcactgctttctggaccatttctaaggcggcctttacaagaagacattcctgtcggagaggagggtggacttcggagaaattctcatactgaagcatgagcttaggagtttctgttagtggtagtggtgttttggacacttcattccttgcaacaccgaggttttgggtgttgacataaagtggaccacacaccacatctgctgccgtcttgacacttttttttgtttggttggttttgttacatcttacattatgcagaactatttttgtacaaattgtttaaaagttatttatgcaaggtt

SEQ ID NO: 150148 - DNA, 1549 bp, Homo sapiens
  Payload ID: 9647
  Gene Symbol: KDM2B
  Gene Name: lysine (K)-specific demethylase 2B
  ENST ID: ENST00000446152
  CDS Start-End: 19-1549
gcgcgcgcttgtggggagatgaggcagctgctgcgcccgattgaccgccagcgatacgacgagaacgaggacttgtcggacgtggaggagatcgtcagcgtccgcggcttcagcctggaggagaagcttcgcagccagctgtaccagggggacttcgtgcacgccatggagggcaaagatttcaactatgagtacgtacagagagaagctctcagggttcccctgatatttcgagaaaaggatggactgggaattaagatgcctgaccctgatttcacagtccgagacgtcaaactcctagtggggagccggcggcttgtggacgtgatggatgtgaacacccagaagggcacggagatgagcatgtcccagtttgtgcgttactacgagacgcccgaggcccagcgggacaagctgtacaacgtcatcagcctagagttcagccacaccaagctggagcacttggtcaagcgtccgactgtggtagacctggtggactgggtggacaacatgtggccccagcatctgaaggagaagcagacagaagccacgaacgccattgcagagatgaagtacccgaaagtgaaaaagtactgtctgatgagcgtgaaaggttgtttcaccgacttccacatcgactttggaggcacttccgtttggtaccatgttttccggggtgggaagattttttggctgattcctccaacgctgcacaatttggcgctgtacgaggagtgggtgctgtcaggcaaacagagtgacatctttctgggagaccgtgtggaacgatgccaaagaattgagctgaagcagggctacacatttttcatcccttccggttggatccatgccgtctacacccctgtagactctttggtgttcggcggaaacatcctgcacagctttaacgtgcccatgcagctgcggatctacgagatcgaggacaggacgcgggtgcagcccaaattccgttaccccttctactatgagatgtgctggtatgtcctggagagatacgtgtactgtgtgacccagcgctcccacctcactcaggaataccagagggagtcgatgcttattgatgccccgaggaagcccagcatagacggcttctcttcggattcctggctggagatggaggaggaggcctgtgatcagcagcctcaggaggaggaggagaaggacgaggagggcgagggcagggacagggcacccaaaccgcccaccgatggctccacttcacccaccagcacgccctctgaggaccaggaggccctcgggaagaagcccaaagcacctgccctgcgattcctcaaaaggactttgtctaatgagtcggaggaaagtgtgaagtccaccacattggccgtagactaccccaagacccccaccggctctcccgccacggaggtctctgccaaatggacccatctcactgagtttgaactgaagggcctgaaagctctggtggagaaactggaatccctcccggagaacaagaagtgtgtccccgagggcatcgaggacccccaggcactcctggagggtg

SEQ ID NO: 150149 - DNA, 544 bp, Homo sapiens
  Payload ID: 9647
  Gene Symbol: KDM2B
  Gene Name: lysine (K)-specific demethylase 2B
  ENST ID: ENST00000545022
  CDS Start-End: 81-544
gaagtcctttgcttacgtcttgtgatttagatcttgacttgtgttctgtctccctgcctctgtgttgcaggtactgtctgatgagcgtgaaaggttgtttcaccgacttccacatcgactttggaggcacttccgtttggtaccatgttttccggggtgggaagattttttggctgattcctccaacgctgcacaatttggcgctgtacgaggagtgggtgctgtcaggcaaacagagtgacatctttctgggagaccgtgtggaacgatgccaaagaattgagctgaagcagggctacacatttttcatcccttccggttggatccatgccgtctacacccctgtagactctttggtgttcggcggaaacatcctgcacagctttaacgtgcccatgcagctgcggatctacgagatcgaggacaggacgcgggtgcagcccaaattccgttaccccttctactatgagatgtgctggtatgtcctggagagatacgtgtactgtgtgacccagcgctcccacctcactcaggaataccagag

SEQ ID NO: 150150 - DNA, 3170 bp, Homo sapiens
  Payload ID: 9647
  Gene Symbol: KDM2B
  Gene Name: lysine (K)-specific demethylase 2B
  ENST ID: ENST00000542973
  CDS Start-End: 390-2504
ctgccaaatggacccatctcactgagtttgaactgaagggcctgaaagctctggtggagaaactggaatccctcccggagaacaagaagtgtgtccccgagggcatcgaggacccccaggcactcctggagggtgtgaagaacgtcctgaaggagcacgcagatgatgaccctagtctggccatcactggggtccctgtggtgacttggccaaagaagactccaaagaaccgggctgtgggtcggcccaaggggaagctgggcccggcctccgcggtgaagttggccgccaaccggacaacggcaggagctcggcggcgccggacgcgatgccgcaagtgcgaggcctgcctgcggaccgagtgcggagagtgccacttctgcaaggacatgaagaagttcgggggccccgggcgcatgaagcagagctgcatcatgcggcagtgcatcgcgccagtgctgccccacaccgccgtgtgccttgtgtgtggcgaggcggggaaggaagacacggtggaagaggaggaaggcaagtttaacctcatgctcatggagtgctccatctgcaatgaaatcatccaccctggatgccttaagattaaggagtcagagggtgtggtcaacgacgagcttccaaactgctgggagtgtccgaagtgtaaccacgccggcaagaccgggaaacaaaagcgtggccctggctttaagtacgcctccaacctgcccggctccctgctcaaggagcagaagatgaaccgggacaacaaggaagggcaggaacctgccaagcggaggagtgagtgtgaggaggcgccccggcgcaggtcggatgagcactcgaagaaggtgccgccggacggccttctgcgcagaaagtctgacgacgtgcacctgaggaagaagcggaaatacgagaagccccaggagctgagtggacgcaagcgggcctcatcgcttcaaacgtcccccggttcctcctctcacctctcgccgaggccccctctaggcagcagcctcagcccctggtggagatccagtctcacttacttccagcagcagctcaaacctggcaaagaagataagcttttcaggaaaaagcggcggtcctggaagaacgccgaggaccgcatggcgctggccaacaagcccctccggcgcttcaagcaggaacccgaggacgaactgcccgaggcgccccccaagaccagggagagcgaccactcccgctccagctcccccaccgcgggacccagcaccgaaggggccgagggcccggaggagaagaagaaggtgaagatgcgccggaagcggcggcttcccaacaaggagctgagcagggagctgagcaaggagctcaaccacgagatccagaggacggagaacagcctggccaacgagaaccagcagcccatcaagtcggagcctgagagcgagggcgaggagcccaagcggcccccgggcatctgcgagcgtccccaccgcttcagcaaggggctcaacggcaccccccgggagctgcggcaccagctggggcccagcctgcgcagcccgccccgtgtcatctcccggcccccaccctccgtgtccccgcccaagtgtatccagatggagcgccatgtgatccggccaccccccatcagccccccgcctgactcgctacccctggacgatggggcagcccacgtcatgcacagggaggtgtggatggccgtcttcagctacctcagccaccaagacctgtgtgtgtgcatgcgggtctgcaggacctggaaccgctggtgctgcgataagcggttgtggacccgcattgacctgaaccactgcaagtctatcacacccctgatgctgagtggcatcatccggcgacagcccgtctccctcgacctcagctggaccaatatctccaagaagcagctgagctggctcatcaaccggctgcctgggctccgggacttggtgctgtcaggctgctcatggatcgcggtctcggccctttgcagctccagttgtccgctgctccggaccctggatgtccagtgggtggagggactaaaggatgcccagatgcgggatctcctgtccccgcccacagacaacaggccaggtcagatggacaatcggagcaagctccggaacatcgtggagctgcgcctggcaggcctggacatcacagatgcctccctgcggctcatcatccgccacatgcccctgctctccaagctccacctcagttactgtaaccacgtcaccgaccagtctatcaacctgctcactgctgttggcaccaccacccgagactccttaaccgagatcaacctgtctgactgcaataaggtcactgatcagtgcctgtccttcttcaaacgctgtggaaacatctgtcatattgacctgaggtactgcaagcaagtcaccaaggaaggctgtgagcagttcatagccgagatgtctgtgagtgtccagtttgggcaagtagaagaaaaactcctgcaaaaactgagttagtccaaggataatctttccaagggagaagctgttcaaccacccgtttgggggatgagtgagccgacactttcctttggtctttctgaatcgtaactgcactgctttctggaccatttctaaggcggcctttacaagaagacattcctgtcggagaggagggtggacttcggagaaattctcatactgaagcatgagcttaggagtttctgttagtggtagtggtgttttggacacttcattccttgcaacaccgaggttttgggtgttgacataaagtggaccacacaccacatctgctgccgtcttgacacttttttttgtttggttggttttgttacatcttacattatgcagaactatttttgtacaaattgtttaaaagttatttatgcaaggtttgaatgcataccagtgtttttattgttttgagattgccaattttcctgatttccttaaggtaggagagaatttaacgtgtacttcatcgacacaacccatctacaaatgtgcccagatctaacaaagtaggctaagaccttccacttaaaagcatgtttaactggaagttgagagtctgctttgtacctcaagagttacatgagcatgttgtggataaatgtaaattatagtcaaagtaagatactctgccaagtttcctctgtagag

SEQ ID NO: 150151 - DNA, 2522 bp, Homo sapiens
  Payload ID: 9647
  Gene Symbol: KDM2B
  Gene Name: lysine (K)-specific demethylase 2B
  ENST ID: ENST00000543025
  CDS Start-End: 44-358
gccgagctaatttccttctgagccccccaaatgcctcctccacatggcgggtccgcaaatggggggatctgcagaggatcaccccccacgaaaaagacatgcagcagaaaagcaaaaaaagaaaacagttatatatacaaaatgctttgaatttgagtcggccacacagcgcccgattgaccgccagcgatacgacgagaacgaggacttgtcggacgtggaggagatcgtcagcgtccgcggcttcagcctggaggagaagcttcgcagccagctgtaccagggggacttcgtgcacgccatggagggcaaaggatgcctgaccctgatttcacagtccgagacgtcaaactcctagtggggagccggcggcttgtggacgtgatggatgtgaacacccagaagggcacggagatgagcatgtcccagtttgtgcgttactacgagacgcccgaggcccagcgggacaagctgtacaacgtcatcagcctagagttcagccacaccaagctggagcacttggtcaagcgtccgactgtggtagacctggtggactgggtggacaacatgtggccccagcatctgaaggagaagcagacagaagccacgaacgccattgcagagatgaagtacccgaaagtgaaaaagtactgtctgatgagcgtgaaaggttgtttcaccgacttccacatcgactttggaggcacttccgtttggtaccatgttttccggggtgggaagattttttggctgattcctccaacgctgcacaatttggcgctgtacgaggagtgggtgctgtcaggcaaacagagtgacatctttctgggagaccgtgtggaacgatgccaaagaattgagctgaagcagggctacacatttttcatcccttccggttggatccatgccgtctacacccctgtagactctttggtgttcggcggaaacatcctgcacagctttaacgtgcccatgcagctgcggatctacgagatcgaggacaggacgcgggtgcagcccaaattccgttaccccttctactatgagatgtgctggtatgtcctggagagatacgtgtactgtgtgacccagcgctcccacctcactcaggaataccagagggagtcgatgcttattgatgccccgaggaagcccagcatagacggcttctcttcggattcctggctggagatggaggaggaggcctgtgatcagcagcctcaggaggaggaggagaaggacgaggagggcgagggcagggacagggcacccaaaccgcccaccgatggctccacttcacccaccagcacgccctctgaggaccaggaggccctcgggaagaagcccaaagcacctgccctgcgattcctcaaaaggactttgtctaatgagtcggaggaaagtgtgaagtccaccacattggccgtagactaccccaagacccccaccggctctcccgccacggaggtctctgccaaatggacccatctcactgagtttgaactgaagggcctgaaagctctggtggagaaactggaatccctcccggagaacaagaagtgtgtccccgagggcatcgaggacccccaggcactcctggagggtgtgaagaacgtcctgaaggagcacgcagatgatgaccctagtctggccatcactggggtccctgtggtgacttggccaaagaagactccaaagaaccgggctgtgggtcggcccaaggggaagctgggcccggcctccgcggtgaagttggccgccaaccggacaacggcaggagctcggcggcgccggacgcgatgccgcaagtgcgaggcctgcctgcggaccgagtgcggagagtgccacttctgcaaggacatgaagaagttcgggggccccgggcgcatgaagcagagctgcatcatgcggcagtgcatcgcgactgcaataaggtcactgatcagtgcctgtccttcttcaaacgctgtggaaacatctgtcatattgacctgaggtactgcaagcaagtcaccaaggaaggctgtgagcagttcatagccgagatgtctgtgagtgtccagtttgggcaagtagaagaaaaactcctgcaaaaactgagttagtccaaggataagtatgtaaatacggggcgggctctgggaggggagagactttacaaaaatgagggcttttattttccatttggaacgtgggacaacagaccacaacgcaattccattttgcaagtctttccaagggagaagctgttcaaccacccgtttgggggatgagtgagccgacactttcctttggtctttctgaatcgtaactgcactgctttctggaccatttctaaggcggcctttacaagaagacattcctgtcggagaggagggtggacttcggagaaattctcatactgaagcatgagcttaggagtttctgttagtggtagtggtgttttggacacttcattccttgcaacaccgaggttttgggtgttgacataaagtggaccacacaccacatctgctgccgtc

SEQ ID NO: 150152 - DNA, 892 bp, Homo sapiens
  Payload ID: 9647
  Gene Symbol: KDM2B
  Gene Name: lysine (K)-specific demethylase 2B
  ENST ID: ENST00000539394
  CDS Start-End: 353-892
ctttgcaaacggatctgcctaagtgttggtgcaaaactttgtagatctcggctctggcttgctttatttatttattttttggtttgttttctttggtcttccctccttcccccctcggccaaaatgcagggggcaggagtgttgacaattaattggtgaactctcctaaaaaaatggaggcagagaaagactctggaagaagattgcgcccgattgaccgccagcgatacgacgagaacgaggacttgtcggacgtggaggagatcgtcagcgtccgcggcttcagcctggaggagaagcttcgcagccagctgtaccagggggacttcgtgcacgccatggagggcaaaggatgcctgaccctgatttcacagtccgagacgtcaaactcctagtggggagccggcggcttgtggacgtgatggatgtgaacacccagaagggcacggagatgagcatgtcccagtttgtgcgttactacgagacgcccgaggcccagcgggacaagctgtacaacgtcatcagcctagagttcagccacaccaagctggagcacttggtcaagcgtccgactgtggtagacctggtggactgggtggacaacatgtggccccagcatctgaaggagaagcagacagaagccacgaacgccattgcagagatgaagtacccgaaagtgaaaaagtactgtctgatgagcgtgaaaggttgtttcaccgacttccacatcgactttggaggcacttccgtttggtaccatgttttccggggtgggaagattttttggctgattcctccaacgctgcacaatttggcgctgtacgaggagtgggtgctgtcaggcaaacagagtgacatctttctgggagaccgtgtggaacgatgccaaaga

SEQ ID NO: 150153 - DNA, 1188 bp, Homo sapiens
  Payload ID: 9647
  Gene Symbol: KDM2B
  Gene Name: lysine (K)-specific demethylase 2B
  ENST ID: ENST00000543852
  CDS Start-End: 318-689
cccaggcagcgccccaaagttggtgctgcaggtgcagcaaccctcctgccgccctcctccccggctggcccggccgtggcaggcgggaacccccaagggctcggttcgggggctcccgatgatctgccgccaacttggagggtgccttgctgcacagaagccacctgagctgggggcggccgggggcggccgaggcccaggcggaagccgggctagccggctggccgtggggagagcttagcggccgtggcaccgagccggggtgcccatgtgactgcggtgtgcttgggaagaggaagctgcagaggtactgtctgatgagcgtgaaaggttgtttcaccgacttccacatcgactttggaggcacttccgtttggtaccatgttttccggggtgggaagattttttggctgattcctccaacgctgcacaatttggcgctgtacgaggagtgggtgctgtcaggcaaacagagtgacatctttctgggagaccgtgtggaacgatgccaaagaattgagctgaagcagggctacacatttttcatcccttccggttggatccatgccgtctacacccctgtagactctttggtgttcggcggaaacatcctgcacagctttaacgtgcccatgcagctgcggatctacgagatcgaggacaggacgcgggagaaaaacaaattgtaggacacttccacccactctcacattttgactttttcaagtccttgagacctgggagttctagatacactcgagaaaccttttgttgtcatctcctgaggtcactcagcttgaagatgacttggacctccgaggaagggctgaggccaggtgccgctgagtgggccctgaggtcctctggtagacggatgacctgcaggctgggagcattgcatgccttgtgactgccttgccttttgttttggactgacgttggttaactcaatttggtgaggctccgagtctgtcaacaaataatgttgagcaaccgtatgtttaatgtccccaggcatgtggctgaaaccttttgaaggcgaagggtggaaggcgacaacctgtttgtaagtcaattctttgcaaatttttgtttcccgcagtcctctcttggaaaaaaaaataaataaataaataaaaatttgaattccttcatcagcatttgttttcacccagctggtttccattg

SEQ ID NO: 150154 - DNA, 528 bp, Homo sapiens
  Payload ID: 9647
  Gene Symbol: KDM2B
  Gene Name: lysine (K)-specific demethylase 2B
  ENST ID: ENST00000541511
  CDS Start-End: 236-528
atactgctgagcccccggtccacctgaaagcgaggtgcaaaaggcagccagagggagggggcaccaggagccctccgccttctaaccagctcagccccactccccgcattatctccactcgtgccggcgcgctgctggctcctccctgtccgtccccgccccattccttccctcttccccaaaccatggaaaggcaaagtgcagcggggaaaagaggtcagtggggtactgtctgatgagcgtgaaaggttgtttcaccgacttccacatcgactttggaggcacttccgtttggtaccatgttttccggggtgggaagattttttggctgattcctccaacgctgcacaatttggcgctgtacgaggagtgggtgctgtcaggcaaacagagtgacatctttctgggagaccgtgtggaacgatgccaaagaattgagctgaagcagggctacacatttttcatcccttccggttggatccatgccgtctacacccctgtagactctttggtgttcggcggaaacat

SEQ ID NO: 150155 - DNA, 600 bp, Homo sapiens
  Payload ID: 9647
  Gene Symbol: KDM2B
  Gene Name: lysine (K)-specific demethylase 2B
  ENST ID: ENST00000541318
  CDS Start-End: 476-600
attatctccactcgtgccggcgcgctgctggctcctccctgtccgtccccgccccattccttccctcttccccaaaccatggaaaggcaaagtgcagcggggaaaagaggtactgtctgatgagcgtgaaaggttgtttcaccgacttccacatcgactttggaggcacttccgtttggtaccatgttttccggggtgggaagattttttggctgattcctccaacgctgcacaatttggcgctgtacgaggagtgggtgctgtcaggcaaacagagtgacatctttctgggagaccgtgtggaacgatgccaaagaattgagctgaagcagggctacacatttttcatcccttccggttggatccatgccgtctacacccctgtagactctttggtgttcggcggaaacatcctgcacagctttaacgtgcccatgcagctgcggatctacgagatcgaggacaggacgcgggcatgtggctgaaaccttttgaaggcgaagggtggaaggcgacaacctgtttgtgcagcccaaattccgttaccccttctactatgagatgtgctggtatgtcctggagagatacgtgtactgtgtg

SEQ ID NO: 150156 - DNA, 460 bp, Homo sapiens
  Payload ID: 9647
  Gene Symbol: KDM2B
  Gene Name: lysine (K)-specific demethylase 2B
  ENST ID: ENST00000542030
  CDS Start-End: 84-460
atattgtcgatgactctggctggaagcaggaggcagatgccagcgttcccagcccaggcagcagcctgggagcaccggctctcatgcttcctgggctgtcgagaggccatcggaggaggggttggatccatgccgtctacacccctgtagactctttggtgttcggcggaaacatcctgcacagctttaacgtgcccatgcagctgcggatctacgagatcgaggacaggacgcgggtgcagcccaaattccgttaccccttctactatgagatgtgctggtatgtcctggagagatacgtgtactgtgtgacccagcgctcccacctcactcaggaataccagagggagtcgatgcttattgatgccccgaggaagcccagcatagacggcttctcttcggattcctggctggagatggaggaggaggcctgtgatcagcagcctcaggaggaggagga

SEQ ID NO: 150157 - DNA, 574 bp, Homo sapiens
  Payload ID: 9647
  Gene Symbol: KDM2B
  Gene Name: lysine (K)-specific demethylase 2B
  ENST ID: ENST00000538379
  CDS Start-End: 61-574
cttccctcttccccaaaccatggaaaggcaaagtgcagcggggaaaagaggtactgtctgatgagcgtgaaaggttgtttcaccgacttccacatcgactttggaggcacttccgtttggtaccatgttttccggggtgggaagattttttggctgattcctccaacgctgcacaatttggcgctgtacgaggagtgggtgctgtcaggcaaacagagtgacatctttctgggagaccgtgtggaacgatgccaaagaattgagctgaagcagggctacacatttttcatcccttccggttggatccatgccgtctacacccctgtagactctttggtgttcggcggaaacatcctgcacagctttaacgtgcccatgcagctgcggatctacgagatcgaggacaggacgcgggtgcagcccaaattccgttaccccttctactatgagatgtgctggtatgtcctggagagatacgtgtactgtgtgacccagcgctcccacctcactcaggaataccagagggagtcgatgcttattgatgccccgaggaagcccagcatagacggcttct

SEQ ID NO: 150158 - DNA, 2762 bp, Homo sapiens
  Payload ID: 9647
  Gene Symbol: KDM2B
  Gene Name: lysine (K)-specific demethylase 2B
  ENST ID: ENST00000536437
  CDS Start-End: 44-2164
gccgagctaatttccttctgagccccccaaatgcctcctccacatggcgggtccgcaaatggggggatctgcagaggatcaccccccacgaaaaagacatgcagcagaaaagcaaaaaaagaaaacagttatatatacaaaatgctttgaatttgagtcggccacacagcgcccgattgaccgccagcgatacgacgagaacgaggacttgtcggacgtggaggagatcgtcagcgtccgcggcttcagcctggaggagaagcttcgcagccagctgtaccagggggacttcgtgcacgccatggagggcaaagatttcaactatgagtacgtacagagagaagctctcagggttcccctgatatttcgagaaaaggatggactgggaattaagatgcctgaccctgatttcacagtccgagacgtcaaactcctagtggggagccggcggcttgtggacgtgatggatgtgaacacccagaagggcacggagatgagcatgtcccagtttgtgcgttactacgagacgcccgaggcccagcgggacaagctgtacaacgtcatcagcctagagttcagccacaccaagctggagcacttggtcaagcgtccgactgtggtagacctggtggactgggtggacaacatgtggccccagcatctgaaggagaagcagacagaagccacgaacgccattgcagagatgaagtacccgaaagtgaaaaagtactgtctgatgagcgtgaaaggttgtttcaccgacttccacatcgactttggaggcacttccgtttggtaccatgttttccggggtgggaagattttttggctgattcctccaacgctgcacaatttggcgctgtacgaggagtgggtgctgtcaggcaaacagagtgacatctttctgggagaccgtgtggaacgatgccaaagaattgagctgaagcagggctacacatttttcatcccttccggttggatccatgccgtctacacccctgtagactctttggtgttcggcggaaacatcctgcacagctttaacgtgcccatgcagctgcggatctacgagatcgaggacaggacgcgggtgcagcccaaattccgttaccccttctactatgagatgtgctggtatgtcctggagagatacgtgtactgtgtgacccagcgctcccacctcactcaggaataccagagggagtcgatgcttattgatgccccgaggaagcccagcatagacggcttctcttcggattcctggctggagatggaggaggaggcctgtgatcagcagcctcaggaggaggaggagaaggacgaggagggcgagggcagggacagggcacccaaaccgcccaccgatggctccacttcacccaccagcacgccctctgaggaccaggaggccctcgggaagaagcccaaagcacctgccctgcgattcctcaaaaggactttgtctaatgagtcggaggaaagtgtgaagtccaccacattggccgtagactaccccaagacccccaccggctctcccgccacggaggtctctgccaaatggacccatctcactgagtttgaactgaagggcctgaaagctctggtggagaaactggaatccctcccggagaacaagaagtgtgtccccgagggcatcgaggacccccaggcactcctggagggtgtgaagaacgtcctgaaggagcacgcagatgatgaccctagtctggccatcactggggtccctgtggtgacttggccaaagaagactccaaagaaccgggctgtgggtcggcccaaggggaagctgggcccggcctccgcggtgaagttggccgccaaccggacaacggcaggagctcggcggcgccggacgcgatgccgcaagtgcgaggcctgcctgcggaccgagtgcggagagtgccacttctgcaaggacatgaagaagttcgggggccccgggcgcatgaagcagagctgcatcatgcggcagtgcatcgcgccagtgctgccccacaccgccgtgtgccttgtgtgtggcgaggcggggaaggaagacacggtggaagaggaggaaggcaagtttaacctcatgctcatggagtgctccatctgcaatgaaatcatccaccctggatgccttaagcgagatcaacctgtctgactgcaataaggtcactgatcagtgcctgtccttcttcaaacgctgtggaaacatctgtcatattgacctgaggtactgcaagcaagtcaccaaggaaggctgtgagcagttcatagccgagatgtctgtgagtgtccagtttgggcaagtagaagaaaaactcctgcaaaaactgagttagtccaaggataagtatgtaaatacggggcgggctctgggaggggagagactttacaaaaatgagggcttttattttccatttggaacgtgggacaacagaccacaacgcaattccattttgcaagtctttccaagggagaagctgttcaaccacccgtttgggggatgagtgagccgacactttcctttggtctttctgaatcgtaactgcactgctttctggaccatttctaaggcggcctttacaagaagacattcctgtcggagaggagggtggacttcggagaaattctcatactgaagcatgagcttaggagtttctgttagtggtagtggtgttttggacacttcattccttgcaacaccgaggttttgggtgttgacataaagtggaccacacaccacatctgctgccgtc

SEQ ID NO: 150159 - DNA, 2301 bp, Homo sapiens
  Payload ID: 9647
  Gene Symbol: KDM2B
  Gene Name: lysine (K)-specific demethylase 2B
  ENST ID: ENST00000538046
  CDS Start-End: 105-1628
gtgtgtccacatctttgagtgccgggagtttaaaagttaggcagtccttataggtatggaagccgagctaatttccttctgagccccccaaatgcctcctccacatggcgggtccgcaaatggggggatctgcagaggatcaccccccacgaaaaagacatgcagcagaaaagcaaaaaaagaaaacagttatatatacaaaatgctttgaatttgagtcggccacacagcgcccgattgaccgccagcgatacgacgagaacgaggacttgtcggacgtggaggagatcgtcagcgtccgcggcttcagcctggaggagaagcttcgcagccagctgtaccagggggacttcgtgcacgccatggagggcaaagatttcaactatgagtacgtacagagagaagctctcagggttcccctgatatttcgagaaaaggatggactgggaattaagatgcctgaccctgatttcacagtccgagacgtcaaactcctagtggggagccggcggcttgtggacgtgatggatgtgaacacccagaagggcacggagatgagcatgtcccagtttgtgcgttactacgagacgcccgaggcccagcgggacaagctgtacaacgtcatcagcctagagttcagccacaccaagctggagcacttggtcaagcgtccgactgtggtagacctggtggactgggtggacaacatgtggccccagcatctgaaggagaagcagacagaagccacgaacgccattgcagagatgaagtacccgaaagtgaaaaagtactgtctgatgagcgtgaaaggttgtttcaccgacttccacatcgactttggaggcacttccgtttggtaccatgttttccggggtgggaaggtgcagcccaaattccgttaccccttctactatgagatgtgctggtatgtcctggagagatacgtgtactgtgtgacccagcgctcccacctcactcaggaataccagagggagtcgatgcttattgatgccccgaggaagcccagcatagacggcttctcttcggattcctggctggagatggaggaggaggcctgtgatcagcagcctcaggaggaggaggagaaggacgaggagggcgagggcagggacagggcacccaaaccgcccaccgatggctccacttcacccaccagcacgccctctgaggaccaggaggccctcgggaagaagcccaaagcacctgccctgcgattcctcaaaaggactttgtctaatgagtcggaggaaagtgtgaagtccaccacattggccgtagactaccccaagacccccaccggctctcccgccacggaggtctctgccaaatggacccatctcactgagtttgaactgaagggcctgaaagctctggtggagaaactggaatccctcccggagaacaagaagtgtgtccccgagggcatcgaggacccccaggcactcctggagggtgtgaagaacgtcctgaaggagcacgcagatgatgaccctagtctggccatcactggggtccctgtggtgacttggccaaagaagactccaaaggtaagacgcagcctgcctgcagcgggcggccgcttcccacctccttcccacctcctgtagggtgaacagccgcgactttttgggtagctatggggcctcctgagatgaaggcaccgcagttaagatgaaggattttggtgatttgttccatgtttttgtttttaaaagggggttgctttacctagctgtgggaactgcgaacagtgccgcctggtggtcacttggaaaactggggggtgctgacacctcgcctttccctgtggttaggtggattttctgtctctccttccctcactcccttgcttcttcccttccttttcccttttcctttaattgcttcatgggctgtcttctcctcttttgaaaggaactttttctcagtgtgtaaaactggttgatgctcaacataaaaatgtctaatcggtcgagcgcggtggctcacgccataatctcagcattttgggaagtctaggcgggtggatcacctgaggtcaggagttcgagaccagcctggccaacatggcaaaaccccgtctctactaaaaatacaaaaaatgcgagcatggtggtgcacacatgtggtcccagctacttgggaggctgaggcaggagaatcacttgaacctgggaggtggaggttgcagtgatcagagactgcaccactgcactccagtctgggctacaaagtgagactctatctcaaaaaataaaataaaataaaataaaaaaaaaa

SEQ ID NO: 150160 - DNA, 3434 bp, Homo sapiens
  Payload ID: 9647
  Gene Symbol: KDM2B
  Gene Name: lysine (K)-specific demethylase 2B
  Uniprot ID: Q8NHM5
  ENST ID: ENST00000611216
  CDS Start-End: 456-2135
gtgtgtccacatctttgagtgccgggagtttaaaagttaggcagtccttataggtatggaagccgagctaatttccttctgagccccccaaatgcctcctccacatggcgggtccgcaaatggggggatctgcagaggatcaccccccacgaaaaagacatgcagcagaaaagcaaaaaaagaaaacagttatatatacaaaatgctttgaatttgagtcggccacacagcgcccgattgaccgccagcgatacgacgagaacgaggacttgtcggacgtggaggagatcgtcagcgtccgcggcttcagcctggaggagaagcttcgcagccagctgtaccagggggacttcgtgcacgccatggagggcaaagatttcaactatgagtacgtacagagagaagctctcagggttcccctgatatttcgagaaaaggatggactgggaattaagatgcctgaccctgatttcacagtccgagacgtcaaactcctagtggggagccggcggcttgtggacgtgatggatgtgaacacccagaagggcacggagatgagcatgtcccagtttgtgcgttactacgagacgcccgaggcccagcgggacaagctgtacaacgtcatcagcctagagttcagccacaccaagctggagcacttggtcaagcgtccgactgtggtagacctggtggactgggtggacaacatgtggccccagcatctgaaggagaagcagacagaagccacgaacgccattgcagagatgaagtacccgaaagtgaaaaagtactgtctgatgagcgtgaaaggttgtttcaccgacttccacatcgactttggaggcacttccgtttggtaccatgttttccggggtgggaagattttttggctgattcctccaacgctgcacaatttggcgctgtacgaggagtgggtgctgtcaggcaaacagagtgacatctttctgggagaccgtgtggaacgatgccaaagaattgagctgaagcagggctacacatttttcatcccttccggttggatccatgccgtctacacccctgtagactctttggtgttcggcggaaacatcctgcacagctttaacgtgcccatgcagctgcggatctacgagatcgaggacaggacgcgggtgcagcccaaattccgttaccccttctactatgagatgtgctggtatgtcctggagagatacgtgtactgtgtgacccagcgctcccacctcactcaggaataccagagggagtcgatgcttattgatgccccgaggaagcccagcatagacggcttctcttcggattcctggctggagatggaggaggaggcctgtgatcagcagcctcaggaggaggaggagaaggacgaggagggcgagggcagggacagggcacccaaaccgcccaccgatggctccacttcacccaccagcacgccctctgaggaccaggaggccctcgggaagaagcccaaagcacctgccctgcgattcctcaaaaggactttgtctaatgagtcggaggaaagtgtgaagtccaccacattggccgtagactaccccaagacccccaccggctctcccgccacggaggtctctgccaaatggacccatctcactgagtttgaactgaagggcctgaaagctctggtggagaaactggaatccctcccggagaacaagaagtgtgtccccgagggcatcgaggacccccaggcactcctggagggtgtgaagaacgtcctgaaggagcacgcagatgatgaccctagtctggccatcactggggtccctgtggtgacttggccaaagaagactccaaagaaccgggctgtgggtcggcccaaggggaagctgggcccggcctccgcggtgaagttggccgccaaccggacaacggcaggagctcggcggcgccggacgcgatgccgcaagtgcgaggcctgcctgcggaccgagtgcggagagtgccacttctgcaaggacatgaagaagttcgggggccccgggcgcatgaagcagagctgcatcatgcggcagtgcatcgcgactgcaataaggtcactgatcagtgcctgtccttcttcaaacgctgtggaaacatctgtcatattgacctgaggtactgcaagcaagtcaccaaggaaggctgtgagcagttcatagccgagatgtctgtgagtgtccagtttgggcaagtagaagaaaaactcctgcaaaaactgagttagtccaaggataagtatgtaaatacggggcgggctctgggaggggagagactttacaaaaatgagggcttttattttccatttggaacgtgggacaacagaccacaacgcaattccattttgcaagtctttccaagggagaagctgttcaaccacccgtttgggggatgagtgagccgacactttcctttggtctttctgaatcgtaactgcactgctttctggaccatttctaaggcggcctttacaagaagacattcctgtcggagaggagggtggacttcggagaaattctcatactgaagcatgagcttaggagtttctgttagtggtagtggtgttttggacacttcattccttgcaacaccgaggttttgggtgttgacataaagtggaccacacaccacatctgctgccgtcttgacacttttttttgtttggttggttttgttacatcttacattatgcagaactatttttgtacaaattgtttaaaagttatttatgcaaggtttgaatgcataccagtgtttttattgttttgagattgccaattttcctgatttccttaaggtaggagagaatttaacgtgtacttcatcgacacaacccatctacaaatgtgcccagatctaacaaagtaggctaagaccttccacttaaaagcatgtttaactggaagttgagagtctgctttgtacctcaagagttacatgagcatgttgtggataaatgtaaattatagtcaaagtaagatactctgccaagtttcctctgtagagaattcacttttctcaaattttaaaatttcgacttcagcctttgcactcaggaggttctgctccagcatgagctcttgtacttacatagatctaatttatacagtgagtcaagacgtagaataaatgctcccacatagcctttcttttgcttttgcttctctcctctgaagtgtgagttgagttctcatttaggtttgtaacatggctatttcctagttgtaaagttctgcatttataagtgccattgttgtaaggtggtgtttcctagaccttccctgatgcgattttacctttgttgaatttgtataaacaattgtacaaaaaaaaccactcttgaactttgagggtttctgttctaggagtggactagaagtttaagcccagagtcagtaaacactgttttgaagtcc

SEQ ID NO: 150161 - DNA, 4886 bp, Homo sapiens
  Payload ID: 9648
  Gene Symbol: KDM3A
  Gene Name: lysine (K)-specific demethylase 3A
  Uniprot ID: Q9Y4C1
  ENST ID: ENST00000312912
  CDS Start-End: 328-4293
taatgggggtcgcccgggagtcggaagggggaggggaaagggaggaggcagccaaggaattgtttttttctctggccccgccctcgcccggggggccaatggtgatgatctgtttcccccggagcctcgcccagctcctgtgtttcagccaatgagcggcggaagcggctccgaggggggcgggtccgggaggctgtgcgtgtcttgtgagagctcttgaaccaagtcagcgctggagtcggctaggcggctggaaacggcggctgccgccggtgactcagggaggcgggaggcgggggaggagctcttcctgcaggcgtggaaaccatggtgctcacgctcggagaaagttggccggtattggtggggaggaggtttctcagtctgtccgcagccgacggcagcgatggcagccacgacagctgggacgtggagcgcgtcgccgagtggccctggctctccgggaccattcgagctgtttcccacaccgacgttaccaagaaggatctgaaggtgtgtgtggaatttgatggggaatcttggaggaaaagaagatggatagaagtctacagccttctaaggagagcatttttagtagaacataatttggttttagctgaacgaaagtcacctgaaatttctgaacgaattgtacagtggcctgcaataacgtacaaacctctgttggacaaagctggtttgggatccataacttctgttcgctttctgggagatcaacaaagagtatttctttctaaagaccttttgaagcctatacaggatgtaaacagtcttcgactttctcttacggataatcagattgtcagtaaagaatttcaagctttgattgtgaagcatttagatgaaagccatcttttaaaaggtgacaaaaacttagttggttcagaagtaaaaatttatagcttggacccatctactcagtggttttcagcaaccgttataaatggaaacccagcatcaaaaactcttcaagtcaactgtgaggagattccagcactgaaaattgttgatccgtcactgattcatgttgaagttgtacacgataaccttgtgacatgtggtaattctgcaagaattggagctgtaaaacgcaagtcttctgagaataatggaaccctggtttccaaacaagcaaaatcttgctctgaggcctctcccagtatgtgtcctgtgcagtctgtacctacaacagtttttaaggagatactgcttggctgtactgcggcaactccacctagtaaggacccaagacagcaaagtactccccaggctgccaactctccacctaaccttggagcaaaaattcctcaaggatgtcataaacaaagtttaccagaggaaatttcttcctgtctaaatacaaagtctgaagctctgagaacaaaaccagatgtctgcaaagcagggttgctctcaaagtcctctcagattggaactggagacttgaaaattctgactgagccaaaaggcagctgtactcagcctaagacaaacactgatcaggaaaacagattggagtctgttccacaagcattgactggccttcctaaggagtgcttacctacaaaggcttcttctaaggcagaattggaaattgccaatcctcctgaactgcagaagcacctagaacatgcaccttccccatcggatgtttcaaatgcaccagaagtgaaagcaggtgtcaatagtgatagccctaataactgttcaggaaaaaaggtagaaccttcagctttagcttgccgatcacagaatttaaaggaatcttcagtaaaagtagataatgaaagctgttgttcaagaagcaacaataaaatccagaatgccccatccaggaagtcggttttgacagacccagctaaactcaaaaagctgcaacagagtggcgaggccttcgtacaggatgattcttgtgtgaacatcgtggcacagttgcctaaatgccgagagtgtcgcttggacagtctccgcaaggataaggagcaacagaaggactcacctgtgttttgccgcttctttcacttcaggaggttacaattcaacaaacatggtgtgttgcgggtagaaggcttcttaacaccaaacaagtatgacaatgaagcaattggcttgtggttacctttaaccaaaaacgttgtggggattgatttggacacagcaaagtacatcttggccaacattggagaccacttctgtcaaatggtgatttctgaaaaggaagctatgtcaactattgagccacacagacaggttgcttggaagcgagctgtcaaaggtgttcgagaaatgtgtgatgtgtgcgacaccaccatcttcaacctgcactgggtgtgtcctcggtgtgggtttggagtatgtgtggactgctaccggatgaagagaaagaattgccaacagggtgctgcttacaagactttctcttggctaaaatgtgtgaagagtcagatacatgaaccagagaacttaatgcccacacagatcattcctggaaaagcactctatgatgttggagacattgttcattctgtaagagcgaaatggggaataaaggcaaactgcccttgttcaaacaggcaattcaaactcttttcaaagccagcctcaaaggaagacctaaaacagacttctttagctggagaaaaaccgactcttggtgcagtgctccagcagaatccctcagtgttggagccagcagctgtgggtggggaagcagcctccaagccagccggcagcatgaagcctgcctgtccagccagcacatctcctctaaactggctggccgacctaaccagcgggaatgtcaacaaggaaaacaaggaaaaacaaccaacaatgccaattttaaagaatgaaatcaaatgccttccacccctcccacctttaagcaaatccagcacagtcctccatacgtttaacagcacaattttgacacccgtaagcaacaacaattctggtttcctccggaatctcttgaattcttctacaggaaagacagaaaatggactcaagaatacaccaaaaatccttgatgacatctttgcctctttggtgcaaaataagacgacttctgatttatctaagaggcctcaaggactaaccatcaagcccagcattctgggctttgacactcctcactattggctttgtgataatcgcttgctgtgcttgcaagaccccaacaataagagcaactggaatgtgtttagggagtgctggaaacaagggcagccagtgatggtgtctggagtgcatcataaattgaactctgaactttggaaacctgaatccttcaggaaagagtttggtgagcaggaagtagacctagttaattgtaggaccaatgaaatcatcacaggagccacagtaggagacttctgggatggatttgaagatgttccaaatcgtttgaaaaatgaaaaagaaccaatggtgttgaaacttaaggactggccaccaggagaagattttagagatatgatgccttccaggtttgatgatctgatggccaacattccactgcccgagtacacaaggcgagatggcaaactgaatttggcctctaggctgccaaactactttgttcggccagatctgggccccaagatgtataatgcttatggattaatcactcctgaagatcggaaatatggaacaacaaatcttcacttagatgtatctgatgcagctaatgtcatggtctatgtgggaattcccaaaggacagtgtgagcaagaagaagaagtccttaagaccatccaagatggagattctgacgaactcacaataaagcgatttattgaaggaaaagagaagccaggagcactgtggcacatatatgctgcaaaggacacggagaagataagggaatttcttaaaaaggtatcagaagagcaaggtcaagaaaacccagcagaccacgatcctattcatgatcaaagctggtatttagaccgatcattaagaaaacgtcttcatcaagagtatggagttcaaggctgggctattgtacagtttcttggggatgtggtgtttatcccggcaggagctccacatcaggttcataacttatatagctgcatcaaagtggctgaagattttgtttctccagagcatgttaaacactgcttctggcttactcaggaattccgatatctgtcacagactcataccaatcacgaagataaattacaggtgaagaatgttatctaccatgcagtgaaagatgcagttgctatgctgaaagccagtgaatccagttttggcaaaccttaatctccctgcacattggaaatgaattacaggcagctgttcaaactcttcaggcaggattcctgtggactttgagattcatgttacctcatcttcttttttaaactgtacccaacttgtgagggtactctgtctaatgtatatttctagtgtttacagacagtaaatgtgtatatgtagtaactatttacagaacatgcatccttaaactgtgacttctcacctagtgcagaacttttaccaggctgtaaaagcaaaacctcgtatcagctctggaacaatacctgcagttattcttcagctgtttggacaacttagattgggtttataactattaggaatcactgcacagtttatttgggttgtgttttgtgtctgagtcccctccctcatcccttagggtccagaagagcaatggaggaagtgacagctaatgttgcagttcttattgtatggcataggactggcattatatagcagaaatcaactactgtacaatttcttggggttaaccatctttagttaaatggaattttaatttaaatgacgctttgctaattttaagtgttaagcattttgcattaaaatattcatat

SEQ ID NO: 150162 - DNA, 4621 bp, Homo sapiens
  Payload ID: 9648
  Gene Symbol: KDM3A
  Gene Name: lysine (K)-specific demethylase 3A
  Uniprot ID: Q9Y4C1
  ENST ID: ENST00000409064
  CDS Start-End: 59-4024
ctcggctgcggggagaggggagagaaagggaggagctcttcctgcaggcgtggaaaccatggtgctcacgctcggagaaagttggccggtattggtggggaggaggtttctcagtctgtccgcagccgacggcagcgatggcagccacgacagctgggacgtggagcgcgtcgccgagtggccctggctctccgggaccattcgagctgtttcccacaccgacgttaccaagaaggatctgaaggtgtgtgtggaatttgatggggaatcttggaggaaaagaagatggatagaagtctacagccttctaaggagagcatttttagtagaacataatttggttttagctgaacgaaagtcacctgaaatttctgaacgaattgtacagtggcctgcaataacgtacaaacctctgttggacaaagctggtttgggatccataacttctgttcgctttctgggagatcaacaaagagtatttctttctaaagaccttttgaagcctatacaggatgtaaacagtcttcgactttctcttacggataatcagattgtcagtaaagaatttcaagctttgattgtgaagcatttagatgaaagccatcttttaaaaggtgacaaaaacttagttggttcagaagtaaaaatttatagcttggacccatctactcagtggttttcagcaaccgttataaatggaaacccagcatcaaaaactcttcaagtcaactgtgaggagattccagcactgaaaattgttgatccgtcactgattcatgttgaagttgtacacgataaccttgtgacatgtggtaattctgcaagaattggagctgtaaaacgcaagtcttctgagaataatggaaccctggtttccaaacaagcaaaatcttgctctgaggcctctcccagtatgtgtcctgtgcagtctgtacctacaacagtttttaaggagatactgcttggctgtactgcggcaactccacctagtaaggacccaagacagcaaagtactccccaggctgccaactctccacctaaccttggagcaaaaattcctcaaggatgtcataaacaaagtttaccagaggaaatttcttcctgtctaaatacaaagtctgaagctctgagaacaaaaccagatgtctgcaaagcagggttgctctcaaagtcctctcagattggaactggagacttgaaaattctgactgagccaaaaggcagctgtactcagcctaagacaaacactgatcaggaaaacagattggagtctgttccacaagcattgactggccttcctaaggagtgcttacctacaaaggcttcttctaaggcagaattggaaattgccaatcctcctgaactgcagaagcacctagaacatgcaccttccccatcggatgtttcaaatgcaccagaagtgaaagcaggtgtcaatagtgatagccctaataactgttcaggaaaaaaggtagaaccttcagctttagcttgccgatcacagaatttaaaggaatcttcagtaaaagtagataatgaaagctgttgttcaagaagcaacaataaaatccagaatgccccatccaggaagtcggttttgacagacccagctaaactcaaaaagctgcaacagagtggcgaggccttcgtacaggatgattcttgtgtgaacatcgtggcacagttgcctaaatgccgagagtgtcgcttggacagtctccgcaaggataaggagcaacagaaggactcacctgtgttttgccgcttctttcacttcaggaggttacaattcaacaaacatggtgtgttgcgggtagaaggcttcttaacaccaaacaagtatgacaatgaagcaattggcttgtggttacctttaaccaaaaacgttgtggggattgatttggacacagcaaagtacatcttggccaacattggagaccacttctgtcaaatggtgatttctgaaaaggaagctatgtcaactattgagccacacagacaggttgcttggaagcgagctgtcaaaggtgttcgagaaatgtgtgatgtgtgcgacaccaccatcttcaacctgcactgggtgtgtcctcggtgtgggtttggagtatgtgtggactgctaccggatgaagagaaagaattgccaacagggtgctgcttacaagactttctcttggctaaaatgtgtgaagagtcagatacatgaaccagagaacttaatgcccacacagatcattcctggaaaagcactctatgatgttggagacattgttcattctgtaagagcgaaatggggaataaaggcaaactgcccttgttcaaacaggcaattcaaactcttttcaaagccagcctcaaaggaagacctaaaacagacttctttagctggagaaaaaccgactcttggtgcagtgctccagcagaatccctcagtgttggagccagcagctgtgggtggggaagcagcctccaagccagccggcagcatgaagcctgcctgtccagccagcacatctcctctaaactggctggccgacctaaccagcgggaatgtcaacaaggaaaacaaggaaaaacaaccaacaatgccaattttaaagaatgaaatcaaatgccttccacccctcccacctttaagcaaatccagcacagtcctccatacgtttaacagcacaattttgacacccgtaagcaacaacaattctggtttcctccggaatctcttgaattcttctacaggaaagacagaaaatggactcaagaatacaccaaaaatccttgatgacatctttgcctctttggtgcaaaataagacgacttctgatttatctaagaggcctcaaggactaaccatcaagcccagcattctgggctttgacactcctcactattggctttgtgataatcgcttgctgtgcttgcaagaccccaacaataagagcaactggaatgtgtttagggagtgctggaaacaagggcagccagtgatggtgtctggagtgcatcataaattgaactctgaactttggaaacctgaatccttcaggaaagagtttggtgagcaggaagtagacctagttaattgtaggaccaatgaaatcatcacaggagccacagtaggagacttctgggatggatttgaagatgttccaaatcgtttgaaaaatgaaaaagaaccaatggtgttgaaacttaaggactggccaccaggagaagattttagagatatgatgccttccaggtttgatgatctgatggccaacattccactgcccgagtacacaaggcgagatggcaaactgaatttggcctctaggctgccaaactactttgttcggccagatctgggccccaagatgtataatgcttatggattaatcactcctgaagatcggaaatatggaacaacaaatcttcacttagatgtatctgatgcagctaatgtcatggtctatgtgggaattcccaaaggacagtgtgagcaagaagaagaagtccttaagaccatccaagatggagattctgacgaactcacaataaagcgatttattgaaggaaaagagaagccaggagcactgtggcacatatatgctgcaaaggacacggagaagataagggaatttcttaaaaaggtatcagaagagcaaggtcaagaaaacccagcagaccacgatcctattcatgatcaaagctggtatttagaccgatcattaagaaaacgtcttcatcaagagtatggagttcaaggctgggctattgtacagtttcttggggatgtggtgtttatcccggcaggagctccacatcaggttcataacttatatagctgcatcaaagtggctgaagattttgtttctccagagcatgttaaacactgcttctggcttactcaggaattccgatatctgtcacagactcataccaatcacgaagataaattacaggtgaagaatgttatctaccatgcagtgaaagatgcagttgctatgctgaaagccagtgaatccagttttggcaaaccttaatctccctgcacattggaaatgaattacaggcagctgttcaaactcttcaggcaggattcctgtggactttgagattcatgttacctcatcttcttttttaaactgtacccaacttgtgagggtactctgtctaatgtatatttctagtgtttacagacagtaaatgtgtatatgtagtaactatttacagaacatgcatccttaaactgtgacttctcacctagtgcagaacttttaccaggctgtaaaagcaaaacctcgtatcagctctggaacaatacctgcagttattcttcagctgtttggacaacttagattgggtttataactattaggaatcactgcacagtttatttgggttgtgttttgtgtctgagtcccctccctcatcccttagggtccagaagagcaatggaggaagtgacagctaatgttgcagttcttattgtatggcataggactggcattatatagcagaaatcaactactgtacaatttcttggggttaaccatctttagttaaatggaattttaatttaaatgacgctttgctaattttaagtgttaagcattttgcattaaaatattcatataata

SEQ ID NO: 150163 - DNA, 4928 bp, Homo sapiens
  Payload ID: 9648
  Gene Symbol: KDM3A
  Gene Name: lysine (K)-specific demethylase 3A
  Uniprot ID: Q9Y4C1
  ENST ID: ENST00000409556
  CDS Start-End: 366-4331
actatcgctcctccctctagctgagtacgcctgaaaccgcacgttctcttccctgccctcccccgctaaccctgcaccgccctcaccctttcctgtgagattcttccgccaagtggaaggctcatcttcggtcgacagcctacgcggttgaagaacaatccacctcgcccagctcctgtgtttcagccaatgagcggcggaagcggctccgaggggggcgggtccgggaggctgtgcgtgtcttgtgagagctcttgaaccaagtcagcgctggagtcggctaggcggctggaaacggcggctgccgccggtgactcagggaggcgggaggcgggggaggagctcttcctgcaggcgtggaaaccatggtgctcacgctcggagaaagttggccggtattggtggggaggaggtttctcagtctgtccgcagccgacggcagcgatggcagccacgacagctgggacgtggagcgcgtcgccgagtggccctggctctccgggaccattcgagctgtttcccacaccgacgttaccaagaaggatctgaaggtgtgtgtggaatttgatggggaatcttggaggaaaagaagatggatagaagtctacagccttctaaggagagcatttttagtagaacataatttggttttagctgaacgaaagtcacctgaaatttctgaacgaattgtacagtggcctgcaataacgtacaaacctctgttggacaaagctggtttgggatccataacttctgttcgctttctgggagatcaacaaagagtatttctttctaaagaccttttgaagcctatacaggatgtaaacagtcttcgactttctcttacggataatcagattgtcagtaaagaatttcaagctttgattgtgaagcatttagatgaaagccatcttttaaaaggtgacaaaaacttagttggttcagaagtaaaaatttatagcttggacccatctactcagtggttttcagcaaccgttataaatggaaacccagcatcaaaaactcttcaagtcaactgtgaggagattccagcactgaaaattgttgatccgtcactgattcatgttgaagttgtacacgataaccttgtgacatgtggtaattctgcaagaattggagctgtaaaacgcaagtcttctgagaataatggaaccctggtttccaaacaagcaaaatcttgctctgaggcctctcccagtatgtgtcctgtgcagtctgtacctacaacagtttttaaggagatactgcttggctgtactgcggcaactccacctagtaaggacccaagacagcaaagtactccccaggctgccaactctccacctaaccttggagcaaaaattcctcaaggatgtcataaacaaagtttaccagaggaaatttcttcctgtctaaatacaaagtctgaagctctgagaacaaaaccagatgtctgcaaagcagggttgctctcaaagtcctctcagattggaactggagacttgaaaattctgactgagccaaaaggcagctgtactcagcctaagacaaacactgatcaggaaaacagattggagtctgttccacaagcattgactggccttcctaaggagtgcttacctacaaaggcttcttctaaggcagaattggaaattgccaatcctcctgaactgcagaagcacctagaacatgcaccttccccatcggatgtttcaaatgcaccagaagtgaaagcaggtgtcaatagtgatagccctaataactgttcaggaaaaaaggtagaaccttcagctttagcttgccgatcacagaatttaaaggaatcttcagtaaaagtagataatgaaagctgttgttcaagaagcaacaataaaatccagaatgccccatccaggaagtcggttttgacagacccagctaaactcaaaaagctgcaacagagtggcgaggccttcgtacaggatgattcttgtgtgaacatcgtggcacagttgcctaaatgccgagagtgtcgcttggacagtctccgcaaggataaggagcaacagaaggactcacctgtgttttgccgcttctttcacttcaggaggttacaattcaacaaacatggtgtgttgcgggtagaaggcttcttaacaccaaacaagtatgacaatgaagcaattggcttgtggttacctttaaccaaaaacgttgtggggattgatttggacacagcaaagtacatcttggccaacattggagaccacttctgtcaaatggtgatttctgaaaaggaagctatgtcaactattgagccacacagacaggttgcttggaagcgagctgtcaaaggtgttcgagaaatgtgtgatgtgtgcgacaccaccatcttcaacctgcactgggtgtgtcctcggtgtgggtttggagtatgtgtggactgctaccggatgaagagaaagaattgccaacagggtgctgcttacaagactttctcttggctaaaatgtgtgaagagtcagatacatgaaccagagaacttaatgcccacacagatcattcctggaaaagcactctatgatgttggagacattgttcattctgtaagagcgaaatggggaataaaggcaaactgcccttgttcaaacaggcaattcaaactcttttcaaagccagcctcaaaggaagacctaaaacagacttctttagctggagaaaaaccgactcttggtgcagtgctccagcagaatccctcagtgttggagccagcagctgtgggtggggaagcagcctccaagccagccggcagcatgaagcctgcctgtccagccagcacatctcctctaaactggctggccgacctaaccagcgggaatgtcaacaaggaaaacaaggaaaaacaaccaacaatgccaattttaaagaatgaaatcaaatgccttccacccctcccacctttaagcaaatccagcacagtcctccatacgtttaacagcacaattttgacacccgtaagcaacaacaattctggtttcctccggaatctcttgaattcttctacaggaaagacagaaaatggactcaagaatacaccaaaaatccttgatgacatctttgcctctttggtgcaaaataagacgacttctgatttatctaagaggcctcaaggactaaccatcaagcccagcattctgggctttgacactcctcactattggctttgtgataatcgcttgctgtgcttgcaagaccccaacaataagagcaactggaatgtgtttagggagtgctggaaacaagggcagccagtgatggtgtctggagtgcatcataaattgaactctgaactttggaaacctgaatccttcaggaaagagtttggtgagcaggaagtagacctagttaattgtaggaccaatgaaatcatcacaggagccacagtaggagacttctgggatggatttgaagatgttccaaatcgtttgaaaaatgaaaaagaaccaatggtgttgaaacttaaggactggccaccaggagaagattttagagatatgatgccttccaggtttgatgatctgatggccaacattccactgcccgagtacacaaggcgagatggcaaactgaatttggcctctaggctgccaaactactttgttcggccagatctgggccccaagatgtataatgcttatggattaatcactcctgaagatcggaaatatggaacaacaaatcttcacttagatgtatctgatgcagctaatgtcatggtctatgtgggaattcccaaaggacagtgtgagcaagaagaagaagtccttaagaccatccaagatggagattctgacgaactcacaataaagcgatttattgaaggaaaagagaagccaggagcactgtggcacatatatgctgcaaaggacacggagaagataagggaatttcttaaaaaggtatcagaagagcaaggtcaagaaaacccagcagaccacgatcctattcatgatcaaagctggtatttagaccgatcattaagaaaacgtcttcatcaagagtatggagttcaaggctgggctattgtacagtttcttggggatgtggtgtttatcccggcaggagctccacatcaggttcataacttatatagctgcatcaaagtggctgaagattttgtttctccagagcatgttaaacactgcttctggcttactcaggaattccgatatctgtcacagactcataccaatcacgaagataaattacaggtgaagaatgttatctaccatgcagtgaaagatgcagttgctatgctgaaagccagtgaatccagttttggcaaaccttaatctccctgcacattggaaatgaattacaggcagctgttcaaactcttcaggcaggattcctgtggactttgagattcatgttacctcatcttcttttttaaactgtacccaacttgtgagggtactctgtctaatgtatatttctagtgtttacagacagtaaatgtgtatatgtagtaactatttacagaacatgcatccttaaactgtgacttctcacctagtgcagaacttttaccaggctgtaaaagcaaaacctcgtatcagctctggaacaatacctgcagttattcttcagctgtttggacaacttagattgggtttataactattaggaatcactgcacagtttatttgggttgtgttttgtgtctgagtcccctccctcatcccttagggtccagaagagcaatggaggaagtgacagctaatgttgcagttcttattgtatggcataggactggcattatatagcagaaatcaactactgtacaatttcttggggttaaccatctttagttaaatggaattttaatttaaatgacgctttgctaattttaagtgttaagcattttgcattaaaatattcatataata

SEQ ID NO: 150164 - DNA, 8741 bp, Homo sapiens
  Payload ID: 9648
  Gene Symbol: KDM3A
  Gene Name: lysine (K)-specific demethylase 3A
  ENST ID: ENST00000441719
  CDS Start-End: 97-2232
gctggagtcggctaggcggctggaaacggcggctgccgccggtgactcagggaggcgggaggcgggggaggagctcttcctgcaggcgtggaaaccatggtgctcacgctcggagaaagttggccggtattggtggggaggaggtttctcagtctgtccgcagccgacggcagcgatggcagccacgacagctgggacgtggagcgcgtcgccgagtggccctggctctccgggaccattcgagctgtttcccacaccgacgttaccaagaaggatctgaaggtgtgtgtggaatttgatggggaatcttggaggaaaagaagatggatagaagtctacagccttctaaggagagcatttttagtagaacataatttggttttagctgaacgaaagtcacctgaaatttctgaacgaattgtacagtggcctgcaataacgtacaaacctctgttggacaaagctggtttgggatccataacttctgttcgctttctgggagatcaacaaagagtatttctttctaaagaccttttgaagcctatacaggatgtaaacagtcttcgactttctcttacggataatcagattgtcagtaaagaatttcaagctttgattgtgaagcatttagatgaaagccatcttttaaaaggtgacaaaaacttagttggttcagaagtaaaaatttatagcttggacccatctactcagtggttttcagcaaccgttataaatggaaacccagcatcaaaaactcttcaagtcaactgtgaggagattccagcactgaaaattgttgatccgtcactgattcatgttgaagttgtacacgataaccttgtgacatgtggtaattctgcaagaattggagctgtaaaacgcaagtcttctgagaataatggaaccctggtttccaaacaagcaaaatcttgctctgaggcctctcccagtatgtgtcctgtgcagtctgtacctacaacagtttttaaggagatactgcttggctgtactgcggcaactccacctagtaaggacccaagacagcaaagtactccccaggctgccaactctccacctaaccttggagcaaaaattcctcaaggatgtcataaacaaagtttaccagaggaaatttcttcctgtctaaatacaaagtctgaagctctgagaacaaaaccagatgtctgcaaagcagggttgctctcaaagtcctctcagattggaactggagacttgaaaattctgactgagccaaaaggcagctgtactcagcctaagacaaacactgatcaggaaaacagattggagtctgttccacaagcattgactggccttcctaaggagtgcttacctacaaaggcttcttctaaggcagaattggaaattgccaatcctcctgaactgcagaagcacctagaacatgcaccttccccatcggatgtttcaaatgcaccagaagtgaaagcaggtgtcaatagtgatagccctaataactgttcaggaaaaaaggtagaaccttcagctttagcttgccgatcacagaatttaaaggaatcttcagtaaaagtagataatgaaagctgttgttcaagaagcaacaataaaatccagaatgccccatccaggaagtcggttttgacagacccagctaaactcaaaaagctgcaacagagtggcgaggccttcgtacaggatgattcttgtgtgaacatcgtggcacagttgcctaaatgccgagagtgtcgcttggacagtctccgcaaggataaggagcaacagaaggactcacctgtgttttgccgcttctttcacttcaggaggttacaattcaacaaacatggtgtgttgcgggtagaaggcttcttaacaccaaacaagtatgacaatgaagcaattggcttgtggttacctttaaccaaaaacgttgtggggattgatttggacacagcaaagtacatcttggccaacattggagaccacttctgtcaaatggtgatttctgaaaaggaagctatgtcaactattgagccacacagacaggttgcttggaagcgagctgtcaaaggtgttcgagaaatgtgtgatgtgtgcgacaccaccatcttcaacctgcactgggtgtgtcctcggtgtgggtttggagtatgtgtggactgctaccggatgaagagaaagaattgccaacagggtgagaaccgatttgattctcctccagcccctctacacagttaaatcaagtgtttttgttgatttgtgtttggcgggtttcttgaagcatgtggagacagagtctgtaaagaacagttactacaaatcagttatttgcaggtgctgcttacaagactttctcttggctaaaatgtgtgaagagtcagatacatgaaccagagaacttaatgcccacacagatcattcctggaaaagcactctatgatgttggagacattgttcattctgtaagagcgaaatggggaataaaggcaaactgcccttgttcaaacaggcaattcaaactcttttcaaagccagcctcaaaggaagacctaaaacaggtatttactgcttatgttaaattcaacatctcttgtaattgtcatttgtctgtttttcaaataacccaaggatttctatcagtgcatttgaaaggaacctggggatagctatcaagtggaaagagagagagaaagaattcatacagttcatgtgacagttcagagacccgttctgacttttcacattactttcgtagactctactgtggcctcttgtagtaggttttacatttttgtttcttgaagaagcacaaagttctaaagtagtctacctaataagtagctgtcgaatttgtaaagggtttaaaaaaattttttgtgtattttgcagaattaaaattattaagataagctttaacatttttaaaattactaaatatattttgcctgtgtttatgcagagttgaaggaaatgatgaaatgaacctttagttgcccatcacacaatgtaaaaaatgttaattttctcagtcctcatatgtctctccttggtggcatccctctcctccccaccatcacatgtacgtcttgctgtcccttctccccctcgttccagtaatcagtatgccgcattgtgtttaataatcagaaatttacatttctataaagctgtggtgtcataaggcaggatgggagagcagaagacttgtaatatttggagtcagaactgaatttgagttcttttccttccacgtgctagttgtgttactttggctgaagtgagctggtttctatgtgcttcagcttcctcatcagtaatatagaaataagaagcaatattgatgattgggcatcacagaattacatcacatgtaaagagagggcctggaccacaacaggggtttgaatattttttttcctccttcttatgtatgtataaactcactcttgccagtttttaaaattattttcttctacagcagtcatcttagatttaatttatgggttcttttaagagctcatcacatttttaaagctaagtcaaaatagcattttctctttctctgcatcccatttccttctgaaatcaccgctttacctttcctgcctgcgtcatttattcgtttttaaccatgttttctgtgcctatcctgaattctgggatgagttcataggggagacaggcacaaactggtcattttaaaccagcatggtacatagagtaatagggatatgtaccagcaggggctggtgaaagggtgcggggggtaataccttgctgtgtttaagttgctgacatctctcctaccttttagttattctctactagtgcgggattactgcagctgtggggatacccagggctaactattaggtggttttgttctggatatttatcttacttgttggtcggctattaggagagaagaaaagaaaaggaagctgtcattcttcagcttatgtaaaatcgtcctttaatgcttaacacagacttctttagctggagaaaaaccgactcttggtgcagtgctccagcagaatccctcagtgttggagccagcagctgtgggtggggaagcagcctccaagccagccggcagcatgaagcctgcctgtccagccagcacatctcctctaaactggctggccgacctaaccagcgggaatgtcaacaaggaaaacaaggaaaaacaaccaacaatgccaattttaaagaatgaaatcaaatgccttccacccctcccacctttaagcaaatccagcacagtcctccatacgtttaacagcacaattttgacacccgtaagcaacaacaattctggtttcctccggaatctcttgaattcttctacaggaaagacagaaaatggactcaagaatacaccaaaaatccttgatgacatctttgcctctttggtgcaaaataagacgacttctgatttatctaagaggcctcaaggactaaccatcaagcccagcattctgggctttgacactcctcactattggctttgtgataatcgcttgctgtgcttgcaagaccccaacaataagagcaactggaatgtgtttagggagtgctggaaacaagggcaggtaatgtaggcctcccatcctcctgccctattcagaacccccttctcagttcctttagcagacttctgacaaccccaccccaggctttccccctccttcacctcctgttttattctttattgtttcaggtgaatataatcaggtcaggatgtggccatgggtcttactttttaaagcagatggtcctaagctggacttttccagtcaggtttttgttgcttcctaccagtccctgttgggtttttgacgagggcatccaggcttggtgattcctatggtaaacttcagcagaggaagtgagggtgtgactacaggctgatgggatttgggagatcagacaaaatgtgctacaaaatcatgcacccctcttacctgaatgaaaagcctgtgctgaaggcagttctaggtgggctagggccgcgtggtgtcacatagtccccaggtgcctgcttcaaagggcagtgttgttggatcttaagtgccggttaatatctttaggagaatttctaggcctgcttctgtgctttcttgttttggttctgttttctggatctctggcttctctgtttggccagatagggtctttgctaaaggaacactctgctcttggacaagaatttgggagaattgccaaacagaaagatgtgagtgtttaaccaaaaataaatttccaaaatgtttttctccatccagtgtactaataggatttgctcatttaatcatatatagacaagaaacaaaatgatgggctgaatacagtttatcggcaggctttctttcttgcttgtcaatattttaatgttagactatttcacataaaggttagagcttctgggttgtcttagacggccaaaagatttggcaccctcacacagccagtagtagtgaggggtgtcacaggccatattcctgcttggcaataacaggctcaagtacggtggggtcagtcaccctgtttcactggtgactggtgtcactggacactccttccagcgcttgtcttcttcacagtccgtcttgctgtaagtaatgagatcttactaggagaggtgatcctttctcctagatgcttacccatgtagtttgagagcaagggtgtgtagcagatgaatggtgaaggttggaggtgctttgggagctcagagaactaagccgaaactgtcacatcaccatctgagacggagcaccagctccatggaaatataccaatagcagtgtgaagagggactgccttcgggagtggggacagagctggcagagttcagactaaagttttccttctcttcatttagccagtgatggtgtctggagtgcatcataaattgaactctgaactttggaaacctgaatccttcaggaaagagtttggtgagcaggaagtagacctagttaattgtaggaccaatgaaatcatcacaggagccacagtaggagacttctgggatggatttgaagatgttccaaatcgtttgaaaaatgaaaaagaaccaatggtgttgaaacttaaggactggccaccaggagaagattttagagatatgatgccttccaggtttgatgatctgatggccaacattccactgcccgagtacacaaggcgagatggcaaactgaatttggcctctaggctgccaaactactttgttcggccagatctgggccccaagatgtataatgcttatggattaatcactcctgaagatcggaaatatggaacaacaaatcttcacttagatgtatctgatgcagctaatgtcatggtctatgtgggaattcccaaaggacagtgtgagcaagaagaagaagtccttaagaccatccaagatggagattctgacgaactcacaataaagcgatttattgaaggaaaagagaagccaggagcactgtggcacatatatgctgcaaaggacacggagaagataagggaatttcttaaaaaggtgtgctgcttatggcatgtgtgaacagaggcataaggaatagcaatattatgttactacatgtggtgaactgactggcttggctaggggaattgtcacaacctgaaaagttaaatctgtacctgtcagattgaataggctgaaggtggttgctaaggaacaaggattctaaatgattagggttacacttctaaaaaaagcaggccttgtcttttatgtctgtgttttgtgttagagtgcatttagagatttttgttctctgctttcaagttagaagttagttcatctgatcatctcccagcatatatctgtttttattgccttgagaatctgagcacttcagacgttcatgtatccttggccctgagtgaccatgttctgagtgagttgctaagtttggttttgtccactgtcatgtagcaagtggtcctacttgttactagcaagggttgcagggatttggaagattctaggtttcccctgtagttggcaggtttttttttcagcaagggctatgtgtggaaattctaggcaactagaaagatgagtcgtgttcagttttaaaattgtttggcactgaggctgccggttgcaactcaggtgtctttggctgatattcttcagtcattcatgagtcttggatatgaacattcgtaacctgttagctggccccaagtatgtctttaacaagcatttgtttgaatcaaagtgtttctggctaaggatcatttggctcttccagaaaaccggcttggtcaccatattgttcttttgatattgtcactctgagtctctgctttaccagttactggatcaaggataaacaagtctaatctgcagctgtctttgggactgtttcgtaagtcagattaagtaaaggcaggtttctaataactttaaaacaagttcatttataaggatactgagcctacttatgtttaaaaatctagactaaaatattgtttaaatacagtatttacaaacttatgcagagcctgtcagtcatggtttatgggaactgacatcacattttcttcgtcattcttctgttggttcattcagctgaagtctttgatactactagtcgtcttctgccaatgggggcacttaagttgaagaaggcctgacatttatgaactgccaacactgtttagaggaaaaaaatggcttattgggccttagcatgttactgagttgcataatattttgaatgtattctaggtatcagaagagcaaggtcaagaaaacccagcagaccacgatcctattcatgatcaaagctggtatttagaccgatcattaagaaaacgtcttcatcaagagtatggagttcaaggctgggctattgtacagtttcttggggatgtggtgtttatcccggcaggagctccacatcaggttcataacttatatagctgcatcaaagtggctgaagattttgtttctccagagcatgttaaacactgcttctggcttactcaggaattccgatatctgtcacagactcataccaatcacgaagataaattacaggtgaagaatgttatctaccatgcagtgaaagatgcagttgctatgctgaaagccagtgaatccagttttggcaaaccttaatctccctgcacattggaaatgaattacaggcagctgttcaaactcttcaggcaggattcctgtggactttgagattcatgttacctcatcttcttttttaaactgtacccaacttgtgagggtactctgtctaatgtatatttctagtgtttacagacagtaaatgtgtatatgtagtaactatttacagaacatgcatccttaaactgtgacttctcacctagtgcagaacttttaccaggctgtaaaagcaaaacctcgtatcagctctggaacaatacctgcagttattcttcagctgtttggacaacttagattgggtttataactattaggaatcactgcacagtttatttgggttgtgttttgtgtctgagtcccctccctcatcccttagggtccagaagagcaatggaggaagtgacagctaatgttgcagttcttattgtatggcataggactggcattatatagcagaaatcaactactgtacaatttcttggggttaaccatctttagttaaatggaattttaatttaaatgacgctttgctaattttaagtgttaagcattttgcattaaaatattcatataa

SEQ ID NO: 150165 - DNA, 709 bp, Homo sapiens
  Payload ID: 9648
  Gene Symbol: KDM3A
  Gene Name: lysine (K)-specific demethylase 3A
  ENST ID: ENST00000452034
  CDS Start-End: 347-709
attatccagtaactccacgcctttcttcatttatccttcaaaatggcggactttagacgttccacgatcagtaccacgtgcgcctgcgcctcccgcagccatttcgcccagcagcctaagctcggcgaggcgcctgcgcacgagcctccagagcactatcgctcctccctctagctgagtacgcctgaaaccgcacgttctcttccctgccctcccccgctaaccctgcaccgccctcaccctttcctgtgagattcttccgccaagtggaaggctcatcttcggtcgacagcctacgcggttgaagaacaatccaggaggagctcttcctgcaggcgtggaaaccatggtgctcacgctcggagaaagttggccggtattggtggggaggaggtttctcagtctgtccgcagccgacggcagcgatggcagccacgacagctgggacgtggagcgcgtcgccgagtggccctggctctccgggaccattcgagctgtttcccacaccgacgttaccaagaaggatctgaaggtgtgtgtggaatttgatggggaatcttggaggaaaagaagatggatagaagtctacagccttctaaggagagcatttttagtagaacataatttggttttagctgaacgaaagtcacctgaaatttctgaacgaattgtacagtggcctgcaataacgtacaaacctctgttggac

SEQ ID NO: 150166 - DNA, 565 bp, Homo sapiens
  Payload ID: 9648
  Gene Symbol: KDM3A
  Gene Name: lysine (K)-specific demethylase 3A
  ENST ID: ENST00000427678
  CDS Start-End: 54-565
attttgtttttgtgtttttgcagggaggagctcttcctgcaggcgtggaaaccatggtgctcacgctcggagaaagttggccggtattggtggggaggaggtttctcagtctgtccgcagccgacggcagcgatggcagccacgacagctgggacgtggagcgcgtcgccgagtggccctggctctccgggaccattcgagctgtttcccacaccgacgttaccaagaaggatctgaaggtgtgtgtggaatttgatggggaatcttggaggaaaagaagatggatagaagtctacagccttctaaggagagcatttttagtagaacataatttggttttagctgaacgaaagtcacctgaaatttctgaacgaattgtacagtggcctgcaataacgtacaaacctctgttggacaaagctggtttgggatccataacttctgttcgctttctgggagatcaacaaagagtatttctttctaaagaccttttgaagcctatacaggatgtaaacagtcttcgactttctcttacggataatcagattgtcagtaaagaatttca

SEQ ID NO: 150167 - DNA, 4311 bp, Homo sapiens
  Payload ID: 9648
  Gene Symbol: KDM3A
  Gene Name: lysine (K)-specific demethylase 3A
  ENST ID: ENST00000542128
  CDS Start-End: 328-4311
taatgggggtcgcccgggagtcggaagggggaggggaaagggaggaggcagccaaggaattgtttttttctctggccccgccctcgcccggggggccaatggtgatgatctgtttcccccggagcctcgcccagctcctgtgtttcagccaatgagcggcggaagcggctccgaggggggcgggtccgggaggctgtgcgtgtcttgtgagagctcttgaaccaagtcagcgctggagtcggctaggcggctggaaacggcggctgccgccggtgactcagggaggcgggaggcgggggaggagctcttcctgcaggcgtggaaaccatggtgctcacgctcggagaaagttggccggtattggtggggaggaggtttctcagtctgtccgcagccgacggcagcgatggcagccacgacagctgggacgtggagcgcgtcgccgagtggccctggctctccgggaccattcgagctgtttcccacaccgacgttaccaagaaggatctgaaggtgtgtgtggaatttgatggggaatcttggaggaaaagaagatggatagaagtctacagccttctaaggagagcatttttagtagaacataatttggttttagctgaacgaaagtcacctgaaatttctgaacgaattgtacagtggcctgcaataacgtacaaacctctgttggacaaagctggtttgggatccataacttctgttcgctttctgggagatcaacaaagagtatttctttctaaagaccttttgaagcctatacaggatgtaaacagtcttcgactttctcttacggataatcagattgtcagtaaagaatttcaagctttgattgtgaagcatttagatgaaagccatcttttaaaaggtgacaaaaacttagttggttcagaagtaaaaatttatagcttggacccatctactcagtggttttcagcaaccgttataaatggaaacccagcatcaaaaactcttcaagtcaactgtgaggagattccagcactgaaaattgttgatccgtcactgattcatgttgaagttgtacacgataaccttgtgacatgtggtaattctgcaagaattggagctgtaaaacgcaagtcttctgagaataatggaaccctggtttccaaacaagcaaaatcttgctctgaggcctctcccagtatgtgtcctgtgcagtctgtacctacaacagtttttaaggagatactgcttggctgtactgcggcaactccacctagtaaggacccaagacagcaaagtactccccaggctgccaactctccacctaaccttggagcaaaaattcctcaaggatgtcataaacaaagtttaccagaggaaatttcttcctgtctaaatacaaagtctgaagctctgagaacaaaaccagatgtctgcaaagcagggttgctctcaaagtcctctcagattggaactggagacttgaaaattctgactgagccaaaaggcagctgtactcagcctaagacaaacactgatcaggaaaacagattggagtctgttccacaagcattgactggccttcctaaggagtgcttacctacaaaggcttcttctaaggcagaattggaaattgccaatcctcctgaactgcagaagcacctagaacatgcaccttccccatcggatgtttcaaatgcaccagaagtgaaagcaggtgtcaatagtgatagccctaataactgttcaggaaaaaaggtagaaccttcagctttagcttgccgatcacagaatttaaaggaatcttcagtaaaagtagataatgaaagctgttgttcaagaagcaacaataaaatccagaatgccccatccaggaagtcggttttgacagacccagctaaactcaaaaagctgcaacagagtggcgaggccttcgtacaggatgattcttgtgtgaacatcgtggcacagttgcctaaatgccgagagtgtcgcttggacagtctccgcaaggataaggagcaacagaaggactcacctgtgttttgccgcttctttcacttcaggaggttacaattcaacaaacatggtgtgttgcgggtagaaggcttcttaacaccaaacaagtatgacaatgaagcaattggcttgtggttacctttaaccaaaaacgttgtggggattgatttggacacagcaaagtacatcttggccaacattggagaccacttctgtcaaatggtgatttctgaaaaggaagctatgtcaactattgagccacacagacaggttgcttggaagcgagctgtcaaaggtgttcgagaaatgtgtgatgtgtgcgacaccaccatcttcaacctgcactgggtgtgtcctcggtgtgggtttggagtatgtgtggactgctaccggatgaagagaaagaattgccaacagggtgctgcttacaagactttctcttggctaaaatgtgtgaagagtcagatacatgaaccagagaacttaatgcccacacagatcattcctggaaaagcactctatgatgttggagacattgttcattctgtaagagcgaaatggggaataaaggcaaactgcccttgttcaaacaggcaattcaaactcttttcaaagccagcctcaaaggaagacctaaaacagacttctttagctggagaaaaaccgactcttggtgcagtgctccagcagaatccctcagtgttggagccagcagctgtgggtggggaagcagcctccaagccagccggcagcatgaagcctgcctgtccagccagcacatctcctctaaactggctggccgacctaaccagcgggaatgtcaacaaggaaaacaaggaaaaacaaccaacaatgccaattttaaagaatgaaatcaaatgccttccacccctcccacctttaagcaaatccagcacagtcctccatacgtttaacagcacaattttgacacccgtaagcaacaacaattctggtttcctccggaatctcttgaattcttctacaggaaagacagaaaatggactcaagaatacaccaaaaatccttgatgacatctttgcctctttggtgcaaaataagacgacttctgatttatctaagaggcctcaaggactaaccatcaagcccagcattctgggctttgacactcctcactattggctttgtgataatcgcttgctgtgcttgcaagaccccaacaataagagcaactggaatgtgtttagggagtgctggaaacaagggcagccagtgatggtgtctggagtgcatcataaattgaactctgaactttggaaacctgaatccttcaggaaagagtttggtgagcaggaagtagacctagttaattgtaggaccaatgaaatcatcacaggagccacagtaggagacttctgggatggatttgaagatgttccaaatcgtttgaaaaatgaaaaagaaccaatggtgttgaaacttaaggactggccaccaggagaagattttagagatatgatgccttccaggtttgatgatctgatggccaacattccactgcccgagtacacaaggcgagatggcaaactgaatttggcctctaggctgccaaactactttgttcggccagatctgggccccaagatgtataatgcttatggattaatcactcctgaagatcggaaatatggaacaacaaatcttcacttagatgtatctgatgcagctaatgtcatggtctatgtgggaattcccaaaggacagtgtgagcaagaagaagaagtccttaagaccatccaagatggagattctgacgaactcacaataaagcgatttattgaaggaaaagagaagccaggagcactgtggcacatatatgctgcaaaggacacggagaagataagggaatttcttaaaaaggtatcagaagagcaaggtcaagaaaacccagcagaccacgatcctattcatgatcaaagctggtatttagaccgatcattaagaaaacgtcttcatcaagagtatggagttcaaggctgggctattgtacagtttcttggggatgtggtgtttatcccggcaggagctccacatcaggttcataacttatatagctgcatcaaagtggctgaagattttgtttctccagagcatgttaaacactgcttctggcttactcaggaattccgatatctgtcacagactcataccaatcacgaagataaattacaggtgaagaatgttatctaccatgcagtgaaagatgcagttgctatgctgaaagtgaatccagttttggcaaaccttaatctccctgcacattggaaatga

SEQ ID NO: 150168 - DNA, 6813 bp, Homo sapiens
  Payload ID: 9649
  Gene Symbol: KDM3B
  Gene Name: lysine (K)-specific demethylase 3B
  Uniprot ID: Q7LBC6
  ENST ID: ENST00000314358
  CDS Start-End: 201-5486
gcggggcccaggctgcggctccgctcccggccacggggggcgctgcgctgcgccggtggttggtggtggctgttggggggggtgggggggaacggcggccgcgggtggtgcggagggaggccttgcgggcggatcgggcgcttggcggcggaggtggtgggaggcggcgggcgggagcgcgggtcaggccggccccggcgatggcggacgcggcggcctccccggtgggcaagcggctgctgctgctgttcgcggacactgcggcctcagcctcggcctcggctcccgcggcggcagcggcgagcggagatccggggcctgcgctgcgcactcgagcctggcgggccggcacggtgcgggccatgagcggggcggtgccccaggacctagcgatctttgtagaatttgatggctgtaactggaagcaacactcctgggtaaaagttcatgctgaggaagttatcgtgcttctgctggaagggtctcttgtatgggcgccccgtgaggacccagtccttctccagggcattcgagtctccattgcacaatggccagccctgacttttactccccttgtagataaactgggtttgggttctgtggttccagtggaatatcttctggatcgagagcttcggttcctgtcagatgccaatgggttgcatctgtttcagatgggaacagatagccaaaaccagattcttttggaacatgctgcactgagagaaacagttaatgctttgatcagtgaccaaaagctacaagagatattcagccgaggtccctacagtgttcaaggtcacagggtcaaaatatatcagccagagggggaagaagggtggctctatggtgttgtgagccatcaggactccatcactcgtcttatggaggtgtctgtaactgagagtggtgagatcaagtcggtagatcccagactaatccatgtgatgctgatggataattcagcgcctcaaagcgaggggggtacgttaaaagcagtaaaatcttccaaaggaaagaagaagagagaaagcatagaggggaaagatggccggaggaggaaaagtgcttcggactctgggtgtgaccctgcatcaaagaaattaaaaggagacaggggtgaagtagacagtaatgggagcgatggaggtgaggcaagccgagggccctggaaaggagggaatgccagtggagagccagggctggatcagagagccaagcagccaccgtctacatttgtcccccagataaaccgcaacattcgctttgccacttacaccaaagaaaacggcaggactctggtggtgcaggatgagcctgtaggtggggacacacctgcatctttcactccatattctacagccacaggtcagacacctttggccccagaggtgggtggagccgaaaacaaagaggcaggaaaaacactggaacaagttggccagggcatagtggcttccgcagctgtggtcactaccgccagctccaccccaaacacagtgaggatctcagacactggccttgcagcagggactgtgccagaaaaacagaaaggcagccggtcgcaggcctcgggagagaattcaagaaattctattctggcctcttctggatttggagcacctctccctagttcatcgcaacctttgacttttggaagtggaaggagccagtccaatggtgttctagccacagagaacaaacctttgggcttctcttttggctgtagctctgcacaagaggcacagaaagacactgatctctccaaaaacttgttttttcaatgcatgtcccaaactttacctaccagtaactacttcactactgtttcagagagtttggctgatgattcttctagtcgggactcattcaaacaaagccttgagagcctgagctcaggcctgtgtaaaggcagatccgttcttggaacagacactaagccaggctctaaggctggcagctctgtggaccggaaagtgcctgcagagtccatgcccaccctcactccagccttcccacggagcctcctaaatgcccgtaccccagagaatcatgaaaatctatttttacagccccccaaattgtcccgagaagagccttctaatcctttcctggcatttgtggagaaagttgaacacagccctttcagtagttttgcatctcaggcatcaggtagctcctcttctgctaccactgtcacctccaaggtggcacccagctggcccgagtctcactcctctgcagattcggcatctttagcaaagaagaaacccctcttcattacaactgactcctccaagctagtatctggtgttctgggctcagctcttaccagtgggggcccaagcctctctgccatggggaatggccgctccagctcgcccaccagcagcctcactcagcccattgagatgccaactctctcctctagccccacagaggagaggccaactgtggggcctgggcagcaggacaatcccctcctcaaaacctttagtaacgtctttggcaggcactcaggcggctttctgtcctccccggcagatttttcacaggagaacaaagctccttttgaagctgtgaaaaggttctcactggatgaacgaagcttggcttgcagacaagactcggactccagcaccaacagtgacctgtcagatttgagtgactctgaggagcagctgcaggctaagacaggcctgaagggaattccagagcacctgatggggaagctgggccccaatggggagcgcagtgctgagctgttgctgggcaaaagcaaagggaagcaggcccccaagggccggcctcggactgcccccctgaaagttggccagtcagtgctgaaagatgtaagcaaagtgaagaagctgaagcaatctggagagcccttcctgcaggatgggtcatgcatcaatgtggcacctcatctgcacaagtgtcgtgaatgccgcctggagcggtaccggaagtttaaggaacaggagcaagatgattctactgtagcctgccgtttctttcacttccggaggttgatcttcactcgaaaaggggtactccgtgtggaggggtttttaagcccccagcaaagtgaccctgatgccatgaacctgtggattccctcttcctccctagcagaagggatagatctagagacctcaaaatacatcctggccaatgttggggaccagttctgccagctcgtaatgtctgagaaggaggccatgatgatggtggagccacaccagaaagtggcatggaagcgagctgtgcgtggtgtacgggagatgtgtgatgtgtgtgaaacaactctcttcaacatccactgggtttgtcgcaaatgtggatttggggtctgccttgactgttaccggctcaggaaaagccggccacgcagtgagacagaagagatgggtgatgaagaagttttctcctggttgaagtgtgcaaagggacagtcccacgaaccagagaatctcatgcccacacaaattattcctggcacagctctttacaatattggagacatggtacatgctgcccggggcaagtggggaattaaagcaaactgcccttgtatcagtcgacagaacaaatctgtattgagacctgccgtcaccaatgggatgtcacagcttcctagcataaaccctagtgcctcttctggaaacgaaactaccttctctggtggaggaggaccggcaccagtaacaactccagagccggaccatgttcccaaagccgacagcactgacatcagatctgaagagcctctgaaaacagacagttcggcatcaaatagcaatagtgaactgaaagccatcaggcctccttgccctgacacggccccaccctcctccgccctgcactggttggcagatttagcaactcagaaggctaaagaagaaacaaaagaagcagggtccctgaggtcggtgctcaataaagagtctcattcaccctttgggctggactcgttcaactccactgcaaaggtctctccgctgactccaaagctttttaacagtctgttgctgggtcccactgcctccaacaacaaaaccgaagggtctagccttcgagacctccttcactccgggccgggaaaacttcctcaaacccccttggacacaggcataccctttcccccggtcttctctacatcctcagcaggagtgaagagcaaggccagcctacccaactttcttgaccacatcattgcctcagtggtagaaaataagaaaacctcagatgcttcaaagcgggcctgcaacttgactgatacccagaaggaagtgaaggagatggtgatggggttaaatgtgctagatccccatacttctcactcctggctttgtgatgggaggcttctgtgtctccatgaccccagcaacaaaaacaattggaagatcttccgggagtgttggaagcaaggtcagccagtgctggtttcgggggtacataaaaagctcaagtctgagctctggaagccagaagcctttagccaggaatttggagaccaggatgtagacttggtgaactgcaggaactgtgctataatttccgatgtgaaagttcgggatttctgggatggtttcgagatcatatgcaaacgactacggtcagaagatgggcagccaatggtgctcaaactcaaggactggcctcctggggaagattttcgagacatgatgccaaccaggtttgaagatctgatggagaaccttcctctgccagaatataccaaacgagatggcaggctcaatctggcctctaggctacctagctactttgtaaggcctgatctgggccccaagatgtacaacgcctatgggttgataacagcagaagatagaagagttggtacaacaaatcttcacttagatgtgtctgatgctgttaatgtgatggtgtatgttgggattcccatcggggagggtgctcatgatgaagaggtactcaagacaattgacgagggagatgccgatgaggtgacgaagcagaggattcatgatggaaaagagaagccaggtgctttatggcacatctatgcagccaaggatgcagagaagatccgggagctgctccgaaaggttggagaagaacaaggccaagagaacccccctgatcatgacccaattcatgaccaaagttggtacctggaccagaccctccgtaagcgactctatgaggagtatggcgtgcaaggctgggctattgtgcagttcctaggtgatgctgttttcatacctgctggagccccacaccaggttcacaatctatacagttgcataaaagtagcagaagactttgtatctccagaacatgtaaagcactgtttccgcctgactcaggaattcaggcatctctctaacactcatacaaatcatgaggataaactgcaggtgaagaacatcatttaccatgcagtgaaagatgcggttggcaccctcaaggctcatgaatccaaactggcaaggtcctaggcatggagaaactccaagctcctctgtgaagcaggtctttcactcacaacacttaacagggaacggcagggctctttgctggagcagaggcccttcacccagagccagtgtggtcagtattccaaactctccagccactctcttctacgctgcctcaacactgaaggttgacacaggaaagtcgtactgttcacacacacagtttgagactccaagccaagagtgccacatccctatcctgtggccttttggaaatccaaattgcctgaacatggcggggctttcctgcacattctcctgatttgagattcacgggcacacctttcttttcttttcctcttgtgcctagttaagtggaaatgtgtttggagataggggaaatcacataactggtacaagtatggggtaattgcttaaacatgcctggtggaagtctgatagcgtctctgcacgtgacctctgacaaagcccatcccaggagacggggtgaagctattccccacactctcctgtgaacactggagtcttgcaagacccagggagaacccactgcttttcccaggaggctccaggattaggaaatgtgtgtatttagtgaaaaataggtttgtagtgaaatagttactatttcatgaaagtagatatttttagaatttttgaaataccacagttgttttcctggattataaggaaaggcacattacatttagtcttcctttcgatataaaactctttgaagaaatatgatttttagaaatcagctacccattatagcacaaaatcagccaaagcagaatttttaaaaattggcttttttaggattctttttctccccctcccatcttagtcttaccttgagggaacagtcatatgagaaggaactttgtcacatctaagctgtggtgtgttccccatgtgtgtgtacaacactggtgactccaggaaccattttcacctattaccagtgttccctggggactcctcttaatgtttccaaatgggaaggacagttgatttccaacatgaggttttttgttttttatccagaaatattttcagcaaaactttccaactgagtggagtctgattaaggatttatttgaaaatggtgggattcattggcccataggtacattggaaaatgtatatctctccagctgtactgtagtgccctgcaggctgtttatatgttcacagttacttttttttttttttttaaataaaagtcatttaatgtagaatacttttaatttcactttctgtattttaattttgttgaagggctgattgggatttccatgttcttattaaaaatctaacaaatctg

SEQ ID NO: 150169 - DNA, 3034 bp, Homo sapiens
  Payload ID: 9649
  Gene Symbol: KDM3B
  Gene Name: lysine (K)-specific demethylase 3B
  ENST ID: ENST00000507996
  CDS Start-End: 1-63
gtgccagaaaaacagaaaggcagccggtcgcaggcctcgggagagttggccagtcagtgctgaaagatgtaagcaaagtgaagaagctgaagcaatctggagagcccttcctgcaggatgggtcatgcatcaatgtggcacctcatctgcacaagtgtcgtgaatgccgcctggagcggtaccggaagtttaaggaacaggagcaagatgattctactgtagcctgccgtttctttcacttccggaggttgatcttcactcgaaaaggggtactccgtgtggaggggtttttaagcccccagcaaagtgaccctgatgccatgaacctgtggattccctcttcctccctagcagaagggatagatctagagacctcaaaatacatcctggccaatgttggggaccagttctgccagctcgtaatgtctgagaaggaggccatgatgatggtggagccacaccagaaagtggcatggaagcgagctgtgcgtggtgtacgggagatgtgtgatgtgtgtgaaacaactctcttcaacatccactgggtttgtcgcaaatgtggatttggggtctgccttgactgttaccggctcaggaaaagccggccacgcagtgagacagaagagatgggtgatgaagaagttttctcctggttgaagtgtgcaaagggacagtcccacgaaccagagaatctcatgcccacacaaattattcctggcacagctctttacaatattggagacatggtacatgctgcccggggcaagtggggaattaaagcaaactgcccttgtatcagtcgacagaacaaatctgtattgagacctgccgtcaccaatgggatgtcacagcttcctagcataaaccctagtgcctcttctggaaacgaaactaccttctctggtggaggaggaccggcaccagtaacaactccagagccggaccatgttcccaaagccgacagcactgacatcagatctgaagagcctctgaaaacagacagttcggcatcaaatagcaatagtgaactgaaagccatcaggcctccttgccctgacacggccccaccctcctccgccctgcactggttggcagatttagcaactcagaaggctaaagaagaaacaaaagaagcagggtccctgaggtcggtgctcaataaagagtctcattcaccctttgggctggactcgttcaactccactgcaaaggtctctccgctgactccaaagctttttaacagtctgttgctgggtcccactgcctccaacaacaaaaccgaagggtctagccttcgagacctccttcactccgggccgggaaaacttcctcaaacccccttggacacaggcataccctttcccccggtcttctctacatcctcagcaggagtgaagagcaaggccagcctacccaactttcttgaccacatcattgcctcagtggtagaaaataagaaaacctcagatgcttcaaagcgggcctgcaacttgactgatacccagaaggaagtgaaggagatggtgatggggttaaatgtgctagatccccatacttctcactcctggctttgtgatgggaggcttctgtgtctccatgaccccagcaacaaaaacaattggaagatcttccgggagtgttggaagcaaggtcagccagtgctggtttcgggggtacataaaaagctcaagtctgagctctggaagccagaagcctttagccaggaatttggagaccaggatgtagacttggtgaactgcaggaactgtgctataatttccgatgtgaaagttcgggatttctgggatggtttcgagatcatatgcaaacgactacggtcagaagatgggcagccaatggtgctcaaactcaaggactggcctcctggggaagattttcgagacatgatgccaaccaggtttgaagatctgatggagaaccttcctctgccagaatataccaaacgagatggcaggctcaatctggcctctaggctacctagctactttgtaaggcctgatctgggccccaagatgtacaacgcctatgggttgataacagcagaagatagaagagttggtacaacaaatcttcacttagatgtgtctgatgctgttaatgtgatggtgtatgttgggattcccatcggggagggtgctcatgatgaagaggtactcaagacaattgacgagggagatgccgatgaggtgacgaagcagaggattcatgatggaaaagagaagccaggtgctttatggcacatctatgcagccaaggatgcagagaagatccgggagctgctccgaaaggttggagaagaacaaggccaagagaacccccctgatcatgacccaattcatgaccaaagttggtacctggaccagaccctccgtaagcgactctatgaggagtatggcgtgcaaggctgggctattgtgcagttcctaggtgatgctgttttcatacctgctggagccccacaccaggttcacaatctatacagttgcataaaagtagcagaagactttgtatctccagaacatgtaaagcactgtttccgcctgactcaggaattcaggcatctctctaacactcatacaaatcatgaggataaactgcaggtgaagaacatcatttaccatgcagtgaaagatgcggttggcaccctcaaggctcatgaatccaaactggcaaggtcctaggcatggagaaactccaagctcctctgtgaagcaggtctttcactcacaacacttaacagggaacggcagggctctttgctggagcagaggcccttcacccagagccagtgtggtcagtattccaaactctccagccactctcttctacgctgcctcaacactgaaggttgacacaggaaagtcgtactgttcacacacacagtttgagactccaagccaagagtgccacatccctatcctgtggccttttggaaatccaaattgcctgaacatggcggggctttcctgcacattctcctgatttgagattcacgggcacacctttcttttct

SEQ ID NO: 150170 - DNA, 6324 bp, Homo sapiens
  Payload ID: 9649
  Gene Symbol: KDM3B
  Gene Name: lysine (K)-specific demethylase 3B
  ENST ID: ENST00000510866
  CDS Start-End: 1-825
atctttgtagaatttgatggctgtaactggaagcaacactcctgggtaaaagttcatgctgaggaagttatcgtgcttctgctggaagggtctcttgtatgggcgccccgtgaggacccagtccttctccagggcattcgagtctccattgcacaatggccagccctgacttttactccccttgtagataaactgggtttgggttctgtggttccagtggaatatcttctggatcgagagcttcggttcctgtcagatgccaatgggttgcatctgtttcagatgggaacagatagccaaaaccagattcttttggaacatgctgcactgagagaaacagttaatgctttgatcagtgaccaaaagctacaagagatattcagccgaggtccctacagtgttcaaggtcacagggtcaaaatatatcagccagagggggaagaagggtggctctatggtgttgtgagccatcaggactccatcactcgtcttatggaggtgtctgtaactgagagtggtgagatcaagtcggtagatcccagactaatccatgtgatgctgatggataattcagcgcctcaaagcgaggggggtacgttaaaagcagtaaaatcttccaaaggaaagaagaagagagaaagcatagaggggaaagatggccggaggaggaaaagtgcttcggactctgggtgtgaccctgcatcaaagaaattaaaaggagacaggggtgaagtagacagtaatgggagcgatggagataaaccgcaacattcgctttgccacttacaccaaagaaaacggcaggactctggtggtgcaggatgagcctgtaggtggggacacacctgcatctttcactccatattctacagccacaggtcagacacctttggccccagaggtgggtggagccgaaaacaaagaggcaggaaaaacactggaacaagttggccagggcatagtggcttccgcagctgtggtcactaccgccagctccaccccaaacacagtgaggatctcagacactggccttgcagcagggactgtgccagaaaaacagaaaggcagccggtcgcaggcctcgggagagaattcaagaaattctattctggcctcttctggatttggagcacctctccctagttcatcgcaacctttgacttttggaagtggaaggagccagtccaatggtgttctagccacagagaacaaacctttgggcttctcttttggctgtagctctgcacaagaggcacagaaagacactgatctctccaaaaacttgttttttcaatgcatgtcccaaactttacctaccagtaactacttcactactgtttcagagagtttggctgatgattcttctagtcgggactcattcaaacaaagccttgagagcctgagctcaggcctgtgtaaaggcagatccgttcttggaacagacactaagccaggctctaaggctggcagctctgtggaccggaaagtgcctgcagagtccatgcccaccctcactccagccttcccacggagcctcctaaatgcccgtaccccagagaatcatgaaaatctatttttacagccccccaaattgtcccgagaagagccttctaatcctttcctggcatttgtggagaaagttgaacacagccctttcagtagttttgcatctcaggcatcaggtagctcctcttctgctaccactgtcacctccaaggtggcacccagctggcccgagtctcactcctctgcagattcggcatctttagcaaagaagaaacccctcttcattacaactgactcctccaagctagtatctggtgttctgggctcagctcttaccagtgggggcccaagcctctctgccatggggaatggccgctccagctcgcccaccagcagcctcactcagcccattgagatgccaactctctcctctagccccacagaggagaggccaactgtggggcctgggcagcaggacaatcccctcctcaaaacctttagtaacgtctttggcaggcactcaggcggctttctgtcctccccggcagatttttcacaggagaacaaagctccttttgaagctgtgaaaaggttctcactggatgaacgaagcttggcttgcagacaagactcggactccagcaccaacagtgacctgtcagatttgagtgactctgaggagcagctgcaggctaagacaggcctgaagggaattccagagcacctgatggggaagctgggccccaatggggagcgcagtgctgagctgttgctgggcaaaagcaaagggaagcaggcccccaagggccggcctcggactgcccccctgaaagttggccagtcagtgctgaaagatgtaagcaaagtgaagaagctgaagcaatctggagagcccttcctgcaggatgggtcatgcatcaatgtggcacctcatctgcacaagtgtcgtgaatgccgcctggagcggtaccggaagtttaaggaacaggagcaagatgattctactgtagcctgccgtttctttcacttccggaggttgatcttcactcgaaaaggggtactccgtgtggaggggtttttaagcccccagcaaagtgaccctgatgccatgaacctgtggattccctcttcctccctagcagaagggatagatctagagacctcaaaatacatcctggccaatgttggggaccagttctgccagctcgtaatgtctgagaaggaggccatgatgatggtggagccacaccagaaagtggcatggaagcgagctgtgcgtggtgtacgggagatgtgtgatgtgtgtgaaacaactctcttcaacatccactgggtttgtcgcaaatgtggatttggggtctgccttgactgttaccggctcaggaaaagccggccacgcagtgagacagaagagatgggtgatgaagaagttttctcctggttgaagtgtgcaaagggacagtcccacgaaccagagaatctcatgcccacacaaattattcctggcacagctctttacaatattggagacatggtacatgctgcccggggcaagtggggaattaaagcaaactgcccttgtatcagtcgacagaacaaatctgtattgagacctgccgtcaccaatgggatgtcacagcttcctagcataaaccctagtgcctcttctggaaacgaaactaccttctctggtggaggaggaccggcaccagtaacaactccagagccggaccatgttcccaaagccgacagcactgacatcagatctgaagagcctctgaaaacagacagttcggcatcaaatagcaatagtgaactgaaagccatcaggcctccttgccctgacacggccccaccctcctccgccctgcactggttggcagatttagcaactcagaaggctaaagaagaaacaaaagaagcagggtccctgaggtcggtgctcaataaagagtctcattcaccctttgggctggactcgttcaactccactgcaaaggtctctccgctgactccaaagctttttaacagtctgttgctgggtcccactgcctccaacaacaaaaccgaagggtctagccttcgagacctccttcactccgggccgggaaaacttcctcaaacccccttggacacaggcataccctttcccccggtcttctctacatcctcagcaggagtgaagagcaaggccagcctacccaactttcttgaccacatcattgcctcagtggtagaaaataagaaaacctcagatgcttcaaagcgggcctgcaacttgactgatacccagaaggaagtgaaggagatggtgatggggttaaatgtgctagatccccatacttctcactcctggctttgtgatgggaggcttctgtgtctccatgaccccagcaacaaaaacaattggaagatcttccgggagtgttggaagcaaggtcagccagtgctggtttcgggggtacataaaaagctcaagtctgagctctggaagccagaagcctttagccaggaatttggagaccaggatgtagacttggtgaactgcaggaactgtgctataatttccgatgtgaaagttcgggatttctgggatggtttcgagatcatatgcaaacgactacggtcagaagatgggcagccaatggtgctcaaactcaaggactggcctcctggggaagattttcgagacatgatgccaaccaggtttgaagatctgatggagaaccttcctctgccagaatataccaaacgagatggcaggctcaatctggcctctaggctacctagctactttgtaaggcctgatctgggccccaagatgtacaacgcctatgggttgataacagcagaagatagaagagttggtacaacaaatcttcacttagatgtgtctgatgctgttaatgtgatggtgtatgttgggattcccatcggggagggtgctcatgatgaagaggtactcaagacaattgacgagggagatgccgatgaggtgacgaagcagaggattcatgatggaaaagagaagccaggtgctttatggcacatctatgcagccaaggatgcagagaagatccgggagctgctccgaaaggttggagaagaacaaggccaagagaacccccctgatcatgacccaattcatgaccaaagttggtacctggaccagaccctccgtaagcgactctatgaggagtatggcgtgcaaggctgggctattgtgcagttcctaggtgatgctgttttcatacctgctggagccccacaccaggttcacaatctatacagttgcataaaagtagcagaagactttgtatctccagaacatgtaaagcactgtttccgcctgactcaggaattcaggcatctctctaacactcatacaaatcatgaggataaactgcaggtgaagaacatcatttaccatgcagtgaaagatgcggttggcaccctcaaggctcatgaatccaaactggcaaggtcctaggcatggagaaactccaagctcctctgtgaagcaggtctttcactcacaacacttaacagggaacggcagggctctttgctggagcagaggcccttcacccagagccagtgtggtcagtattccaaactctccagccactctcttctacgctgcctcaacactgaaggttgacacaggaaagtcgtactgttcacacacacagtttgagactccaagccaagagtgccacatccctatcctgtggccttttggaaatccaaattgcctgaacatggcggggctttcctgcacattctcctgatttgagattcacgggcacacctttcttttcttttcctcttgtgcctagttaagtggaaatgtgtttggagataggggaaatcacataactggtacaagtatggggtaattgcttaaacatgcctggtggaagtctgatagcgtctctgcacgtgacctctgacaaagcccatcccaggagacggggtgaagctattccccacactctcctgtgaacactggagtcttgcaagacccagggagaacccactgcttttcccaggaggctccaggattaggaaatgtgtgtatttagtgaaaaataggtttgtagtgaaatagttactatttcatgaaagtagatatttttagaatttttgaaataccacagttgttttcctggattataaggaaaggcacattacatttagtcttcctttcgatataaaactctttgaagaaatatgatttttagaaatcagctacccattatagcacaaaatcagccaaagcagaatttttaaaaattggcttttttaggattctttttctccccctcccatcttagtcttaccttgagggaacagtcatatgagaaggaactttgtcacatctaagctgtggtgtgttccccatgtgtgtgtacaacactggtgactccaggaaccattttcacctattaccagtgttccctggggactcctcttaatgtttccaaatgggaaggacagttgatttccaacatgaggttttttgttttttatccagaaatattttcagcaaaactttccaactgagtggagtctgattaaggatttatttgaaaatggtgggattcattggcccataggtacattggaaaatgtatatctctccagctgtactgtagtgccctgcaggctgtttatatgttcacagttacttttttttttttttttaaataaaagtcatttaatgtagaatacttttaatttcactttctgtattttaattttgttgaagggctgattgggatttccatgttcttattaaaaatctaacaaatctgt

SEQ ID NO: 150171 - DNA, 3634 bp, Homo sapiens
  Payload ID: 9649
  Gene Symbol: KDM3B
  Gene Name: lysine (K)-specific demethylase 3B
  Uniprot ID: Q7LBC6
  ENST ID: ENST00000542866
  CDS Start-End: 118-2397
agatattcagccgaggtccctacagtgttcaaggtcacagggtcaaaatatatcagccagagggggaagaagggtggctctatggtgttgtgagccatcaggactccatcactcgtaatgtctgagaaggaggccatgatgatggtggagccacaccagaaagtggcatggaagcgagctgtgcgtggtgtacgggagatgtgtgatgtgtgtgaaacaactctcttcaacatccactgggtttgtcgcaaatgtggatttggggtctgccttgactgttaccggctcaggaaaagccggccacgcagtgagacagaagagatgggtgatgaagaagttttctcctggttgaagtgtgcaaagggacagtcccacgaaccagagaatctcatgcccacacaaattattcctggcacagctctttacaatattggagacatggtacatgctgcccggggcaagtggggaattaaagcaaactgcccttgtatcagtcgacagaacaaatctgtattgagacctgccgtcaccaatgggatgtcacagcttcctagcataaaccctagtgcctcttctggaaacgaaactaccttctctggtggaggaggaccggcaccagtaacaactccagagccggaccatgttcccaaagccgacagcactgacatcagatctgaagagcctctgaaaacagacagttcggcatcaaatagcaatagtgaactgaaagccatcaggcctccttgccctgacacggccccaccctcctccgccctgcactggttggcagatttagcaactcagaaggctaaagaagaaacaaaagaagcagggtccctgaggtcggtgctcaataaagagtctcattcaccctttgggctggactcgttcaactccactgcaaaggtctctccgctgactccaaagctttttaacagtctgttgctgggtcccactgcctccaacaacaaaaccgaagggtctagccttcgagacctccttcactccgggccgggaaaacttcctcaaacccccttggacacaggcataccctttcccccggtcttctctacatcctcagcaggagtgaagagcaaggccagcctacccaactttcttgaccacatcattgcctcagtggtagaaaataagaaaacctcagatgcttcaaagcgggcctgcaacttgactgatacccagaaggaagtgaaggagatggtgatggggttaaatgtgctagatccccatacttctcactcctggctttgtgatgggaggcttctgtgtctccatgaccccagcaacaaaaacaattggaagatcttccgggagtgttggaagcaaggtcagccagtgctggtttcgggggtacataaaaagctcaagtctgagctctggaagccagaagcctttagccaggaatttggagaccaggatgtagacttggtgaactgcaggaactgtgctataatttccgatgtgaaagttcgggatttctgggatggtttcgagatcatatgcaaacgactacggtcagaagatgggcagccaatggtgctcaaactcaaggactggcctcctggggaagattttcgagacatgatgccaaccaggtttgaagatctgatggagaaccttcctctgccagaatataccaaacgagatggcaggctcaatctggcctctaggctacctagctactttgtaaggcctgatctgggccccaagatgtacaacgcctatgggttgataacagcagaagatagaagagttggtacaacaaatcttcacttagatgtgtctgatgctgttaatgtgatggtgtatgttgggattcccatcggggagggtgctcatgatgaagaggtactcaagacaattgacgagggagatgccgatgaggtgacgaagcagaggattcatgatggaaaagagaagccaggtgctttatggcacatctatgcagccaaggatgcagagaagatccgggagctgctccgaaaggttggagaagaacaaggccaagagaacccccctgatcatgacccaattcatgaccaaagttggtacctggaccagaccctccgtaagcgactctatgaggagtatggcgtgcaaggctgggctattgtgcagttcctaggtgatgctgttttcatacctgctggagccccacaccaggttcacaatctatacagttgcataaaagtagcagaagactttgtatctccagaacatgtaaagcactgtttccgcctgactcaggaattcaggcatctctctaacactcatacaaatcatgaggataaactgcaggtgaagaacatcatttaccatgcagtgaaagatgcggttggcaccctcaaggctcatgaatccaaactggcaaggtcctaggcatggagaaactccaagctcctctgtgaagcaggtctttcactcacaacacttaacagggaacggcagggctctttgctggagcagaggcccttcacccagagccagtgtggtcagtattccaaactctccagccactctcttctacgctgcctcaacactgaaggttgacacaggaaagtcgtactgttcacacacacagtttgagactccaagccaagagtgccacatccctatcctgtggccttttggaaatccaaattgcctgaacatggcggggctttcctgcacattctcctgatttgagattcacgggcacacctttcttttcttttcctcttgtgcctagttaagtggaaatgtgtttggagataggggaaatcacataactggtacaagtatggggtaattgcttaaacatgcctggtggaagtctgatagcgtctctgcacgtgacctctgacaaagcccatcccaggagacggggtgaagctattccccacactctcctgtgaacactggagtcttgcaagacccagggagaacccactgcttttcccaggaggctccaggattaggaaatgtgtgtatttagtgaaaaataggtttgtagtgaaatagttactatttcatgaaagtagatatttttagaatttttgaaataccacagttgttttcctggattataaggaaaggcacattacatttagtcttcctttcgatataaaactctttgaagaaatatgatttttagaaatcagctacccattatagcacaaaatcagccaaagcagaatttttaaaaattggcttttttaggattctttttctccccctcccatcttagtcttaccttgagggaacagtcatatgagaaggaactttgtcacatctaagctgtggtgtgttccccatgtgtgtgtacaacactggtgactccaggaaccattttcacctattaccagtgttccctggggactcctcttaatgtttccaaatgggaaggacagttgatttccaacatgaggttttttgttttttatccagaaatattttcagcaaaactttccaactgagtggagtctgattaaggatttatttgaaaatggtgggattcattggcccataggtacattggaaaatgtatatctctccagctgtactgtagtgccctgcaggctgtttatatgttcacagttacttttttttttttttttaaataaaagtcatttaatgt

SEQ ID NO: 150172 - DNA, 4474 bp, Homo sapiens
  Payload ID: 9650
  Gene Symbol: KDM4A
  Gene Name: lysine (K)-specific demethylase 4A
  Uniprot ID: O75164
  ENST ID: ENST00000372396
  CDS Start-End: 135-3329
ggagtttcggccttcgcctgctggaaaagcagtaggatcggccagtggcgacagcaggagctgagcctaagccctggcggggctttgggctgtagattcctgtctgactaaagggacctcaaaaaggagggaaaatggcttctgagtctgaaactctgaatcccagtgctaggataatgaccttttatccaactatggaagagttccgaaacttcagtagatacattgcctacattgaatcccaaggagctcatcgggcagggctagccaaggttgttcctccaaaagagtggaagccacgagcatcctatgatgacattgatgatttggtcattcctgcccccattcaacagctggtgacggggcagtctggcctctttactcagtacaacatacagaagaaagccatgactgttcgagagttccgcaagatagccaatagcgataagtactgtaccccacgctatagtgagtttgaagagctcgagcggaaatactggaaaaatcttacattcaatcctccaatctatggtgcagatgtgaatggtaccctctatgaaaagcatgttgatgagtggaatattggccggctgagaacaatcctggacttggtggaaaaggagagtgggatcaccattgagggtgtgaacaccccatacctgtactttggcatgtggaagacatcctttgcttggcacactgaagacatggacctctacagcatcaactacctgcactttggagaaccaaagtcctggtactctgttccacctgagcatggaaagcggttggaacgcctcgccaaaggctttttcccaggaagtgctcaaagctgtgaggcatttctccgccacaagatgaccctgatttccccgttaatgctgaagaaatatggaattccctttgacaaggtgactcaagaggctggagagtttatgatcactttcccttatggttaccatgccggctttaaccatggttttaactgtgcggagtctaccaattttgctacccgtcggtggattgagtacggcaagcaagctgtgctgtgctcctgtagaaaggacatggtgaagatctccatggatgtgtttgtgagaaagttccagccagaaaggtacaaactttggaaagctgggaaggacaacacagttattgaccatactctgcccacgccagaagcagctgagtttcttaaggagagtgaactgcctccaagagctggcaacgaggaggagtgcccagaggaggacatggaaggggtggaggatggagaggaaggagacctgaagacaagcctggccaagcaccgaatagggacaaagaggcaccgagtttgtcttgaaataccacaggaggtgagtcagagtgagctcttccccaaggaggatctgagttctgagcagtatgagatgacggagtgcccggcagccctcgcccctgtgaggcccacccatagctctgtgcggcaagttgaggatggtcttaccttcccagattattctgactccactgaagtcaaatttgaagagcttaaaaatgtcaaactagaagaggaggatgaggaggaagaacaagcagcagctgccttggatctttctgtgaatcctgcgtctgtagggggacgccttgtcttctcaggctccaaaaagaaatcatcttctagcctgggctctggctcttcacgggattctatctcttctgattcagaaactagtgagcctctctcctgccgagcccaagggcaaacgggagttctcactgtgcacagttatgccaaaggggatggcagggtcactgtgggagagccatgcacgaggaagaaaggaagcgccgctagaagtttcagtgagcgggagctggcagaggttgcagatgaatacatgttttccctagaagagaataagaagtccaagggacgccgtcagcctttaagcaagctcccccgccatcacccacttgtgctgcaggagtgtgtcagtgatgatgagacatctgaacagctgacccctgaggaagaggctgaggagacagaggcctgggccaagcctctgagccaactgtggcagaaccgacctccaaactttgaggctgagaaggaattcaatgagaccatggcccaacaggcccctcactgcgctgtctgtatgatcttccagacttatcatcaggttgaatttggaggctttaatcagaactgtggaaatgcttcagatttagccccccagaagcagaggaccaagccattgattccagaaatgtgcttcacttcgactggctgcagcacggacatcaacctttctactccttatcttgaggaggatggcaccagcatactcgtttcctgcaagaagtgcagcgtccgggtccatgccagttgctatggggtcccccctgcaaaggcttctgaagactggatgtgttctcggtgttcagccaatgccctagaggaggactgctgtttatgctcattacgaggaggggccctgcagagagcaaatgatgacaggtgggtccacgtttcatgtgctgtggcaattctggaagcaaggtttgtcaacattgcagaaagaagtccggtggatgtgagcaaaatccccctgccccgcttcaaactgaaatgtatcttctgtaagaagcggaggaaaagaactgctggctgctgtgtgcagtgttctcacggccgctgcccaactgccttccatgtgagctgcgcccaggctgccggtgtgatgatgcagcctgacgactggccttttgtggtcttcattacctgctttcggcacaagattcctaatttggagcgtgccaagggggccttgcaaagcatcactgcaggccagaaagtcattagcaagcataagaacgggcgcttctaccagtgtgaagtggtcaggctcaccaccgagaccttctatgaagtcaactttgatgatggctccttcagcgacaatctttatcctgaggacatagtgagccaggactgtctccagtttggtcctcctgctgaaggggaagtggtccaagtgagatggacagacggccaagtctatggagccaagtttgtggcctcccaccctatccaaatgtaccaggtggagtttgaggatggctcacaacttgtggttaagagagatgatgtatacacactggatgaagagcttcccaagagagtcaaatctagactgtcagtagcctcagacatgcgcttcaatgagattttcacagagaaagaggttaagcaagaaaagaaacggcaacgagttatcaactcaagataccgggaagattatattgagcctgcactataccgggccatcatggagtaggtgcttccagggtccaagggattctcagccatccaggcaagagcactctgggttccacagcacagcagacatggaacgctgaagtctctgaaagtgaagttgtaaaaagaaaaggaatgaaataaccgacccatcatcttctcacccaccctcattgcattccgctgtagtgaaaggacgagccatttctgggcacgtggcagcagtcgctgatctcccagctgaggggctgagcactggaatgctgtggctgcactggccccagtccatagaggggtcaactatgctggctggactggctgccttgttcctggcctaggacttagcttcataactatcacctgcaccgactaggctgaggtgctggtacttgccccaacccctacttttgtatttatatgtgtgtgtgtgtgtgcgtgcgtgcgtgcgtgcgtgtatgtttggtctggaccagcttctgccagcccctggcctttactttcttccttgcctatgcagggcaaacaaaatgtgaaattctgccctcagctgagctgagtaagggctcctgggggttggctggagatgggtgtggcatctgtccaggcctggaaccgtctcaagacagtgctggcaaagctgcagtattgagatgctaaggagctgatgccacctctttgtcttcccctaaaggagaacatggggataacatgggtgtgtgcccacaacactctaggtgcagagcccctgtggcaaagtattacagggtgtgggtggggattaccctgaatcggggattttaatgatggaagcaggcagagcctggtgggtgattctgtcaacagaaaattgcaatcatgcaggggctgggagggttaggatgaaaaaactggggccattggaggcccactgtaggtgggagggagctgattttggggtggggggtgggactagagggcaatactgaaggggttaaacaggtttttgctcctcaagaatttgtttgcctgggcccaggattggagggcttcacaccaataccctgtgtatacaagaatcagatttataatacttccccttttttgttacgtatgaacactataaaccaaattattttgaaaactggtgcatcaccttgtccttagcaataaaatgtgttgagcaga

SEQ ID NO: 150173 - DNA, 5593 bp, Homo sapiens
  Payload ID: 9651
  Gene Symbol: KDM4B
  Gene Name: lysine (K)-specific demethylase 4B
  ENST ID: ENST00000159111
  CDS Start-End: 219-3509
gtcgccagcaaccgagcggggcccggcccgagcggggcctgggggtgcgacgccgagggcgggggagagcgcgccgctgctcccggaccgggccgcgcacgccgcctcaggaaccatcactgttgctggaggcacctgacaaatcctagcgaatttttggagcatctccacccaggaacctcgccatccagaagtgtgcttcccgcacagctgcagccatggggtctgaggaccacggcgcccagaaccccagctgtaaaatcatgacgtttcgcccaaccatggaagaatttaaagacttcaacaaatacgtggcctacatagagtcgcagggagcccaccgggcgggcctggccaagatcatccccccgaaggagtggaagccgcggcagacgtatgatgacatcgacgacgtggtgatcccggcgcccatccagcaggtggtgacgggccagtcgggcctcttcacgcagtacaatatccagaagaaggccatgacagtgggcgagtaccgccgcctggccaacagcgagaagtactgtaccccgcggcaccaggactttgatgaccttgaacgcaaatactggaagaacctcacctttgtctccccgatctacggggctgacatcagcggctctttgtatgatgacgacgtggcccagtggaacatcgggagcctccggaccatcctggacatggtggagcgcgagtgcggcaccatcatcgagggcgtgaacacgccctacctgtacttcggcatgtggaagaccaccttcgcctggcacaccgaggacatggacctgtacagcatcaactacctgcactttggggagcctaagtcctggtacgccatcccaccagagcacggcaagcgcctggagcggctggccatcggcttcttccccgggagctcgcagggctgcgacgccttcctgcggcataagatgaccctcatctcgcccatcatcctgaagaagtacgggatccccttcagccggatcacgcaggaggccggggaattcatgatcacatttccctacggctaccacgccggcttcaatcacgggttcaactgcgcagaatctaccaacttcgccaccctgcggtggattgactacggcaaagtggccactcagtgcacgtgccggaaggacatggtcaagatctccatggacgtgttcgtgcgcatcctgcagcccgagcgctacgagctgtggaagcagggcaaggacctcacggtgctggaccacacgcggcccacggcgctcaccagccccgagctgagctcctggagtgcatcccgggcctcgctgaaggccaagctcctccgcaggtctcaccggaaacggagccagcccaagaagccgaagcccgaagaccccaagttccctggggagggtacggctggggcagcgctcctagaggaggctgggggcagcgtgaaggaggaggctgggccggaggttgaccccgaggaggaggaggaggagccgcagccactgccacacggccgggaggccgagggcgcagaagaggacgggaggggcaagctgcggccaaccaaggccaagagcgagcggaagaagaagagcttcggcctgctgcccccacagctgccgcccccgcctgctcacttcccctcagaggaggcgctgtggctgccatccccactggagcccccggtgctgggcccaggccctgcagccatggaggagagccccctgccggcaccccttaatgtcgtgccccctgaggtgcccagtgaggagctagaggccaagcctcggcccatcatccccatgctgtacgtggtgccgcggccgggcaaggcagccttcaaccaggagcacgtgtcctgccagcaggcctttgagcactttgcccagaagggtccgacctggaaggaaccagtttcccccatggagctgacggggccagaggacggtgcagccagcagtggggcaggtcgcatggagaccaaagcccgggccggagaggggcaggcaccgtccacattttccaaattgaagatggagatcaagaagagccggcgccatcccctgggccggccgcccacccggtccccactgtcggtggtgaagcaggaggcctcaagtgacgaggaggcatcccctttctccggggaggaagatgtgagtgacccggacgccttgaggccgctgctgtctctgcagtggaagaacagggcggccagcttccaggccgagaggaagttcaacgcagcggctgcgcgcacggagccctactgcgccatctgcacgctcttctacccctactgccaggccctacagactgagaaggaggcacccatagcctccctcggagagggctgcccggccacattaccctccaaaagccgtcagaagacccgaccgctcatccctgagatgtgcttcacctctggcggtgagaacacggagccgctgcctgccaactcctacatcggcgacgacgggaccagccccctgatcgcctgcggcaagtgctgcctgcaggtccatgccagttgctatggcatccgtcccgagctggtcaatgaaggctggacgtgttcccggtgcgcggcccacgcctggactgcggagtgctgcctgtgcaacctgcgaggaggtgcgctgcagatgaccaccgataggaggtggatccacgtgatctgtgccatcgcagtccccgaggcgcgcttcctgaacgtgattgagcgccaccctgtggacatcagcgccatccccgagcagcggtggaagctgaaatgcgtgtactgccggaagcggatgaagaaggtgtcaggtgcctgtatccagtgctcctacgagcactgctccacgtccttccacgtgacctgcgcccacgccgcaggcgtgctcatggagccggacgactggccctatgtggtctccatcacctgcctcaagcacaagtcggggggtcacgctgtccaactcctgagggccgtgtccctaggccaggtggtcatcaccaagaaccgcaacgggctgtactaccgctgtcgcgtcatcggtgccgcctcgcagacctgctacgaagtgaacttcgacgatggctcctacagcgacaacctgtaccctgagagcatcacgagtagggactgtgtccagctgggacccccttccgagggggagctggtggagctccggtggactgacggcaacctctacaaggccaagttcatctcctccgtcaccagccacatctaccaggtggagtttgaggacgggtcccagctgacggtgaagcgtggggacatcttcaccctggaggaggagctgcccaagagggtccgctctcggctgtcactgagcacgggggcaccgcaggagcccgccttctcgggggaggaggccaaggccgccaagcgcccgcgtgtgggcaccccgcttgccacggaggactccgggcggagccaggactacgtggccttcgtggagagcctcctgcaggtgcagggccggcccggagcccccttctaggacagctggccgctcaggcgaccctcagcccggcggggaggccatggcatgccccgggcgttcgcttgctgtgaattcctgtcctcgtgtccccgacccccgagaggccacctccaagccgcgggtgccccctagggcgacaggagccagcgggacgccgcacgcggccccagactcagggagcagggccaggcgggctcgggggccggccaggggagcaccccactcaactactcagaattttaaaccatgtaagctctcttcttctcgaaaaggtgctactgcaatgccctactgagcaacctttgagattgtcacttctgtacataaaccacctttgtgaggctctttctataaatacatattgtttaaaaaaaagcaagaaaaaaaggaaaacaaaggaaaatatccccaaagttgttttctagatttgtggctttaagaaaaacaaaacaaaacaaacacattgtttttctcagaaccaggattctctgagaggtcagagcatctcgctgtttttttgttgttgttttaaaatattatgatttggctacagaccaggcagggaaagagacccggtaattggagggtgagcctcggggggggggcaggacgccccggtttcggcacagcccggtcactcacggcctcgctctcgcctcaccccggctcctgggctttgatggtctggtgccagtgcctgtgcccactctgtgcctgctgggaggaggcccaggctctctggtggccgcccctgtgcacctggccaggggaagcccgggggtctggggcctccctccgtctgcgcccacctttgcagaataaactctctcctggggtttgtctatctttgtttctctcacctgagagaaacgcaggtgttccagaggcttccttgcagacaaagcacccctgcacctcctatggctcaggatgagggaggcccccaggcccttctggttggtagtgagtgtggacagcttcccagctcttcgggtacaaccctgagcaggtcgggggacacagggccgaggcaggccttcggggcccctttcgcctgcttccgggcagggacgaggcctggtgtcctcgctccacccacccacgctgctgtcacctgaggggaatctgcttcttaggagtgggttgagctgatagagaaaaaacggccttcagcccaggctgggaagcgccttctccaggtgcctctccctcaccagctctgcacccctctggggagccttccccaccttagctgtctcctgccccagggagggatggaggagataatttgcttatattaaaaacaaaaaatggctgaggcaggagtttgggaccagcctgggctatatagcaagaccccatcactacaaattttttacaaattagctaggtgtggtggtgcgcacctgtggtcccagctactcgggaggctgtggtgggaggattgcttgagtccaggaggttgaggctgcagtcagctcagattgcaccactgcactccagcctgggcaacagagcgagaccctgtctccaaaaaaaaaaaaaagcaatgtttatattataaaagagtgtcctaacagtccccgggctagagaggactaaggaaaacagagagagtgttacgcaggagcaagcctttcatttccttggtgggggaggggggcggttgccctggagagggccggggtcggggaggttggggggtgtcagccaaaacgtggaggtgtccctctgcacgcagccctcgcccggcgtggcgctgacactgtattcttatgttgtttgaaaatgctatttatattgtaaagaagcgggcgggtgcccctgctgcccttgtcccttgggggtcacacccatcccctggtgggctcctgggcggcctgcgcagatgggccacagaagggcaggccggagctgcacactctccccacgaaggtatctctgtgtcttactctgtgcaaagacgcggcaaaacccagtgccctggtttttccccacccgagatgaaggatacgctgtattttttgcctaatgtccctgcctctaggttcataatgaattaaaggttcatgaacgctgcg

SEQ ID NO: 150174 - DNA, 3058 bp, Homo sapiens
  Payload ID: 9651
  Gene Symbol: KDM4B
  Gene Name: lysine (K)-specific demethylase 4B
  Uniprot ID: O94953
  ENST ID: ENST00000381759
  CDS Start-End: 208-1554
ccgagcggggcccggcccgagcggggcctgggggtgcgacgccgagggcgggggagagcgcgccgctgctcccggaccgggccgcgcacgccgcctcaggaaccatcactgttgctggaggcacctgacaaatcctagcgaatttttggagcatctccacccaggaacctcgccatccagaagtgtgcttcccgcacagctgcagccatggggtctgaggaccacggcgcccagaaccccagctgtaaaatcatgacgtttcgcccaaccatggaagaatttaaagacttcaacaaatacgtggcctacatagagtcgcagggagcccaccgggcgggcctggccaagatcatccccccgaaggagtggaagccgcggcagacgtatgatgacatcgacgacgtggtgatcccggcgcccatccagcaggtggtgacgggccagtcgggcctcttcacgcagtacaatatccagaagaaggccatgacagtgggcgagtaccgccgcctggccaacagcgagaagtactgtaccccgcggcaccaggactttgatgaccttgaacgcaaatactggaagaacctcacctttgtctccccgatctacggggctgacatcagcggctctttgtatgatgacgacgtggcccagtggaacatcgggagcctccggaccatcctggacatggtggagcgcgagtgcggcaccatcatcgagggcgtgaacacgccctacctgtacttcggcatgtggaagaccaccttcgcctggcacaccgaggacatggacctgtacagcatcaactacctgcactttggggagcctaagtcctggtacgccatcccaccagagcacggcaagcgcctggagcggctggccatcggcttcttccccgggagctcgcagggctgcgacgccttcctgcggcataagatgaccctcatctcgcccatcatcctgaagaagtacgggatccccttcagccggatcacgcaggaggccggggaattcatgatcacatttccctacggctaccacgccggcttcaatcacgggttcaactgcgcagaatctaccaacttcgccaccctgcggtggattgactacggcaaagtggccactcagtgcacgtgccggaaggacatggtcaagatctccatggacgtgttcgtgcgcatcctgcagcccgagcgctacgagctgtggaagcagggcaaggacctcacggtgctggaccacacgcggcccacggcgctcaccagccccgagctgagctcctggagtgcatcccgggcctcgctgaaggccaagctcctccgcagaacccctccctgcgtatcgccgcacagaccctcccagccaggtatctggtgtccgcctggaggagaggccaaagcatctgcagcctcttggcttctgaccacaagaggccatggggacacggaggcaggtcccggcctaggaggagatccacttcatgcccagagtgaaggccaggcctcctgtgtctcgacgtctcgactccgcatggcaactcaagacccttgcagatgatagacagcgaagaaatgcgcgtggctgtgtccgtgaagctttgtttacagaccctgaaatccagatctcatgatttttacatgctaccaaatacgataatttttctgttttgagccacttaaaaatgtgaacattggccaggcacgatcgctcacacctgtaatctctgcactttggaggccaaggaaggaggattgcttgagtccaggggtttgagaccagcctgggcaacatattgagatgccatctctacaaaaaatttaaaaatcagctgggtgtggtggtgtgcgcctgtggtcccaactactgagaaggctgaggcaggaagatcacttaagcccaggaggtcaaggctgcagtgagccgagattgtaccactgcactccagcctgaatgacagagcaagaccttgtctctccaggaaaacaaacaaacaaacaaaaaaacatgtaaacactgttcctagcttgtgggtcgtacccagacaggctgctggcaggtctggtctttgagccaacagtggtggccttggtgtgggggcagcctcccccttccctttgagcagtgaccttccctctgcagccatccagtctctgctgccttgatcttgtcccagctggcgatggatggtgcccactcgagacccagccactgagcaccaaggttgggggcggctcagccttggccccccaccacgctctgcagaaacaggccttggaactggtttctgaaaagtcacttctggtccagaaccttctcctctaaatgggcgccttctttttcaacacgtccatctgtctgtgagtctgggactcctgggcggtctgggcatctgtctcggcctcctctgtcttccccacctcgcggcctctctcggagaatgttccctctgccccgagtgttttcacagcccctcctgacagccctgccaaggtgaatctgtctcttctgctcttgttctgtccttttgatttcctgcctcctgtgtgctcctcatgaagagctgcctcctggtgaggctactccaggcggcccccgcagcacagagctcgtgcaccccagctcccaggcccagccagacgtgctatttgcataatggttaattgattgtggctcaggctaattggtcaacagagtggattgccaataaaccggcaccacgttccaggagtggaatgggactagaggccgtctaaattgcctgccaggaggagatgcggaagccgctgcgctcaccgctgcttggaaccttctttgcacgcaggaagtggaccccccagaaccagcccttgcgtggcctggcctggcctccctgccccggccaccccctcacttctagtcacgacctgctcctcccaggagccccctcccgccctctcccgcgccgccatcctgggggctgccttcacccagcagcaagcctgaataacaaatgaagtcagcttcccaaggatataattttcttgaaagccttcagtatgtaaaacaaggctgattcactttt

SEQ ID NO: 150175 - DNA, 5027 bp, Homo sapiens
  Payload ID: 9651
  Gene Symbol: KDM4B
  Gene Name: lysine (K)-specific demethylase 4B
  ENST ID: ENST00000536461
  CDS Start-End: 41-3433
cctcgccatccagaagtgtgcttcccgcacagctgcagccatggggtctgaggaccacggcgcccagaaccccagctgtaaaatcatgacgtttcgcccaaccatggaagaatttaaagacttcaacaaatacgtggcctacatagagtcgcagggagcccaccgggcgggcctggccaagatcatccccccgaaggagtggaagccgcggcagacgtatgatgacatcgacgacgtggtgatcccggcgcccatccagcaggtggtgacgggccagtcgggcctcttcacgcagtacaatatccagaagaaggccatgacagtgggcgagtaccgccgcctggccaacagcgagaagtactgtaccccgcggcaccaggactttgatgaccttgaacgcaaatactggaagaacctcacctttgtctccccgatctacggggctgacatcagcggctctttgtatgatgacgacgtggcccagtggaacatcgggagcctccggaccatcctggacatggtggagcgcgagtgcggcaccatcatcgagggcgtgaacacgccctacctgtacttcggcatgtggaagaccaccttcgcctggcacaccgaggacatggacctgtacagcatcaactacctgcactttggggagcctaagtcctggtacgccatcccaccagagcacggcaagcgcctggagcggctggccatcggcttcttccccgggagctcgcagggctgcgacgccttcctgcggcataagatgaccctcatctcgcccatcatcctgaagaagtacgggatccccttcagccggatcacgcaggaggccggggaattcatgatcacatttccctacggctaccacgccggcttcaatcacgggttcaactgcgcagaatctaccaacttcgccaccctgcggtggattgactacggcaaagtggccactcagtgcacgtgccggaaggacatggtcaagatctccatggacgtgttcgtgcgcatcctgcagcccgagcgctacgagctgtggaagcagggcaaggacctcacggtgctggaccacacgcggcccacggcgctcaccagccccgagctgagctcctggagtgcatcccgggcctcgctgaaggccaagctcctccgcagacaaattagtctgaaagaaaacagacactggagaaagactgaggaggagaggaaaccaagtctagaaaggaagaaagagcagaccaaaaggccggggctgtcgtctcaccggaaacggagccagcccaagaagccgaagcccgaagaccccaagttccctggggagggtacggctggggcagcgctcctagaggaggctgggggcagcgtgaaggaggaggctgggccggaggttgaccccgaggaggaggaggaggagccgcagccactgccacacggccgggaggccgagggcgcagaagaggacgggaggggcaagctgcggccaaccaaggccaagagcgagcggaagaagaagagcttcggcctgctgcccccacagctgccgcccccgcctgctcacttcccctcagaggaggcgctgtggctgccatccccactggagcccccggtgctgggcccaggccctgcagccatggaggagagccccctgccggcaccccttaatgtcgtgccccctgaggtgcccagtgaggagctagaggccaagcctcggcccatcatccccatgctgtacgtggtgccgcggccgggcaaggcagccttcaaccaggagcacgtgtcctgccagcaggcctttgagcactttgcccagaagggtccgacctggaaggaaccagtttcccccatggagctgacggggccagaggacggtgcagccagcagtggggcaggtcgcatggagaccaaagcccgggccggagaggggcaggcaccgtccacattttccaaattgaagatggagatcaagaagagccggcgccatcccctgggccggccgcccacccggtccccactgtcggtggtgaagcaggaggcctcaagtgacgaggaggcatcccctttctccggggaggaagatgtgagtgacccggacgccttgaggccgctgctgtctctgcagtggaagaacagggcggccagcttccaggccgagaggaagttcaacgcagcggctgcgcgcacggagccctactgcgccatctgcacgctcttctacccctactgccaggccctacagactgagaaggaggcacccatagcctccctcggagagggctgcccggccacattaccctccaaaagccgtcagaagacccgaccgctcatccctgagatgtgcttcacctctggcggtgagaacacggagccgctgcctgccaactcctacatcggcgacgacgggaccagccccctgatcgcctgcggcaagtgctgcctgcaggtccatgccagttgctatggcatccgtcccgagctggtcaatgaaggctggacgtgttcccggtgcgcggcccacgcctggactgcggagtgctgcctgtgcaacctgcgaggaggtgcgctgcagatgaccaccgataggaggtggatccacgtgatctgtgccatcgcagtccccgaggcgcgcttcctgaacgtgattgagcgccaccctgtggacatcagcgccatccccgagcagcggtggaagctgaaatgcgtgtactgccggaagcggatgaagaaggtgtcaggtgcctgtatccagtgctcctacgagcactgctccacgtccttccacgtgacctgcgcccacgccgcaggcgtgctcatggagccggacgactggccctatgtggtctccatcacctgcctcaagcacaagtcggggggtcacgctgtccaactcctgagggccgtgtccctaggccaggtggtcatcaccaagaaccgcaacgggctgtactaccgctgtcgcgtcatcggtgccgcctcgcagacctgctacgaagtgaacttcgacgatggctcctacagcgacaacctgtaccctgagagcatcacgagtagggactgtgtccagctgggacccccttccgagggggagctggtggagctccggtggactgacggcaacctctacaaggccaagttcatctcctccgtcaccagccacatctaccaggtggagtttgaggacgggtcccagctgacggtgaagcgtggggacatcttcaccctggaggaggagctgcccaagagggtccgctctcggctgtcactgagcacgggggcaccgcaggagcccgccttctcgggggaggaggccaaggccgccaagcgcccgcgtgtgggcaccccgcttgccacggaggactccgggcggagccaggactacgtggccttcgtggagagcctcctgcaggtgcagggccggcccggagcccccttctaggacagctggccgctcaggcgaccctcagcccggcggggaggccatggcatgccccgggcgttcgcttgctgtgaattcctgtcctcgtgtccccgacccccgagaggccacctccaagccgcgggtgccccctagggcgacaggagccagcgggacgccgcacgcggccccagactcagggagcagggccaggcgggctcgggggccggccaggggagcaccccactcaactactcagaattttaaaccatgtaagctctcttcttctcgaaaaggtgctactgcaatgccctactgagcaacctttgagattgtcacttctgtacataaaccacctttgtgaggctctttctataaatacatattgtttaaaaaaaagcaagaaaaaaaggaaaacaaaggaaaatatccccaaagttgttttctagatttgtggctttaagaaaaacaaaacaaaacaaacacattgtttttctcagaaccaggattctctgagaggtcagagcatctcgctgtttttttgttgttgttttaaaatattatgatttggctacagaccaggcagggaaagagacccggtaattggagggtgagcctcggggggggggcaggacgccccggtttcggcacagcccggtcactcacggcctcgctctcgcctcaccccggctcctgggctttgatggtctggtgccagtgcctgtgcccactctgtgcctgctgggaggaggcccaggctctctggtggccgcccctgtgcacctggccaggggaagcccgggggtctggggcctccctccgtctgcgcccacctttgcagaataaactctctcctggggtttgtctatctttgtttctctcacctgagagaaacgcaggtgttccagaggcttccttgcagacaaagcacccctgcacctcctatggctcaggatgagggaggcccccaggcccttctggttggtagtgagtgtggacagcttcccagctcttcgggtacaaccctgagcaggtcgggggacacagggccgaggcaggccttcggggcccctttcgcctgcttccgggcagggacgaggcctggtgtcctcgctccacccacccacgctgctgtcacctgaggggaatctgcttcttaggagtgggttgagctgatagagaaaaaacggccttcagcccaggctgggaagcgccttctccaggtgcctctccctcaccagctctgcacccctctggggagccttccccaccttagctgtctcctgccccagggagggatggaggagataatttgcttatattaaaaacaaaaaatggctgaggcaggagtttgggaccagcctgggctatatagcaagaccccatcactacaaattttttacaaattagctaggtgtggtggtgcgcacctgtggtcccagctactcgggaggctgtggtgggaggattgcttgagtccaggaggttgaggctgcagtcagctcagattgcaccactgcactccagcctgggcaacagagcgagaccctgtctccaaaaaaaaaaaaaagcaatgtttatattataaaagagtgtcctaacagtccccgggcta

SEQ ID NO: 150176 - DNA, 3039 bp, Homo sapiens
  Payload ID: 9651
  Gene Symbol: KDM4B
  Gene Name: lysine (K)-specific demethylase 4B
  ENST ID: ENST00000588361
  CDS Start-End: 1-1871
ctaccaacttcgccaccctgcggtggattgactacggcaaagtggccactcagtgcacgtgccggaaggacatggtcaagatctccatggacgtgttcgtgcgcatcctgcagcccgagcgctacgagctgtggaagcagggcaaggacctcacggtgctggaccacacgcggcccacggcgctcaccagccccgagctgagctcctggagtgcatcccgggcctcgctgaaggccaagctcctccgcagacaaattagtctgaaagaaaacagacactggagaaagactgaggaggagaggaaaccaagtctagaaaggaagaaagagcagaccaaaaggccggggctgtcgtctcaccggaaacggagccagcccaagaagccgaagcccgaagaccccaagttccctggggagggtacggctggggcagcgctcctagaggaggctgggggcagcgtgaaggaggaggctgggccggaggttgaccccgaggaggaggaggaggagccgcagccactgccacacggccgggaggccgagggcgcagaagaggacgggaggggcaagctgcggccaaccaaggccaagagcgagcggaagaagaagagcttcggcctgctgcccccacagctgccgcccccgcctgctcacttcccctcagaggaggcgctgtggctgccatccccactggagcccccggtgctgggcccaggccctgcagccatggaggagagccccctgccggcaccccttaatgtcgtgccccctgaggtgcccagtgaggagctagaggccaagcctcggcccatcatccccatgctgtacgtggtgccgcggccgggcaaggcagccttcaaccaggagcacgtgtcctgccagcaggcctttgagcactttgcccagaagggtccgacctggaaggaaccagtttcccccatggagctgacggggccagaggacggtgcagccagcagtggggcaggtcgcatggagaccaaagcccgggccggagaggggcaggcaccgtccacattttccaaattgaagatggagatcaagaagagccggcgccatcccctgggccggccgcccacccggtccccactgtcggtggtgaagcaggaggcctcaagtgacgaggaggcatcccctttctccggggaggaagatgtgagtgacccggacgccttgaggccgctgctgtctctgcagtggaagaacagggcggccagcttccaggccgagaggaagttcaacgcagcggctgcgcgcacggagccctactgcgccatctgcacgctcttctacccctactgccaggccctacagactgagaaggaggcacccatagcctccctcggagagggctgcccggccacattaccctccaaaagccgtcagaagacccgaccgctcatccctgagatgtgcttcacctctggcggtgagaacacggagccgctgcctgccaactcctacatcggcgacgacgggaccagccccctgatcgcctgcggcaagtgctgcctgcaggtccatgccagttgctatggcatccgtcccgagctggtcaatgaaggctggacgtgttcccggtgcgcggcccacgcctggactgcggagtgctgcctgtgcaacctgcgaggaggtgcgctgcagatgaccaccgataggaggtggatccacgtgatctgtgccatcgcagtccccgaggcgcgcttcctgaacgtgattgagcgccaccctgtggacatcagcgccatccccgagcagcggtggaagctggtgaggagcctggggcctggaggggcttggccgatcatggcctgggctgcagccctgcagggctgtctgctgcacaccctgtagcccacctgcgcacaaggcacttggggctgtccacgcctgctggaaaatgacactcagctggccctttaaatcagcttcctgcagagccttgggacctggcccagaaagaagatgaggaggccaggcctggtggctcatgcctgtaatcccagcactttgggaggccgaggcgggtcgatctcctgaggtcaggagttcgagaccagcctggccaacatatgaaaccccgtctctactgaaaatgcaaaacttagctctgcatggcgggacgtgcctgtgatcccagctactcgggagactaaggcgggagaattgcttgaacctgggcggcggaggttgcagtgagctgagattgcgccactgcactccagcctgggcgacagagtaagactctgtctcaaaaaaaaaaagatgaggagagcaaaatgcagatgttgctggggccgcgtccccactaagggctgtgcatgtggcagcgctgatggggaggacgcatttgtccctgtgcactccggcctctgcacacgtgtctcgtgggcccctggaggctgggcccgcagccagtagcacccagcagcgtcctgcctgcttttcctgcctggtttatcttcccagccgcggacacagtgcctggtgttgacattcaggcttgcgtggaggtggggctggaagcagacagatcagtctggcagggtgggtctgctggggagaccacaagggtgggactgatgccggccacaaagcccgggctcccatgcactggtgcgaggtgcccacgagcccggcgggcttggatgccatgcttggagcccacaggtgctgggccacctgggcagggctgtgcaggcagtcacagaggctcatctggaaggggagccctctttccttgttcgtggagtggagtgtgcagtgggtcacgccggcctggccgggcacggccaggcgattaggaagccggcagcccgcgggtgatgcttccgaggcaccagtgactcagtccacaaacgtgggcgtaaaaggcctcatgattcaggtggagtgatggtgcgatgcgtggtgcagtgataagtcctcctgcccgacgccttatggatcatctgacatttccagaacgcagcctcttcattaccggtgcttgtaacgatgaattaaaaatccttttacacga

SEQ ID NO: 150177 - DNA, 504 bp, Homo sapiens
  Payload ID: 9651
  Gene Symbol: KDM4B
  Gene Name: lysine (K)-specific demethylase 4B
  ENST ID: ENST00000588337
  CDS Start-End: 143-504
gggctcggtcgccagcaaccgagcggggcccggcccgagcggggcctgggggtgcgacgccgagggcgggggagagcgcgccgctgctcccggaccgggccgcgcacgccgcctcaggtgtgcttcccgcacagctgcagccatggggtctgaggaccacggcgcccagaaccccagctgtaaaatcatgacgtttcgcccaaccatggaagaatttaaagacttcaacaaatacgtggcctacatagagtcgcagggagcccaccgggcgggcctggccaagatcatccccccgaaggagtggaagccgcggcagacgtatgatgacatcgacgacgtggtgatcccggcgcccatccagcaggtggtgacgggccagtcgggcctcttcacgcagtacaatatccagaagaaggccatgacagtgggcgagtaccgccgcctggccaacagcgagaagtactgtaccccgcggcaccaggactttgatgaccttgaacgcaa

SEQ ID NO: 150178 - DNA, 5703 bp, Homo sapiens
  Payload ID: 9651
  Gene Symbol: KDM4B
  Gene Name: lysine (K)-specific demethylase 4B
  ENST ID: ENST00000611640
  CDS Start-End: 227-3619
agggctcggtcgccagcaaccgagcggggcccggcccgagcggggcctgggggtgcgacgccgagggcgggggagagcgcgccgctgctcccggaccgggccgcgcacgccgcctcaggaaccatcactgttgctggaggcacctgacaaatcctagcgaatttttggagcatctccacccaggaacctcgccatccagaagtgtgcttcccgcacagctgcagccatggggtctgaggaccacggcgcccagaaccccagctgtaaaatcatgacgtttcgcccaaccatggaagaatttaaagacttcaacaaatacgtggcctacatagagtcgcagggagcccaccgggcgggcctggccaagatcatccccccgaaggagtggaagccgcggcagacgtatgatgacatcgacgacgtggtgatcccggcgcccatccagcaggtggtgacgggccagtcgggcctcttcacgcagtacaatatccagaagaaggccatgacagtgggcgagtaccgccgcctggccaacagcgagaagtactgtaccccgcggcaccaggactttgatgaccttgaacgcaaatactggaagaacctcacctttgtctccccgatctacggggctgacatcagcggctctttgtatgatgacgacgtggcccagtggaacatcgggagcctccggaccatcctggacatggtggagcgcgagtgcggcaccatcatcgagggcgtgaacacgccctacctgtacttcggcatgtggaagaccaccttcgcctggcacaccgaggacatggacctgtacagcatcaactacctgcactttggggagcctaagtcctggtacgccatcccaccagagcacggcaagcgcctggagcggctggccatcggcttcttccccgggagctcgcagggctgcgacgccttcctgcggcataagatgaccctcatctcgcccatcatcctgaagaagtacgggatccccttcagccggatcacgcaggaggccggggaattcatgatcacatttccctacggctaccacgccggcttcaatcacgggttcaactgcgcagaatctaccaacttcgccaccctgcggtggattgactacggcaaagtggccactcagtgcacgtgccggaaggacatggtcaagatctccatggacgtgttcgtgcgcatcctgcagcccgagcgctacgagctgtggaagcagggcaaggacctcacggtgctggaccacacgcggcccacggcgctcaccagccccgagctgagctcctggagtgcatcccgggcctcgctgaaggccaagctcctccgcagacaaattagtctgaaagaaaacagacactggagaaagactgaggaggagaggaaaccaagtctagaaaggaagaaagagcagaccaaaaggccggggctgtcgtctcaccggaaacggagccagcccaagaagccgaagcccgaagaccccaagttccctggggagggtacggctggggcagcgctcctagaggaggctgggggcagcgtgaaggaggaggctgggccggaggttgaccccgaggaggaggaggaggagccgcagccactgccacacggccgggaggccgagggcgcagaagaggacgggaggggcaagctgcggccaaccaaggccaagagcgagcggaagaagaagagcttcggcctgctgcccccacagctgccgcccccgcctgctcacttcccctcagaggaggcgctgtggctgccatccccactggagcccccggtgctgggcccaggccctgcagccatggaggagagccccctgccggcaccccttaatgtcgtgccccctgaggtgcccagtgaggagctagaggccaagcctcggcccatcatccccatgctgtacgtggtgccgcggccgggcaaggcagccttcaaccaggagcacgtgtcctgccagcaggcctttgagcactttgcccagaagggtccgacctggaaggaaccagtttcccccatggagctgacggggccagaggacggtgcagccagcagtggggcaggtcgcatggagaccaaagcccgggccggagaggggcaggcaccgtccacattttccaaattgaagatggagatcaagaagagccggcgccatcccctgggccggccgcccacccggtccccactgtcggtggtgaagcaggaggcctcaagtgacgaggaggcatcccctttctccggggaggaagatgtgagtgacccggacgccttgaggccgctgctgtctctgcagtggaagaacagggcggccagcttccaggccgagaggaagttcaacgcagcggctgcgcgcacggagccctactgcgccatctgcacgctcttctacccctactgccaggccctacagactgagaaggaggcacccatagcctccctcggagagggctgcccggccacattaccctccaaaagccgtcagaagacccgaccgctcatccctgagatgtgcttcacctctggcggtgagaacacggagccgctgcctgccaactcctacatcggcgacgacgggaccagccccctgatcgcctgcggcaagtgctgcctgcaggtccatgccagttgctatggcatccgtcccgagctggtcaatgaaggctggacgtgttcccggtgcgcggcccacgcctggactgcggagtgctgcctgtgcaacctgcgaggaggtgcgctgcagatgaccaccgataggaggtggatccacgtgatctgtgccatcgcagtccccgaggcgcgcttcctgaacgtgattgagcgccaccctgtggacatcagcgccatccccgagcagcggtggaagctgaaatgcgtgtactgccggaagcggatgaagaaggtgtcaggtgcctgtatccagtgctcctacgagcactgctccacgtccttccacgtgacctgcgcccacgccgcaggcgtgctcatggagccggacgactggccctatgtggtctccatcacctgcctcaagcacaagtcggggggtcacgctgtccaactcctgagggccgtgtccctaggccaggtggtcatcaccaagaaccgcaacgggctgtactaccgctgtcgcgtcatcggtgccgcctcgcagacctgctacgaagtgaacttcgacgatggctcctacagcgacaacctgtaccctgagagcatcacgagtagggactgtgtccagctgggacccccttccgagggggagctggtggagctccggtggactgacggcaacctctacaaggccaagttcatctcctccgtcaccagccacatctaccaggtggagtttgaggacgggtcccagctgacggtgaagcgtggggacatcttcaccctggaggaggagctgcccaagagggtccgctctcggctgtcactgagcacgggggcaccgcaggagcccgccttctcgggggaggaggccaaggccgccaagcgcccgcgtgtgggcaccccgcttgccacggaggactccgggcggagccaggactacgtggccttcgtggagagcctcctgcaggtgcagggccggcccggagcccccttctaggacagctggccgctcaggcgaccctcagcccggcggggaggccatggcatgccccgggcgttcgcttgctgtgaattcctgtcctcgtgtccccgacccccgagaggccacctccaagccgcgggtgccccctagggcgacaggagccagcgggacgccgcacgcggccccagactcagggagcagggccaggcgggctcgggggccggccaggggagcaccccactcaactactcagaattttaaaccatgtaagctctcttcttctcgaaaaggtgctactgcaatgccctactgagcaacctttgagattgtcacttctgtacataaaccacctttgtgaggctctttctataaatacatattgtttaaaaaaaagcaagaaaaaaaggaaaacaaaggaaaatatccccaaagttgttttctagatttgtggctttaagaaaaacaaaacaaaacaaacacattgtttttctcagaaccaggattctctgagaggtcagagcatctcgctgtttttttgttgttgttttaaaatattatgatttggctacagaccaggcagggaaagagacccggtaattggagggtgagcctcggggggggggcaggacgccccggtttcggcacagcccggtcactcacggcctcgctctcgcctcaccccggctcctgggctttgatggtctggtgccagtgcctgtgcccactctgtgcctgctgggaggaggcccaggctctctggtggccgcccctgtgcacctggccaggggaagcccgggggtctggggcctccctccgtctgcgcccacctttgcagaataaactctctcctggggtttgtctatctttgtttctctcacctgagagaaacgcaggtgttccagaggcttccttgcagacaaagcacccctgcacctcctatggctcaggatgagggaggcccccaggcccttctggttggtagtgagtgtggacagcttcccagctcttcgggtacaaccctgagcaggtcgggggacacagggccgaggcaggccttcggggcccctttcgcctgcttccgggcagggacgaggcctggtgtcctcgctccacccacccacgctgctgtcacctgaggggaatctgcttcttaggagtgggttgagctgatagagaaaaaacggccttcagcccaggctgggaagcgccttctccaggtgcctctccctcaccagctctgcacccctctggggagccttccccaccttagctgtctcctgccccagggagggatggaggagataatttgcttatattaaaaacaaaaaatggctgaggcaggagtttgggaccagcctgggctatatagcaagaccccatcactacaaattttttacaaattagctaggtgtggtggtgcgcacctgtggtcccagctactcgggaggctgtggtgggaggattgcttgagtccaggaggttgaggctgcagtcagctcagattgcaccactgcactccagcctgggcaacagagcgagaccctgtctccaaaaaaaaaaaaaagcaatgtttatattataaaagagtgtcctaacagtccccgggctagagaggactaaggaaaacagagagagtgttacgcaggagcaagcctttcatttccttggtgggggaggggggcggttgccctggagagggccggggtcggggaggttggggggtgtcagccaaaacgtggaggtgtccctctgcacgcagccctcgcccggcgtggcgctgacactgtattcttatgttgtttgaaaatgctatttatattgtaaagaagcgggcgggtgcccctgctgcccttgtcccttgggggtcacacccatcccctggtgggctcctgggcggcctgcgcagatgggccacagaagggcaggccggagctgcacactctccccacgaaggtatctctgtgtcttactctgtgcaaagacgcggcaaaacccagtgccctggtttttccccacccgagatgaaggatacgctgtattttttgcctaatgtccctgcctctaggttcataatgaattaaaggttcatgaacgctgcg

SEQ ID NO: 150179 - DNA, 4601 bp, Homo sapiens
  Payload ID: 9652
  Gene Symbol: KDM4C
  Gene Name: lysine (K)-specific demethylase 4C
  Uniprot ID: Q9H3R0
  ENST ID: ENST00000381306
  CDS Start-End: 566-3709
cggcgcccaggaggacgtgtggcgcgtggactacatcaggtccagccctgcgggaccccagccagcgcttccgggcaaggttctgtgcacctgttttctccttctacgcgagtatctttcccctccggaaagaatgggatatgcctgtgtccaaaggacaagaagatgcgcgccagcaagcctaagttaaccacagcgcggaagttgagcccaaagcaagagcgtgccgggcacctttaagctgtttgtaagcccacgtgactcaccaagtgcgggccccagcggtcacgtgacggcgcgcgcgccctcgcgcagggagagccggcggtgcgcgcgccttcgccgctgcctcccacccaccccctcgacgggagggtgaggcgcggcgcagtgatcgggcggccggggtcctgtgcgcgtgcgcagcgaacagctgtcacctagtgcggaacaagtctcccaaatttcccaaatctccctgggccggaggccactgtcttctcttcctcctccaccgagtcgtgctctcgccccaacccgcgcgccagacactgccctaaccatcatggaggtggccgaggtggaaagtcctctgaaccccagctgtaagataatgaccttcagaccctccatggaggagttccgggagttcaacaaataccttgcatacatggagtctaaaggagcccatcgtgcgggtcttgcaaaggtgattcctcctaaggagtggaagccaagacagtgctatgatgacattgataatttgctcattccagcaccaattcagcagatggtcacagggcagtcaggactgttcactcagtacaacatccagaaaaaagcgatgactgtgaaggagttcaggcagctggccaacagtggcaaatattgtactccaagatacttggattacgaagatttggagcgcaagtactggaagaacttaacttttgtggcacctatctatggtgcagatattaatgggagcatatatgatgagggtgtggatgaatggaacatagctcgcctcaatacagtcttggatgtggttgaagaagagtgtggcatttctattgagggtgtaaataccccatatctctattttggcatgtggaagaccacgtttgcatggcacaccgaagacatggacctctatagcattaattatctccactttggagagcccaagtcttggtatgctatacctccggagcatggaaaacgacttgaaagactagctcaaggttttttcccaagcagctcccaagggtgtgatgcatttcttcgccacaagatgacattgatttctccatcagtattgaagaaatatggtattccctttgacaagataacccaggaggctggagaattcatgatcactttcccatatggctaccatgctggttttaatcatggtttcaactgtgcagaatctacaaattttgctactgtcagatggattgactatggaaaagttgccaaattgtgcacttgcaggaaagacatggtgaagatttcaatggatatctttgtgaggaaatttcagccagacagatatcagctttggaaacaaggaaaggatatatacaccattgatcacacgaagcctactccagcatccacccctgaagtaaaagcatggctgcagaggaggaggaaagtaagaaaagcatcccgaagcttccagtgtgctaggtctacctctaaaaggcctaaggctgatgaggaagaggaagtgtcagatgaagtcgatggggcagaggtccctaaccccgactcagtcacagatgacctcaaggtcagtgaaaagtcagaagcagcagtgaagctgaggaacacagaagcatcttcagaagaagagtcatctgctagcaggatgcaggtggagcagaatttatcagatcatatcaaactctcaggaaacagctgcttaagtacatctgtaacagaagacataaaaactgaggatgacaaagcttatgcatatagaagtgtaccttctatatccagtgaggctgatgattccattccattgtctagtggctatgagaagcccgagaaatcagacccatccgagctttcatggccaaagtcacctgagtcatgctcatcagtggcagagagtaatggtgtgttaacagagggagaagagagtgatgtggagagccatgggaatggccttgaacctggggaaatcccagcggtccccagtggagagagaaatagcttcaaagtccccagtatagcagagggagagaacaaaacctctaagagttggcgccatccacttagcaggcctccagcaagatctccgatgactcttgtgaagcagcaggcgccaagtgatgaagaattgcctgaggttctgtccattgaggaggaagtggaagaaacagagtcttgggcgaaacctctcatccacctttggcagacgaagtcccctaacttcgcagctgagcaagagtataatgcaacagtggccaggatgaagccacactgtgccatctgcactctgctcatgccgtaccacaagccagatagcagcaatgaagaaaatgatgctagatgggagacaaaattagatgaagtcgttacatcggagggaaagactaagcccctcataccagagatgtgttttatttatagtgaagaaaatatagaatattctccacccaatgccttccttgaagaggatggaacaagtctccttatttcctgtgcaaagtgctgcgtacgggttcatgcaagttgttatggtattccttctcatgagatctgtgatggatggctgtgtgcccggtgcaaaagaaatgcgtggacagcagaatgctgtctctgcaatttgagaggaggtgctcttaagcaaacgaagaacaataagtgggcccatgtcatgtgcgccgttgcggtcccagaagttcgattcactaatgtcccagaaaggacacaaatagatgtaggcagaatacctttacagaggttaaaattgaaatgcatcttctgcagacaccgggttaagagggtctctggagcctgcatccagtgttcctacggtcgctgcccggcctccttccatgtcacttgtgcccatgctgctggggtactgatggagcctgatgactggccttatgtggtgaacattacatgctttcgacataaggtcaaccccaacgtgaagtccaaggcttgcgagaaggtcatttccgtgggtcaaacggtcatcacgaagcatcggaacacccggtattacagttgcagagtgatggctgtgacatcgcagaccttctatgaggtcatgtttgatgatggctcctttagcagagacacatttcctgaggatatcgtgagccgagactgtctgaagctgggcccacctgctgagggagaagtcgtccaagtcaagtggcccgatggcaaactctatggagcaaaatattttggatcaaatattgcccacatgtaccaggttgagtttgaagatggatcccagatagcaatgaagagagaggacatctacactttagatgaagagttacccaagagagtgaaagctcgatttgtaagtgctggcagatgccacttggggacctgccaagtgaattccttgtcctcacctcatgtttcccaagcccagcaggaaacatacttgggcttttggattaattctaaaaaaagccaatgcaacattttccttagtggaacctattgaatgcaaacttcaaattcaaccaaaatcggggaaattaatgcatgtgctttacttttcttctaatgaagtcacatgatgcttctttgtgttgacatttattggtgcacaaaaatacttactgaatgtgtgctctgtgtaaaacaccaggagcaaacaaagataccatcaaggcatttgcaatcttgttagtagaagcaacattaaaagtattcaggagtagatcaaaggggactcggcataattgaatgtctgtctattcttttataggtttttcatggattgactaccttctgtctcagaaagttactgatgtttgtgtcagttcatcattaagctaaactctgactttcataataaaagggataaacaaagcctaaatgctagttgtgggaatactaaagcagttttttaaaaaggaaatagtagtttcatgccctcacataccattaaaagatgaacaaacatggacaaatattcaaaactgcagtcattgaaaaatataattcacaataatttagacttcatattattgtatcataaaatattcagtggaccctgaaatgaagtcagttttattcatttagaattatatctattgtgtctgtgaaatgataaatcctaaatagagaaatttgaatggatggggtttttctgactaaaatgaaattttttttctgaataattcagtttagtgagtgcttatgatatacttgtctgcagtgatagagtcactatagattatttggttattttggaaaaaccaagggttttcttaaatcagggatgtccaatctttttgcatccctgggccatacttgaagaagaagaattgtctttggcctcacataaactacactaacaatagctgatgagctactaaaaaaaaaaaaaa

SEQ ID NO: 150180 - DNA, 4655 bp, Homo sapiens
  Payload ID: 9652
  Gene Symbol: KDM4C
  Gene Name: lysine (K)-specific demethylase 4C
  Uniprot ID: Q9H3R0
  ENST ID: ENST00000381309
  CDS Start-End: 566-3736
cggcgcccaggaggacgtgtggcgcgtggactacatcaggtccagccctgcgggaccccagccagcgcttccgggcaaggttctgtgcacctgttttctccttctacgcgagtatctttcccctccggaaagaatgggatatgcctgtgtccaaaggacaagaagatgcgcgccagcaagcctaagttaaccacagcgcggaagttgagcccaaagcaagagcgtgccgggcacctttaagctgtttgtaagcccacgtgactcaccaagtgcgggccccagcggtcacgtgacggcgcgcgcgccctcgcgcagggagagccggcggtgcgcgcgccttcgccgctgcctcccacccaccccctcgacgggagggtgaggcgcggcgcagtgatcgggcggccggggtcctgtgcgcgtgcgcagcgaacagctgtcacctagtgcggaacaagtctcccaaatttcccaaatctccctgggccggaggccactgtcttctcttcctcctccaccgagtcgtgctctcgccccaacccgcgcgccagacactgccctaaccatcatggaggtggccgaggtggaaagtcctctgaaccccagctgtaagataatgaccttcagaccctccatggaggagttccgggagttcaacaaataccttgcatacatggagtctaaaggagcccatcgtgcgggtcttgcaaaggtgattcctcctaaggagtggaagccaagacagtgctatgatgacattgataatttgctcattccagcaccaattcagcagatggtcacagggcagtcaggactgttcactcagtacaacatccagaaaaaagcgatgactgtgaaggagttcaggcagctggccaacagtggcaaatattgtactccaagatacttggattacgaagatttggagcgcaagtactggaagaacttaacttttgtggcacctatctatggtgcagatattaatgggagcatatatgatgagggtgtggatgaatggaacatagctcgcctcaatacagtcttggatgtggttgaagaagagtgtggcatttctattgagggtgtaaataccccatatctctattttggcatgtggaagaccacgtttgcatggcacaccgaagacatggacctctatagcattaattatctccactttggagagcccaagtcttggtatgctatacctccggagcatggaaaacgacttgaaagactagctcaaggttttttcccaagcagctcccaagggtgtgatgcatttcttcgccacaagatgacattgatttctccatcagtattgaagaaatatggtattccctttgacaagataacccaggaggctggagaattcatgatcactttcccatatggctaccatgctggttttaatcatggtttcaactgtgcagaatctacaaattttgctactgtcagatggattgactatggaaaagttgccaaattgtgcacttgcaggaaagacatggtgaagatttcaatggatatctttgtgaggaaatttcagccagacagatatcagctttggaaacaaggaaaggatatatacaccattgatcacacgaagcctactccagcatccacccctgaagtaaaagcatggctgcagaggaggaggaaagtaagaaaagcatcccgaagcttccagtgtgctaggtctacctctaaaaggcctaaggctgatgaggaagaggaagtgtcagatgaagtcgatggggcagaggtccctaaccccgactcagtcacagatgacctcaaggtcagtgaaaagtcagaagcagcagtgaagctgaggaacacagaagcatcttcagaagaagagtcatctgctagcaggatgcaggtggagcagaatttatcagatcatatcaaactctcaggaaacagctgcttaagtacatctgtaacagaagacataaaaactgaggatgacaaagcttatgcatatagaagtgtaccttctatatccagtgaggctgatgattccattccattgtctagtggctatgagaagcccgagaaatcagacccatccgagctttcatggccaaagtcacctgagtcatgctcatcagtggcagagagtaatggtgtgttaacagagggagaagagagtgatgtggagagccatgggaatggccttgaacctggggaaatcccagcggtccccagtggagagagaaatagcttcaaagtccccagtatagcagagggagagaacaaaacctctaagagttggcgccatccacttagcaggcctccagcaagatctccgatgactcttgtgaagcagcaggcgccaagtgatgaagaattgcctgaggttctgtccattgaggaggaagtggaagaaacagagtcttgggcgaaacctctcatccacctttggcagacgaagtcccctaacttcgcagctgagcaagagtataatgcaacagtggccaggatgaagccacactgtgccatctgcactctgctcatgccgtaccacaagccagatagcagcaatgaagaaaatgatgctagatgggagacaaaattagatgaagtcgttacatcggagggaaagactaagcccctcataccagagatgtgttttatttatagtgaagaaaatatagaatattctccacccaatgccttccttgaagaggatggaacaagtctccttatttcctgtgcaaagtgctgcgtacgggttcatgcaagttgttatggtattccttctcatgagatctgtgatggatggctgtgtgcccggtgcaaaagaaatgcgtggacagcagaatgctgtctctgcaatttgagaggaggtgctcttaagcaaacgaagaacaataagtgggcccatgtcatgtgcgccgttgcggtcccagaagttcgattcactaatgtcccagaaaggacacaaatagatgtaggcagaatacctttacagaggttaaaattgaaatgcatcttctgcagacaccgggttaagagggtctctggagcctgcatccagtgttcctacggtcgctgcccggcctccttccatgtcacttgtgcccatgctgctggggtactgatggagcctgatgactggccttatgtggtgaacattacatgctttcgacataaggtcaaccccaacgtgaagtccaaggcttgcgagaaggtcatttccgtgggtcaaacggtcatcacgaagcatcggaacacccggtattacagttgcagagtgatggctgtgacatcgcagaccttctatgaggtcatgtttgatgatggctcctttagcagagacacatttcctgaggatatcgtgagccgagactgtctgaagctgggcccacctgctgagggagaagtcgtccaagtcaagtggcccgatggcaaactctatggagcaaaatattttggatcaaatattgcccacatgtaccaggttgagtttgaagatggatcccagatagcaatgaagagagaggacatctacactttagatgaagagttacccaagagagtgaaagctcgattttccacagcctctgacatgcgatttgaagacacgttttatggagcagacattatccaaggggagagaaagagacaaagagtgctgagctccaggtttaagaatgaatatgtggccgaccctgtataccgcacttttttgaagagctctttccagaagaagtgccagaagagacagtagtctgcatacatcgctgcaggccacagagcagcttgggttggaagagagaagatgaagggacatccttggggctgtgccgtgagttttgctggcataggtgacagggtgtgtctctgacagtggtaaatcgggtttccagagtttggtcaccaaaaatacaaaatacacccaatgaattggacgcagcaatctgaaatcatctctagtcttgctttcacttgtgagcagttgtcttctatgatcccaaagaagttttctaagtgaaaggaaatactagtgaatcacccacaaggaaaagccactgccacagaggaggcgggtccccttgtgcggcttagggccctgtcaggaaacacacggggacctctctctctagctccagcaggtggcacctcggtacccagcgggtagggcgataatttatatattttccacagtcagggaaggactctcacttatttgtttcaaattgcagtttttataaaacatttttaaaacacaaatggcatgtatgctaatgagatttacccgtgtgctatctgtatttcccttgtacagaacttttacatttttgaatattcctattacttttgattgtgtctgatgggaactgagttgttggcctttgtgaaatgaaatttttggctcttgagaaagaattcttatgaattgttatgcgaattttatatatttaaagagggagatctggggctgttatttttaaacactttttttcataatacatattccgagtagatatttataaaatatatgtttctttcattatgtgtttgtaaaattagagtttaaataaatatgctttgatgcatagttttgaactaatgtaacatgatttttcttttttaaaacagcctgaaaatgtactagtgtttaaaaataaagatttccattttctcca

SEQ ID NO: 150181 - DNA, 1406 bp, Homo sapiens
  Payload ID: 9652
  Gene Symbol: KDM4C
  Gene Name: lysine (K)-specific demethylase 4C
  ENST ID: ENST00000401787
  CDS Start-End: 568-1023
gtcggcgcccaggaggacgtgtggcgcgtggactacatcaggtccagccctgcgggaccccagccagcgcttccgggcaaggttctgtgcacctgttttctccttctacgcgagtatctttcccctccggaaagaatgggatatgcctgtgtccaaaggacaagaagatgcgcgccagcaagcctaagttaaccacagcgcggaagttgagcccaaagcaagagcgtgccgggcacctttaagctgtttgtaagcccacgtgactcaccaagtgcgggccccagcggtcacgtgacggcgcgcgcgccctcgcgcagggagagccggcggtgcgcgcgccttcgccgctgcctcccacccaccccctcgacgggagggtgaggcgcggcgcagtgatcgggcggccggggtcctgtgcgcgtgcgcagcgaacagctgtcacctagtgcggaacaagtctcccaaatttcccaaatctccctgggccggaggccactgtcttctcttcctcctccaccgagtcgtgctctcgccccaacccgcgcgccagacactgccctaaccatcatggaggtggccgaggtggaaagtcctctgaaccccagctgtaagataatgaccttcagaccctccatggaggagttccgggagttcaacaaataccttgcatacatggagtctaaaggagcccatcgtgcgggtcttgcaaaggtgattcctcctaaggagtggaagccaagacagtgctatgatgacattgataatttgctcattccagcaccaattcagcagatggtcacagggcagtcaggactgttcactcagtacaacatccagaaaaaagcgatgactgtgaaggagttcaggcagctggccaacagtggcaaatattgtactccaagatacttggattacgaagatttggagcgcaagtactggaagaacttaacttttgtggcacctatctatggtgcagatattaatgggagcatatatgatgaggtacattcatatttacagtgagttttgtaaagatcattggatgtgacagttttgttaccatttaagcagtttagaagtgttcttttgttgtgcttttgggtgatccataattcctcaaaggacaacaggaaatattcatcagtaggatttctgctgctggtatttttcaaactgaagctagataatcgtacaaatacctgaaattgttcagtagtaacatggtatgtggttatctggctgatcttttcattacattaaaactttttaaagcaaaaatacattataaaaatgtttggaaaacaggaaatatgatgcatcatactgacaccttaaagcagaagcagtattttagatatatttttccagtactttccctcaatcattaaaaaaatgttatatttgaa

SEQ ID NO: 150182 - DNA, 1064 bp, Homo sapiens
  Payload ID: 9652
  Gene Symbol: KDM4C
  Gene Name: lysine (K)-specific demethylase 4C
  ENST ID: ENST00000420847
  CDS Start-End: 1-1064
ccagatagcagcaatgaagaaaatgatgctagatgggagacaaaattagatgaagtcgttacatcggagggaaagactaagcccctcataccagagatgtgttttatttatagtgaagaaaatatagaatattctccacccaatgccttccttgaagaggatggaacaagtctccttatttcctgtgcaaagtgctgcgtacgggttcatgcaagttgttatggtattccttctcatgagatctgtgatggatggctgtgtgcccggtgcaaaagaaatgcgtggacagcagaatgctgtctctgcaatttgagaggaggtgctcttaagcaaacgaagaacaataagtgggcccatgtcatgtgcgccgttgcggtcccagaagttcgattcactaatgtcccagaaaggacacaaatagatgtaggcagaatacctttacagaggttaaaattgaaatgcatcttctgcagacaccgggttaagagggtctctggagcctgcatccagtgttcctacggtcgctgcccggcctccttccatgtcacttgtgcccatgctgctggggtactgatggagcctgatgactggccttatgtggtgaacattacatgctttcgacataaggtcaaccccaacgtgttcacagcacagagtaagcactcaaaaaatgaaagttgtattgctactactacttctgctgctgctgctggtgctacaatcttatgtgaactgggccacaagtccaaggcttgcgagaaggtcatttccgtgggtcaaacggtcatcacgaagcatcggaacacccggtattacagttgcagagtgatggctgtgacatcgcagaccttctatgaggtcatgtttgatgatggctcctttagcagagacacatttcctgaggatatcgtgagccgagactgtctgaagctgggcccacctgctgagggagaagtcgtccaagtcaagtggcccgatggcaaactctatggagcaaaatattttggatcaaatattgcccacatgtaccaggttgagtttgaagatggatcccagatagcaat

SEQ ID NO: 150183 - DNA, 4022 bp, Homo sapiens
  Payload ID: 9652
  Gene Symbol: KDM4C
  Gene Name: lysine (K)-specific demethylase 4C
  ENST ID: ENST00000438023
  CDS Start-End: 581-1702
gccataggtgcgcgtcggcgcccaggaggacgtgtggcgcgtggactacatcaggtccagccctgcgggaccccagccagcgcttccgggcaaggttctgtgcacctgttttctccttctacgcgagtatctttcccctccggaaagaatgggatatgcctgtgtccaaaggacaagaagatgcgcgccagcaagcctaagttaaccacagcgcggaagttgagcccaaagcaagagcgtgccgggcacctttaagctgtttgtaagcccacgtgactcaccaagtgcgggccccagcggtcacgtgacggcgcgcgcgccctcgcgcagggagagccggcggtgcgcgcgccttcgccgctgcctcccacccaccccctcgacgggagggtgaggcgcggcgcagtgatcgggcggccggggtcctgtgcgcgtgcgcagcgaacagctgtcacctagtgcggaacaagtctcccaaatttcccaaatctccctgggccggaggccactgtcttctcttcctcctccaccgagtcgtgctctcgccccaacccgcgcgccagacactgccctaaccatcatggaggtggccgaggtggaaagtcctctgaaccccagctgtaagataatgaccttcagaccctccatggaggagttccgggagttcaacaaataccttgcatacatggagtctaaaggagcccatcgtgcgggtcttgcaaaggtgattcctcctaaggagtggaagccaagacagtgctatgatgacattgataatttgctcattccagcaccaattcagcagatggtcacagggcagtcaggactgttcactcagtacaacatccagaaaaaagcgatgactgtgaaggagttcaggcagctggccaacagtggcaaatattgtactccaagatacttggattacgaagatttggagcgcaagtactggaagaacttaacttttgtggcacctatctatggtgcagatattaatgggagcatatatgatgagggtgtggatgaatggaacatagctcgcctcaatacagtcttggatgtggttgaagaagagtgtggcatttctattgagggtgtaaataccccatatctctattttggcatgtggaagaccacgtttgcatggcacaccgaagacatggacctctatagcattaattatctccactttggagagcccaagtcttggtatgctatacctccggagcatggaaaacgacttgaaagactagctcaaggttttttcccaagcagctcccaagggtgtgatgcatttcttcgccacaagatgacattgatttctccatcagtattgaagaaatatggtattccctttgacaagataacccaggaggctggagaattcatgatcactttcccatatggctaccatgctggttttaatcatggtttcaactgtgcagaatctacaaattttgctactgtcagatggattgactatggaaaagttgccaaattgtgcacttgcaggaaagacatggtgaagatttcaatggatatctttgtgaggaaatttcagccagacagatatcagctttggaaacaaggaaaggatatatacaccattgatcacacgaagcctactccagcatccacccctgaagtaaaagcatggctgcagaggaggaggaaagtaagaaaagcatcccgaagattataaaagtaatatttgtgcattggaggaaatttgtaaaataaggaaaagaataatgaaggaatcccatatcactcataacctcactatccagagataaccagtattaacattttgtatatatcctttacctatatatttattatatattttataatattatatatctttccaaaattggggccatgctctgttaataatctgacaatcagttttgagtgtttttttcatgtaactgattgatttgctgcaacatgatttttaatgcctgcatgtatttaatcccctgtagcttgtgtccacttttttgatattaactaagtaacaccataattttacatctttgcccagacttatgatgcttattttctgtcttttttttttccctgatatttattttctgcttatttagagtggtagtgagtggaagaaccttaggaacatggagtcaaacttcggcatcttataagaggtagacctgaggtgcagaactaactcaggtgttgatatttccccctgtagtttaccgcaatgatcgtcaaagtgtttgttagtaggtcaggaccaacattttaaaatgaggtggtaaaatagaataaaaagtattatagtgcttcctctgtggtaagggcaaatattcactcatgacatgtgtgagtatgtgtgtatgtgtgtatatagtgtcactatctgaaatatataactcactgtgggttacattcaagaaaagtttgagaaatactaatttggacagtcagtgtctttgataactgtgttaattcacagcactaaagaagccagcgctggaaggaggcagtatccaatcctgagttcagaatacacaccaggagaacatcttgagcattgttctgtcatggatggaaaacacaatattttcattaggtgtatgacttggtttccagcttccagtgtgctaggtctacctctaaaaggcctaaggctgatgaggaagaggaagtgtcagatgaagtcgatggggcagaggtccctaaccccgactcagtcacagatgacctcaaggtcagtgaaaagtcagaagcagcagtgaagctgaggaacacagaagcatcttcagaagaagagtcatctgctagcaggatgcaggtggagcagaatttatcagatcatatcaaactctcaggaaacagctgcttaagtacatctgtaacagaagacataaaaactgaggatgacaaagcttatgcatatagaagtgtaccttctatatccagtgaggctgatgattccattccattgtctagtggctatgagaagcccgagaaatcagacccatccgagctttcatggccaaagtcacctgagtcatgctcatcagtggcagagagtaatggtgtgttaacagagggagaagagagtgatgtggagagccatgggaatggccttgaacctggggaaatcccagcggtccccagtggagagagaaatagcttcaaagtccccagtatagcagagggagagaacaaaacctctaagagttggcgccatccacttagcaggcctccagcaagatctccgatgactcttgtgaagcagcaggcgccaagtgatgaagaattgcctgaggttctgtccattgaggaggaagtggaagaaacagagtcttgggcgaaacctctcatccacctttggcagacgaagtcccctaacttcgcagctgagcaagagtataatgcaacagtggccaggatgaagccacactgtgccatctgcactctgctcatgccgtaccacaagccagatagcagcaatgaagaaaatgatgctagatgggagacaaaattagatgaagtcgttacatcggagggaaagactaagcccctcataccagagatgtgttttatttatagtgaagaaaatatagaatattctccacccaatgccttccttgaagaggatggaacaagtctccttatttcctgtgcaaagtgctgcgtacgggttcatgcaagtaaatggatctataattcatcaatcactggcttttcagcatttcacatcatctttatttctcacttttttggaacctgtcagatctgttgcatggactattggcattcttaatggttatatcattctttttcatatttctgctggtaaaagtatgagttggtatattcatccttttttcaccactttcatgtagtatccgtggagagcaggtctggttttttttgttggtttgtttgtttggggtccagttgaggagtcatgatggggttcctttcacatgtttggattttacttactttaagatctagtttataaaaacttaatttgaaagtct

SEQ ID NO: 150184 - DNA, 3039 bp, Homo sapiens
  Payload ID: 9652
  Gene Symbol: KDM4C
  Gene Name: lysine (K)-specific demethylase 4C
  ENST ID: ENST00000428870
  CDS Start-End: 190-2421
gctcatgctgctttcaatctcctggcatcaagcagtcctcccaccttggcctcccgaagttctggtacaagtgggagccaccatgcctgggcagaccctcagttctaaaaccgtcttggcttgtttaccatcagcccttcaccgtttcagaaagatgctgttcggagaacttgcacttgcaggaaagacatggtgaagatttcaatggatatctttgtgaggaaatttcagccagacagatatcagctttggaaacaaggaaaggatatatacaccattgatcacacgaagcctactccagcatccacccctgaagtaaaagcatggctgcagaggaggaggaaagtaagaaaagcatcccgaagcttccagtgtgctaggtctacctctaaaaggcctaaggctgatgaggaagaggaagtgtcagatgaagtcgatggggcagaggtccctaaccccgactcagtcacagatgacctcaaggtcagtgaaaagtcagaagcagcagtgaagctgaggaacacagaagcatcttcagaagaagagtcatctgctagcaggatgcaggtggagcagaatttatcagatcatatcaaactctcaggaaacagctgcttaagtacatctgtaacagaagacataaaaactgaggatgacaaagcttatgcatatagaagtgtaccttctatatccagtgaggctgatgattccattccattgtctagtggctatgagaagcccgagaaatcagacccatccgagctttcatggccaaagtcacctgagtcatgctcatcagtggcagagagtaatggtgtgttaacagagggagaagagagtgatgtggagagccatgggaatggccttgaacctggggaaatcccagcggtccccagtggagagagaaatagcttcaaagtccccagtatagcagagggagagaacaaaacctctaagagttggcgccatccacttagcaggcctccagcaagatctccgatgactcttgtgaagcagcaggcgccaagtgatgaagaattgcctgaggttctgtccattgaggaggaagtggaagaaacagagtcttgggcgaaacctctcatccacctttggcagacgaagtcccctaacttcgcagctgagcaagagtataatgcaacagtggccaggatgaagccacactgtgccatctgcactctgctcatgccgtaccacaagccagatagcagcaatgaagaaaatgatgctagatgggagacaaaattagatgaagtcgttacatcggagggaaagactaagcccctcataccagagatgtgttttatttatagtgaagaaaatatagaatattctccacccaatgccttccttgaagaggatggaacaagtctccttatttcctgtgcaaagtgctgcgtacgggttcatgcaagttgttatggtattccttctcatgagatctgtgatggatggctgtgtgcccggtgcaaaagaaatgcgtggacagcagaatgctgtctctgcaatttgagaggaggtgctcttaagcaaacgaagaacaataagtgggcccatgtcatgtgcgccgttgcggtcccagaagttcgattcactaatgtcccagaaaggacacaaatagatgtaggcagaatacctttacagaggttaaaattgaaatgcatcttctgcagacaccgggttaagagggtctctggagcctgcatccagtgttcctacggtcgctgcccggcctccttccatgtcacttgtgcccatgctgctggggtactgatggagcctgatgactggccttatgtggtgaacattacatgctttcgacataaggtcaaccccaacgtgaagtccaaggcttgcgagaaggtcatttccgtgggtcaaacggtcatcacgaagcatcggaacacccggtattacagttgcagagtgatggctgtgacatcgcagaccttctatgaggtcatgtttgatgatggctcctttagcagagacacatttcctgaggatatcgtgagccgagactgtctgaagctgggcccacctgctgagggagaagtcgtccaagtcaagtggcccgatggcaaactctatggagcaaaatattttggatcaaatattgcccacatgtaccaggttgagtttgaagatggatcccagatagcaatgaagagagaggacatctacactttagatgaagagttacccaagagagtgaaagctcgattttccacagcctctgacatgcgatttgaagacacgttttatggagcagacattatccaaggggagagaaagagacaaagagtgctgagctccaggtttaagaatgaatatgtggccgaccctgtataccgcacttttttgaagagctctttccagaagaagtgccagaagagacagtagtctgcatacatcgctgcaggccacagagcagcttgggttggaagagagaagatgaagggacatccttggggctgtgccgtgagttttgctggcataggtgacagggtgtgtctctgacagtggtaaatcgggtttccagagtttggtcaccaaaaatacaaaatacacccaatgaattggacgcagcaatctgaaatcatctctagtcttgctttcacttgtgagcagttgtcttctatgatcccaaagaagttttctaagtgaaaggaaatactagtgaatcacccacaaggaaaagccactgccacagaggaggcgggtccccttgtgcggcttagggccctgtcaggaaacacacggggacctctctctctagctccagcaggtggcacctcggtacccagcgggtagggcgataatttatatattttccacagtcagggaaggactctcacttatttgtttcaaattgcagtttttataaaacatttttaaaacacaaatggcatgtatgctaatgagatttacccgtgtgctatctgtatttcccttgtacagaacttttacatttttgaatattcctattacttttgattgtgtctgatgggaactgagttg

SEQ ID NO: 150185 - DNA, 3332 bp, Homo sapiens
  Payload ID: 9652
  Gene Symbol: KDM4C
  Gene Name: lysine (K)-specific demethylase 4C
  Uniprot ID: Q9H3R0
  ENST ID: ENST00000543771
  CDS Start-End: 79-2520
aggccactgtcttctcttcctcctccaccgagtcgtgctctcgccccaacccgcgcgccagacactgccctaaccatcatggaggtggccgaggtggaaagtcctctgaaccccagctgtaagataatgaccttcagaccctccatggaggagttccgggagttcaacaaataccttgcatacatggagtctaaaggagcccatcgtgcgggtcttgcaaaggtgattcctcctaaggagtggaagccaagacagtgctatgatgacattgataatttgctcattccagcaccaattcagcagatggtcacagggcagtcaggactgttcactcagtacaacatccagaaaaaagcgatgactgtgaaggagttcaggcagctggccaacagtggcaaatattgtactccaagatacttggattacgaagatttggagcgcaagtactggaagaacttaacttttgtggcacctatctatggtgcagatattaatgggagcatatatgatgagggtgtggatgaatggaacatagctcgcctcaatacagtcttggatgtggttgaagaagagtgtggcatttctattgagggtgtaaataccccatatctctattttggcatgtggaagaccacgtttgcatggcacaccgaagacatggacctctatagcattaattatctccactttggagagcccaagtcttggtatgctatacctccggagcatggaaaacgacttgaaagactagctcaaggttttttcccaagcagctcccaagggtgtgatgcatttcttcgccacaagatgacattgatttctccatcagtattgaagaaatatggtattccctttgacaagataacccaggaggctggagaattcatgatcactttcccatatggctaccatgctggttttaatcatggtttcaactgtgcagaatctacaaattttgctactgtcagatggattgactatggaaaagttgccaaattgtgcacttgcaggaaagacatggtgaagatttcaatggatatctttgtgaggaaatttcagccagacagatatcagctttggaaacaaggaaaggatatatacaccattgatcacacgaagcctactccagcatccacccctgaagtaaaagcatggctgcagaggaggaggaaagtaagaaaagcatcccgaagcttccagtgtgctaggtctacctctaaaaggcctaaggctgatgaggaagaggaagtgtcagatgaagtcgatggggcagaggtccctaaccccgactcagtcacagatgacctcaaggtcagtgaaaagtcagaagcagcagtgaagctgaggaacacagaagcatcttcagaagaagagtcatctgctagcaggatgcaggtggagcagaatttatcagatcatatcaaactctcaggaaacagctgcttaagtacatctgtaacagaagacataaaaactgaggatgacaaagcttatgcatatagaagtgtaccttctatatccagtgaggctgatgattccattccattgtctagtggctatgagaagcccgagaaatcagacccatccgagctttcatggccaaagtcacctgagtcatgctcatcagtggcagagagtaatggtgtgttaacagagggagaagagagtgatgtggagagccatgggaatggccttgaacctggggaaatcccagcggtccccagtggagagagaaatagcttcaaagtccccagtatagcagagggagagaacaaaacctctaagagttggcgccatccacttagcaggcctccagcaagatctccgatgactcttgtgaagcagcaggcgccaagtgatgaagaattgcctgaggttctgtccattgaggaggaagtggaagaaacagagtcttgggcgaaacctctcatccacctttggcagacgaagtcccctaacttcgcagctgagcaagagtataatgcaacagtggccaggatgaagccacactgtgccatctgcactctgctcatgccgtaccacaagccagatagcagcaatgaagaaaatgatgctagatgggagacaaaattagatgaagtcgttacatcggagggaaagactaagcccctcataccagagatgtgttttatttatagtgaagaaaatatagaatattctccacccaatgccttccttgaagaggatggaacaagtctccttatttcctgtgcaaagtgctgcgtacgggttcatgcaagttgttatggtattccttctcatgagatctgtgatggatggctgtgtgcccggtgcaaaagaaatgcgtggacagcagaatgctgtctctgcaatttgagaggaggtgctcttaagcaaacgaagaacaataagtgggcccatgtcatgtgcgccgttgcggtcccagaagttcgattcactaatgtcccagaaaggacacaaatagatgtaggcagaatacctttacagaggttaaaattgggaaggctgggaatctagacacagcaacagtaacaacaacaacaataacaatgaaggctcactgtgaaaacatcaattcattaggaaagttacatcccctccgccactgtttcagatgctgtttctcattctccatgggagcagccagcatcgtgtttaggatggggatacaatagcctgagctcctgattgagtcagaccctggactttcccttttgtatctgtcattttcctctggatcctcacacctttgtgtttaatttttttaaatttcatttgttgacttcctatgtggggtaaaatgacttcctttgattaatgtactttctgtatcctagagtttccctttccctttgtgatttagtccaacgtgtcctactacagcctcaaaaattgtcattggaatcaaaagctttccaaggtgcatcaggttaatgatttggatgcatcctgaggttgtctcctgtagcatggaggcattataataggagtctcagaagttacaccatttttctacagcacatcacaggcccagaggcttgaatctaagagaatccactctatgtctgtcagcctgaatccttccttcttgctgcacaacaaagcaactgaacgtattttgagtttaggtgaaaactatcactcattcatcaaagttctatctgggtgatatatgctatcgaaacagatgtggacactgggctgacagatgttgagaacggacctgttgctgaagctcatgttatcacacatgctgtgggaagagaggtcattggcattcaagatgcaacacctacaatatggtgaattaaagatgccatttgcatgga

SEQ ID NO: 150186 - DNA, 2978 bp, Homo sapiens
  Payload ID: 9653
  Gene Symbol: KDM4D
  Gene Name: lysine (K)-specific demethylase 4D
  Uniprot ID: Q6B0I6
  ENST ID: ENST00000335080
  CDS Start-End: 833-2404
aaggggcggggccgaagcggcccagggggcgggcgtttgaaatcagtgccttagagtagaccctaaacctcattttataccttcaagaaccaattacttaatgtctcttccgtcttttccgtccccgaccccctcccagactccttcattccggtactgcgtggacggaaagccccgggtagccgacaccacgtccccggctagcgggagagagcgtggaaaaggattacaccaaactgtttaaatccaacgactcctgcttccatcctttctcctgagctagaaccaacaaacctagagagttgggcttcggaaaaactagtgttttcatttaattggatatgaagaaagaacaaatatgtacggggcaaccacgatctttacaaagaacataagttccaggaaagcaggaaccttgtctctcttgttcactgggtgtatcctctgcatatagaacagtgcctggcacataataggtgctgaattttgttctaaacactgaggacattctctgctacatttgggtcgtacccccaggtctgagtaattcaatagacttaagaagacagagcccagcagcaaccgaaacataacagagttgcaggatcagctaacgtcaatgcctgggcaaagctgctgcccagagtggaatctcactagtgaataaacaagcccaagaaagattatcatctcatttgcaaaaaaaaaagtacgctggtagatcctgctacctcatagataacaccagtcaaatttttttttaaagtagcattttcctacattgtcaactatctagaacatacctaaaaactaagagtttactgcttattaaatggaaactatgaagtctaaggccaactgtgcccagaatccaaattgtaacataatgatatttcatccaaccaaagaagagtttaatgattttgataaatatattgcttacatggaatcccaaggtgcacacagagctggcttggctaagataattccacccaaagaatggaaagccagagagacctatgataatatcagtgaaatcttaatagccactcccctccagcaggtggcctctgggcgggcaggggtgtttactcaataccataaaaaaaagaaagccatgactgtgggggagtatcgccatttggcaaacagtaaaaaatatcagactccaccacaccagaatttcgaagatttggagcgaaaatactggaagaaccgcatctataattcaccgatttatggtgctgacatcagtggctccttgtttgatgaaaacactaaacaatggaatcttgggcacctgggaacaattcaggacctgctggaaaaggaatgtggggttgtcatagaaggcgtcaatacaccctacttgtactttggcatgtggaaaaccacgtttgcttggcatacagaggacatggacctttacagcatcaactacctgcaccttggggagcccaaaacttggtatgtggtgcccccagaacatggccagcgcctggaacgcctggccagggagctcttcccaggcagttcccggggttgtggggccttcctgcggcacaaggtggccctcatctcgcctacagttctcaaggaaaatgggattcccttcaatcgcataactcaggaggctggagagttcatggtgacctttccctatggctaccatgctggcttcaaccatggtttcaactgcgcagaggccatcaattttgccactccgcgatggattgattatggcaaaatggcctcccagtgtagctgtggggaggcaagggtgaccttttccatggatgccttcgtgcgcatcctgcaacctgaacgctatgacctgtggaaacgtgggcaagaccgggcagttgtggaccacatggagcccagggtaccagccagccaagagctgagcacccagaaggaagtccagttacccaggagagcagcgctgggcctgagacaactcccttcccactgggcccggcattccccttggcctatggctgcccgcagtgggacacggtgccacacccttgtgtgctcttcactcccacgccgatctgcagttagtggcactgctacgcagccccgggctgctgctgtccacagctctaagaagcccagctcaactccatcatccacccctggtccatctgcacagattatccacccgtcaaatggcagacgtggtcgtggtcgccctcctcagaaactgagagctcaggagctgaccctccagactccagccaagaggcccctcttggcgggcacaacatgcacagcttcgggcccagaacctgagcccctacctgaggatggggctttgatggacaagcctgtaccactgagcccagggctccagcatcctgtcaaggcttctgggtgcagctgggcccctgtgccctaagtccacgggctgtctttatatcccactgccctgctgtgtgacagtttgatgaaactggttacatttacatcccaaaactttggttgagtttgcaggactctaggcatgcatgaaagagcccccctggtgatgcccttggatgctgccaagtccatggtagttttcaattttgccatacttttgttcttcctaccggaccctggaatgtctttggatattgctaaaatctatttctgcagctgaggttttatccactggacacatttgtgtgtgagaactaggtcttgttgaggttagcgtaacctggtatatgcaactaccatcctctgggccaactgtggaagctgctgcacttgtgaagaatcctgagctttgattcctcttcagtctacgcatttctctcttcccctccctcaccccctttttcttataaaactaggttctttatacagataaggtcagtagagttccagaataaaagatatgacttttctgagttatttatgtacttaaaatatgttgtcacagtatttgttcccaaatatattaaaggtaaccaaaatgttaaaatctg

SEQ ID NO: 150187 - DNA, 2737 bp, Homo sapiens
  Payload ID: 9653
  Gene Symbol: KDM4D
  Gene Name: lysine (K)-specific demethylase 4D
  Uniprot ID: Q6B0I6
  ENST ID: ENST00000536741
  CDS Start-End: 596-2167
ccttcattccggtactgcgtggacggaaagccccgggtagccgacaccacgtccccggctagcgggagagagcgtggaaaaggattacaccaaactgtttaaatccaacgactcctgcttccatcctttctcctgagctagaaccaacaaacctagagagttgggcttcggaaaaactagtgttttcatttaattggatatgaagaaagaacaaatatgtacggggcaaccacgatctttacaaagattttgttctaaacactgaggacattctctgctacatttgggtcgtacccccaggtctgagtaattcaatagacttaagaagacagagcccagcagcaaccgaaacataacagagttgcaggatcagctaacgtcaatgcctgggcaaagctgctgcccagagtggaatctcactagtgaataaacaagcccaagaaagattatcatctcatttgcaaaaaaaaaagtacgctggtagatcctgctacctcatagataacaccagtcaaatttttttttaaagtagcattttcctacattgtcaactatctagaacatacctaaaaactaagagtttactgcttattaaatggaaactatgaagtctaaggccaactgtgcccagaatccaaattgtaacataatgatatttcatccaaccaaagaagagtttaatgattttgataaatatattgcttacatggaatcccaaggtgcacacagagctggcttggctaagataattccacccaaagaatggaaagccagagagacctatgataatatcagtgaaatcttaatagccactcccctccagcaggtggcctctgggcgggcaggggtgtttactcaataccataaaaaaaagaaagccatgactgtgggggagtatcgccatttggcaaacagtaaaaaatatcagactccaccacaccagaatttcgaagatttggagcgaaaatactggaagaaccgcatctataattcaccgatttatggtgctgacatcagtggctccttgtttgatgaaaacactaaacaatggaatcttgggcacctgggaacaattcaggacctgctggaaaaggaatgtggggttgtcatagaaggcgtcaatacaccctacttgtactttggcatgtggaaaaccacgtttgcttggcatacagaggacatggacctttacagcatcaactacctgcaccttggggagcccaaaacttggtatgtggtgcccccagaacatggccagcgcctggaacgcctggccagggagctcttcccaggcagttcccggggttgtggggccttcctgcggcacaaggtggccctcatctcgcctacagttctcaaggaaaatgggattcccttcaatcgcataactcaggaggctggagagttcatggtgacctttccctatggctaccatgctggcttcaaccatggtttcaactgcgcagaggccatcaattttgccactccgcgatggattgattatggcaaaatggcctcccagtgtagctgtggggaggcaagggtgaccttttccatggatgccttcgtgcgcatcctgcaacctgaacgctatgacctgtggaaacgtgggcaagaccgggcagttgtggaccacatggagcccagggtaccagccagccaagagctgagcacccagaaggaagtccagttacccaggagagcagcgctgggcctgagacaactcccttcccactgggcccggcattccccttggcctatggctgcccgcagtgggacacggtgccacacccttgtgtgctcttcactcccacgccgatctgcagttagtggcactgctacgcagccccgggctgctgctgtccacagctctaagaagcccagctcaactccatcatccacccctggtccatctgcacagattatccacccgtcaaatggcagacgtggtcgtggtcgccctcctcagaaactgagagctcaggagctgaccctccagactccagccaagaggcccctcttggcgggcacaacatgcacagcttcgggcccagaacctgagcccctacctgaggatggggctttgatggacaagcctgtaccactgagcccagggctccagcatcctgtcaaggcttctgggtgcagctgggcccctgtgccctaagtccacgggctgtctttatatcccactgccctgctgtgtgacagtttgatgaaactggttacatttacatcccaaaactttggttgagtttgcaggactctaggcatgcatgaaagagcccccctggtgatgcccttggatgctgccaagtccatggtagttttcaattttgccatacttttgttcttcctaccggaccctggaatgtctttggatattgctaaaatctatttctgcagctgaggttttatccactggacacatttgtgtgtgagaactaggtcttgttgaggttagcgtaacctggtatatgcaactaccatcctctgggccaactgtggaagctgctgcacttgtgaagaatcctgagctttgattcctcttcagtctacgcatttctctcttcccctccctcaccccctttttcttataaaactaggttctttatacagataaggtcagtagagttccagaataaaagatatgacttttctgagttatttatgtacttaaaatatgttgtcacagtatttgttcccaaatatattaaaggtaaccaaaatgttaaaa

SEQ ID NO: 150188 - DNA, 2191 bp, Homo sapiens
  Payload ID: 9653
  Gene Symbol: KDM4D
  Gene Name: lysine (K)-specific demethylase 4D
  Uniprot ID: Q6B0I6
  ENST ID: ENST00000610872
  CDS Start-End: 201-1772
gctgctgcccagagtggaatctcactagtgaataaacaagcccaagaaagattatcatctcatttgcaaaaaaaaaagtacgctggtagatcctgctacctcatagataacaccagtcaaatttttttttaaagtagcattttcctacattgtcaactatctagaacatacctaaaaactaagagtttactgcttattaaatggaaactatgaagtctaaggccaactgtgcccagaatccaaattgtaacataatgatatttcatccaaccaaagaagagtttaatgattttgataaatatattgcttacatggaatcccaaggtgcacacagagctggcttggctaagataattccacccaaagaatggaaagccagagagacctatgataatatcagtgaaatcttaatagccactcccctccagcaggtggcctctgggcgggcaggggtgtttactcaataccataaaaaaaagaaagccatgactgtgggggagtatcgccatttggcaaacagtaaaaaatatcagactccaccacaccagaatttcgaagatttggagcgaaaatactggaagaaccgcatctataattcaccgatttatggtgctgacatcagtggctccttgtttgatgaaaacactaaacaatggaatcttgggcacctgggaacaattcaggacctgctggaaaaggaatgtggggttgtcatagaaggcgtcaatacaccctacttgtactttggcatgtggaaaaccacgtttgcttggcatacagaggacatggacctttacagcatcaactacctgcaccttggggagcccaaaacttggtatgtggtgcccccagaacatggccagcgcctggaacgcctggccagggagctcttcccaggcagttcccggggttgtggggccttcctgcggcacaaggtggccctcatctcgcctacagttctcaaggaaaatgggattcccttcaatcgcataactcaggaggctggagagttcatggtgacctttccctatggctaccatgctggcttcaaccatggtttcaactgcgcagaggccatcaattttgccactccgcgatggattgattatggcaaaatggcctcccagtgtagctgtggggaggcaagggtgaccttttccatggatgccttcgtgcgcatcctgcaacctgaacgctatgacctgtggaaacgtgggcaagaccgggcagttgtggaccacatggagcccagggtaccagccagccaagagctgagcacccagaaggaagtccagttacccaggagagcagcgctgggcctgagacaactcccttcccactgggcccggcattccccttggcctatggctgcccgcagtgggacacggtgccacacccttgtgtgctcttcactcccacgccgatctgcagttagtggcactgctacgcagccccgggctgctgctgtccacagctctaagaagcccagctcaactccatcatccacccctggtccatctgcacagattatccacccgtcaaatggcagacgtggtcgtggtcgccctcctcagaaactgagagctcaggagctgaccctccagactccagccaagaggcccctcttggcgggcacaacatgcacagcttcgggcccagaacctgagcccctacctgaggatggggctttgatggacaagcctgtaccactgagcccagggctccagcatcctgtcaaggcttctgggtgcagctgggcccctgtgccctaagtccacgggctgtctttatatcccactgccctgctgtgtgacagtttgatgaaactggttacatttacatcccaaaactttggttgagtttgcaggactctaggcatgcatgaaagagcccccctggtgatgcccttggatgctgccaagtccatggtagttttcaattttgccatacttttgttcttcctaccggaccctggaatgtctttggatattgctaaaatctatttctgcagctgaggttttatccactggacacatttgtgtgtgagaactaggtcttgttgaggttagcgtaacctggtatatgcaactaccatcctctgggccaactgtggaagctgctgcacttgtgaagaatcctgagctttgattcctcttcagtctacgcatttctctcttcccctccctcaccc

SEQ ID NO: 150189 - DNA, 2339 bp, Homo sapiens
  Payload ID: 9654
  Gene Symbol: KDM4E
  Gene Name: lysine (K)-specific demethylase 4E
  Uniprot ID: B2RXH2
  ENST ID: ENST00000450979
  CDS Start-End: 301-1821
ccaagcctgagaatcaggagaagcctcacagtgacacccccaactgaggaaactcacagagctgggacatactctacttcttcagaaaaaagtatactgactagagtggagtccccctggggagtcagaaagcctgtgaaagatctcacttgttcaaaagtccaagtgtgaattactgtctcacagataaaccaaagtattttgaaaaacaaaggggagaaaagaaattactccccagaactctcaggcatctagaggacacccaagaacgtgggagtcagctgcttcttgtgtgcagccatgaagtctgtgcactccagtccccagaacacgagtcataccatcatgacgttttacccaaccatggaagaatttgcagatttcaacacatatgttgcttacatggagtcccaaggcgcacatcaagctggccttgccaaggtaattccacccaaggaatggaaagccagacagatgtatgatgatatcgaagacatcttaatagccactcccctccagcaggtgacctctgggcagggaggtgtgtttactcaataccataaaaagaagaaagccatgagggtggggcagtatcgccgcttggcaaacagtaaaaaatatcagactccgccacaccagaattttgcagatttggagcaacgatactggaagagccaccccggtaatccaccaatttatggtgctgatatcagcggctccttatttgaagaaagcactaaacaatggaacctaggacacctgggaacaattctggacctgttggagcaggaatgtggggttgtcatcgagggtgtcaacacaccctacctgtactttggcatgtggaagaccacgtttgcctggcacacagaggacatggacctttacagcatcaactacctgcactttggggagcccaaaacttggtacgtggtgcccccagaacatggtcagcacctggaacgcctggccagggagctcttcccagacatttctcggggctgtgaggccttcctgcggcacaaagtggccctcatctcgcctacagttctcaaggaaaatgggattcccttcaattgcatgactcaggaggctggggagttcatggtgacctttccctatggctaccatgctggcttcaatcacggcttcaactgcgcagaagccattaattttgccactccacgatggattgattatggcaaaatggcctctcagtgtagctgtggggagtcgacagtgaccttttccatggacccctttgtgcgcattgtgcaacccgagagttatgagctctggaaacacaggcaagacttggccattgtggaacacacagagcccagggttgcagaaagccaagagctgagcaactggagagatgatatagtacttagaagagctgctctgggcctgaggcttctcccaaacctcacagcccagtgtcccacacagcctgtgtcctcagggcactgttacaacccaaaaggctgtggcactgatgctgtgcctggatccgcattccaaagctctgcatatcatacccagacccagtcacttaccctggggatgtcagccagggttcttctcccttccactggaagctggggttctggtcgtggtcgtggtcgtggtcaaggtcaaggtcgaggttgcagtcgtggtcgtggtcatggttgttgtactcgagaactggggactgaggagccaactgttcagcctgcatccaagaggcgccttttaatgggtacaaggagtagagctcaaggccacaggcctcagctcccgcttgccaatgatttgatgacaaatctgtccctttgagtggtggccttcagcatcttgccaaggcttctggctgctgctgtgtccctgatcttcaactcctggggcccccactggatcgtgatgaaaccatgcaccctggcctgtgcctgctatccctcaacagcactactagtaatctccctgatgttgtctgcatgactcctcccaatgtcattgtgcctttgattaagttttccagggacactggtggggactggaactgattaagttcaccagggacacttgcctggtgaacatgggcaaggctgtagcaatggaccacttttacggctctagggttctgactccaactaagttttccagaatctcctgggctcctgactcatctgctgggtctaaagacactgagtttagggatattttcctccaatacatgatcaatcctctggatccacggctatggaatatggtgacaaatgtcagtgtctctcttattccaaccccaggatcagagaagattctttacctgcagtaactgacacatttccaaggcc

SEQ ID NO: 150190 - DNA, 6444 bp, Homo sapiens
  Payload ID: 9655
  Gene Symbol: KDM5A
  Gene Name: lysine (K)-specific demethylase 5A
  ENST ID: ENST00000382815
  CDS Start-End: 156-5324
gaggaagcgattctggggtttctgtgttgaacggttcttgtccgcgaagatgcgcttcggcctctgtcaggggacttgaacgggcttagtgggcttcagccagcttttctccaccggttccccacggggacccccccccccccccggccgttgcaatggcgggcgtggggccggggggctacgcggcggagttcgtgccaccgccagagtgccccgtctttgagccgagttgggaggagttcacagatccgctcagctttatcggccgcatccggcctttggcggagaaaaccggcatctgcaaaattcggccgcccaaggactggcagcctccatttgcctgtgaagtaaaaagctttcgtttcactccaagagtccagcgcctgaatgaacttgaggcaatgaccagagtgagattggatttcttggatcaactagcaaaattttgggaacttcaaggatctactctgaagatccctgtggtagagagaaaaatcctggatctgtatgctttgagcaagattgttgccagcaaaggaggttttgaaatggtcaccaaagagaagaaatggtctaaagtgggtagtcgcttgggatatctgccaggaaaaggaactgggtctcttttgaagtcacattatgaaagaattctctacccatatgagcttttccagtctggtgtgagccttatgggtgtgcagatgcctaatttagatcttaaagaaaaagtggagcctgaggttctcagcactgatacccaaacttccccagagccaggcacaaggatgaacattctgccgaagagaacaagacgtgtgaagactcagtcagaatctggagatgtgagtagaaacacggaactgaagaaacttcagatttttggggctgggcccaaggttgtgggcttggcaatgggaacaaaagataaagaagatgaggtcacccgaagacgaaaagttaccaacaggtcagacgcatttaacatgcaaatgagacaacggaaaggcactctctctgttaactttgttgatctctatgtttgtatgttttgtggtcggggaaacaatgaagataaattgcttttgtgtgatggatgtgatgacagctatcatacattttgtctaattcctccactacctgatgtgcccaaaggagactggaggtgtcctaaatgtgtcgccgaggaatgtagcaaacctcgagaagcctttggatttgaacaagctgtacgagagtatacacttcagagctttggagagatggcagataattttaagtctgattattttaatatgccagtccatatggttcccacagaactagtagaaaaggaattttggcggctggtaagcagcattgaagaagatgttattgtggaatatggagcagatatctcctcaaaagactttggaagtggatttccggtgaaggatgggcggagaaagattctgccagaagaagaggaatatgcactttctggttggaatttgaataacatgcctgtcctggaacagtctgttcttgcacatattaatgtggacatctctggtatgaaagtgccgtggctctatgtgggaatgtgcttctcttctttttgctggcacattgaggatcactggagttattccatcaactacttgcactggggggagccaaagacatggtatggtgtgccatctcatgctgcagagcaactggaggaggtgatgagagagctggcccccgagttatttgaatcccagcctgatcttctgcatcagttagttaccatcatgaaccccaacgtgctaatggagcatggtgtgcctgtgtacaggaccaatcagtgtgctggcgagtttgttgtgacatttcctcgtgcctatcactctggatttaaccagggctacaactttgctgaagctgtgaacttctgtactgctgactggttgcccattggacgtcaatgtgtaaatcattaccgacgcctaaggcgccactgtgtcttttcacacgaggaactaattttcaagatggcagcagatccagaatgcttagatgtggggctggctgccatggtctgcaaagaattgactctcatgactgaagaagaaacacgattaagagagtctgttgtacagatgggtgtcctgatgtcagaagaagaagtgtttgaacttgttcctgatgatgagcggcagtgttcagcatgcagaaccacatgttttctctctgctctcacatgttcctgtaatcctgagcggcttgtatgtctctaccatccaactgatctgtgcccctgccccatgcagaagaaatgtcttagatatcgctacccattagaagacctcccttctctgctatatggtgtaaaagtcagggcacagtcctatgacacttgggtcagtcgtgttacagaagcattgtctgctaacttcaaccacaaaaaagatttgattgaattgcgagtaatgctggaagatgctgaggataggaaatacccagagaatgatctctttcgaaaactcagggatgctgtaaaagaagctgagacctgtgcttctgtggctcagctgcttctgagcaaaaagcagaaacacagacagagcccagatagtgggaggactcggaccaaactgacagtggaagaattgaaggcctttgtccaacaactttttagtcttccgtgtgtcatcagccaagctcggcaagtaaagaatctgctagatgatgtggaagagtttcatgaacgtgctcaggaggccatgatggatgaaaccccagattcttccaaactccagatgttgatagatatgggctctagtctctatgtggaactccctgaattaccacgactgaagcaagagctacaacaggctcggtggttggacgaagtaagactgaccttatcagatccgcaacaagtcactttggatgtcatgaagaagctgatagactctggggtagggttggcaccccaccatgctgtggagaaagcaatggctgaactacaggagctccttacagtctctgaacgatgggaagaaaaggctaaggtctgcctacaggcaagaccgaggcacagtgtggcaagtttagaaagcattgtgaatgaagccaagaacattccagcctttctacccaatgtgttgtccttgaaagaagccttacaaaaggctcgagaatggaccgctaaagtggaagctattcagagtggcagcaattacgcttatttggagcagcttgagagcttgtctgcgaaaggacgccctattcctgtgcgtcttgaagcactgccgcaagtggaatcacaggtagcagcagcacgggcatggagagaacggactgggcggacgtttcttaagaagaattctagccatacattgttacaggtgctgagcccccggaccgacattggtgtatatgggagtggcaaaaataggaggaaaaaagtaaaagaactaatagaaaaagaaaaagaaaaggatctggacctggagcctctgagtgatctggaggaaggattggaggaaaccagagatacagccatggtggtggcagttttcaaagaacgggagcaaaaagagattgaagccatgcattctctcagagcagccaacctagccaagatgacaatggtggaccgcatagaagaagtaaaattttgcatttgccgcaagacagccagtgggtttatgctacagtgtgagctctgcaaagactggttccataacagctgtgttcctcttcctaaatcaagttcccaaaaaaaaggatccagctggcaagctaaagaagtaaaattcctttgccctctttgtatgcggtctcgaaggcccaggctagagactattctgtcactcctggtatcccttcagaagttgcccgtacggttgcctgaaggagaggccctgcagtgtttgacagaacgtgctatgagttggcaagatagagcgcggcaggctctagccacagatgaactatcctctgccctggccaaactatctgtgttgagccagcgtatggtggaacaggcggctcgagaaaaaactgaaaagatcatcagtgcagaactccaaaaagcagctgccaatccagacttacagggacacttacctagtttccagcagtctgcttttaaccgggtggtgagcagtgtgtcatcttctcctcgacaaacaatggactatgatgatgaagaaacagactctgatgaagacattcgagagacatatggctacgacatgaaggacacagccagtgtgaagtcctctagtagtcttgaacccaatcttttttgtgatgaagagattcccatcaaatccgaggaggtggtgacccacatgtggacagcaccttcattttgtgcagagcatgcttattcttctgcttctaagagttgttctcaagtattttttgggaaaggttctagcaccccaaggaaacaacctcggaagagccctttggtgccccgaagtttggaacctccagtgctggagttgtcacctggagctaaggcacaactggaagaacttatgatggttggagatctcctggaagtatctctggacgagactcaacacatatggcggattttgcaggccacacacccaccctctgaagacagattcttgcatatcatggaggatgacagcatggaagagaaaccactaaaagtgaaaggaaaggactcttcagagaagaaacggaaacggaagctagaaaaggtagagcaactttttggagaaggaaaacagaagtccaaggagttaaagaaaatggacaaacctagaaagaagaaattaaaattaggtgcagacaaatcaaaggagctgaataaactggccaagaaactagcaaaagaagaagagagaaagaaaaagaaggagaaggctgctgcagccaaagttgaacttgtgaaagagagcactgaaaagaaaagagagaaaaaggtgctggacatcccctcaaagtatgactggtcaggagcagaggagtctgatgatgagaatgctgtgtgcgcagcacagaactgccaaaggccctgcaaggacaagggagttgtatttgtaacgaagaagagaagaataaaaaatattagttttaaaagtggcctatgtgactgcttttctaaaaaggtagactgggtacaatgtgatggtggctgtgatgagtggtttcatcaagtttgtgtgggtgtatctccagaaatggctgaaaatgaagattacatctgtataaactgtgcaaagaagcaggggccagttagcccaggtccagcaccacctccttccttcataatgagctacaaactaccaatggaggatcttaaagagaccagttagcagatgcttggttagtttgggacatggggggacatggaccacattgagaccttagtcatcaagtagagtggtttatatccacttggaatgttgcttccaaagatgaatggccttcagagaaagtccccttagtgctggcttcctctttgcatggactctgtgggttacattctctatcaacatatctatgcagagggtgtcttctttggtacaacagccaatatttcatgtctcctttgagtgtggtttactgcattaaggccagatgcttaattgagctctagggtggctggttagtattaatacattggtgtgctaacagggcatataggatgtggcttttgtccagctgatagtagttagaggcttacaacttaggagcagcaccaactgaaggtgctaattgcttggatctccttcattgggatagttggagagggattggagtaccactttccttccactgttacctggtacttaatgccctaaagatacaactaggagtaacagggccaaagttatttctgttagacgtcaaggaatggtatcacagtctattgacctcagcgatttgtgcttgtttgtgctagaagaacatcccaaataggagaacctctcacaagctggggcaggtcaccttatctttgtaagatgaggatatcatctagatcagaaatctgactagattggattctgaggagaagaacctactacaaggcaaggagccgttttttggctttgaaaagtcttgctgtcttgggtctacattttagggaagagcaggtacatggatccaggcttctgccaaaaaaaaaaagagaagaagatgacgatgatgaccagtcgtactatcttactgagccacagtgatgcatgcttttcggggaaaacttcattcacaagtattccagacaccaggcttcaggcatggccatgagcaagaccagcaaataacagctttttgccttgcagccctgaccccaatgtctgctgtttccaacactggtgatttctaactacggcccacagcagatgctgttgaataacaccatggcttcatcagaggatgtggggttgtagtacctctgggtgatgaagttgttttagtaaatccattttt

SEQ ID NO: 150191 - DNA, 10763 bp, Homo sapiens
  Payload ID: 9655
  Gene Symbol: KDM5A
  Gene Name: lysine (K)-specific demethylase 5A
  Uniprot ID: P29375
  ENST ID: ENST00000399788
  CDS Start-End: 364-5436
gcagaactttggcgggcaaggagacaaacagccacactgtgctgccggggaagagaagaagaaggaaaggccagacacacaggcgtcgtgcagctgcggaaggattccgtttcctgcagggggcggagggatttgacagcacggtaacttccggaaaagtcctgaacctcagtggaaaagccttgcaagaaacaataacaaacgggaggaggaagcgattctggggtttctgtgttgaacggttcttgtccgcgaagatgcgcttcggcctctgtcaggggacttgaacgggcttagtgggcttcagccagcttttctccaccggttccccacggggacccccccccccccccggccgttgcaatggcgggcgtggggccggggggctacgcggcggagttcgtgccaccgccagagtgccccgtctttgagccgagttgggaggagttcacagatccgctcagctttatcggccgcatccggcctttggcggagaaaaccggcatctgcaaaattcggccgcccaaggactggcagcctccatttgcctgtgaagtaaaaagctttcgtttcactccaagagtccagcgcctgaatgaacttgaggcaatgaccagagtgagattggatttcttggatcaactagcaaaattttgggaacttcaaggatctactctgaagatccctgtggtagagagaaaaatcctggatctgtatgctttgagcaagattgttgccagcaaaggaggttttgaaatggtcaccaaagagaagaaatggtctaaagtgggtagtcgcttgggatatctgccaggaaaaggaactgggtctcttttgaagtcacattatgaaagaattctctacccatatgagcttttccagtctggtgtgagccttatgggtgtgcagatgcctaatttagatcttaaagaaaaagtggagcctgaggttctcagcactgatacccaaacttccccagagccaggcacaaggatgaacattctgccgaagagaacaagacgtgtgaagactcagtcagaatctggagatgtgagtagaaacacggaactgaagaaacttcagatttttggggctgggcccaaggttgtgggcttggcaatgggaacaaaagataaagaagatgaggtcacccgaagacgaaaagttaccaacaggtcagacgcatttaacatgcaaatgagacaacggaaaggcactctctctgttaactttgttgatctctatgtttgtatgttttgtggtcggggaaacaatgaagataaattgcttttgtgtgatggatgtgatgacagctatcatacattttgtctaattcctccactacctgatgtgcccaaaggagactggaggtgtcctaaatgtgtcgccgaggaatgtagcaaacctcgagaagcctttggatttgaacaagctgtacgagagtatacacttcagagctttggagagatggcagataattttaagtctgattattttaatatgccagtccatatggttcccacagaactagtagaaaaggaattttggcggctggtaagcagcattgaagaagatgttattgtggaatatggagcagatatctcctcaaaagactttggaagtggatttccggtgaaggatgggcggagaaagattctgccagaagaagaggaatatgcactttctggttggaatttgaataacatgcctgtcctggaacagtctgttcttgcacatattaatgtggacatctctggtatgaaagtgccgtggctctatgtgggaatgtgcttctcttctttttgctggcacattgaggatcactggagttattccatcaactacttgcactggggggagccaaagacatggtatggtgtgccatctcatgctgcagagcaactggaggaggtgatgagagagctggcccccgagttatttgaatcccagcctgatcttctgcatcagttagttaccatcatgaaccccaacgtgctaatggagcatggtgtgcctgtgtacaggaccaatcagtgtgctggcgagtttgttgtgacatttcctcgtgcctatcactctggatttaaccagggctacaactttgctgaagctgtgaacttctgtactgctgactggttgcccattggacgtcaatgtgtaaatcattaccgacgcctaaggcgccactgtgtcttttcacacgaggaactaattttcaagatggcagcagatccagaatgcttagatgtggggctggctgccatggtctgcaaagaattgactctcatgactgaagaagaaacacgattaagagagtctgttgtacagatgggtgtcctgatgtcagaagaagaagtgtttgaacttgttcctgatgatgagcggcagtgttcagcatgcagaaccacatgttttctctctgctctcacatgttcctgtaatcctgagcggcttgtatgtctctaccatccaactgatctgtgcccctgccccatgcagaagaaatgtcttagatatcgctacccattagaagacctcccttctctgctatatggtgtaaaagtcagggcacagtcctatgacacttgggtcagtcgtgttacagaagcattgtctgctaacttcaaccacaaaaaagatttgattgaattgcgagtaatgctggaagatgctgaggataggaaatacccagagaatgatctctttcgaaaactcagggatgctgtaaaagaagctgagacctgtgcttctgtggctcagctgcttctgagcaaaaagcagaaacacagacagagcccagatagtgggaggactcggaccaaactgacagtggaagaattgaaggcctttgtccaacaactttttagtcttccgtgtgtcatcagccaagctcggcaagtaaagaatctgctagatgatgtggaagagtttcatgaacgtgctcaggaggccatgatggatgaaaccccagattcttccaaactccagatgttgatagatatgggctctagtctctatgtggaactccctgaattaccacgactgaagcaagagctacaacaggctcggtggttggacgaagtaagactgaccttatcagatccgcaacaagtcactttggatgtcatgaagaagctgatagactctggggtagggttggcaccccaccatgctgtggagaaagcaatggctgaactacaggagctccttacagtctctgaacgatgggaagaaaaggctaaggtctgcctacaggcaagaccgaggcacagtgtggcaagtttagaaagcattgtgaatgaagccaagaacattccagcctttctacccaatgtgttgtccttgaaagaagccttacaaaaggctcgagaatggaccgctaaagtggaagctattcagagtggcagcaattacgcttatttggagcagcttgagagcttgtctgcgaaaggacgccctattcctgtgcgtcttgaagcactgccgcaagtggaatcacaggtagcagcagcacgggcatggagagaacggactgggcggacgtttcttaagaagaattctagccatacattgttacaggtgctgagcccccggaccgacattggtgtatatgggagtggcaaaaataggaggaaaaaagtaaaagaactaatagaaaaagaaaaagaaaaggatctggacctggagcctctgagtgatctggaggaaggattggaggaaaccagagatacagccatggtggtggcagttttcaaagaacgggagcaaaaagagattgaagccatgcattctctcagagcagccaacctagccaagatgacaatggtggaccgcatagaagaagtaaaattttgcatttgccgcaagacagccagtgggtttatgctacagtgtgagctctgcaaagactggttccataacagctgtgttcctcttcctaaatcaagttcccaaaaaaaaggatccagctggcaagctaaagaagtaaaattcctttgccctctttgtatgcggtctcgaaggcccaggctagagactattctgtcactcctggtatcccttcagaagttgcccgtacggttgcctgaaggagaggccctgcagtgtttgacagaacgtgctatgagttggcaagatagagcgcggcaggctctagccacagatgaactatcctctgccctggccaaactatctgtgttgagccagcgtatggtggaacaggcggctcgagaaaaaactgaaaagatcatcagtgcagaactccaaaaagcagctgccaatccagacttacagggacacttacctagtttccagcagtctgcttttaaccgggtggtgagcagtgtgtcatcttctcctcgacaaacaatggactatgatgatgaagaaacagactctgatgaagacattcgagagacatatggctacgacatgaaggacacagccagtgtgaagtcctctagtagtcttgaacccaatcttttttgtgatgaagagattcccatcaaatccgaggaggtggtgacccacatgtggacagcaccttcattttgtgcagagcatgcttattcttctgcttctaagagttgttctcaaggttctagcaccccaaggaaacaacctcggaagagccctttggtgccccgaagtttggaacctccagtgctggagttgtcacctggagctaaggcacaactggaagaacttatgatggttggagatctcctggaagtatctctggacgagactcaacacatatggcggattttgcaggccacacacccaccctctgaagacagattcttgcatatcatggaggatgacagcatggaagagaaaccactaaaagtgaaaggaaaggactcttcagagaagaaacggaaacggaagctagaaaaggtagagcaactttttggagaaggaaaacagaagtccaaggagttaaagaaaatggacaaacctagaaagaagaaattaaaattaggtgcagacaaatcaaaggagctgaataaactggccaagaaactagcaaaagaagaagagagaaagaaaaagaaggagaaggctgctgcagccaaagttgaacttgtgaaagagagcactgaaaagaaaagagagaaaaaggtgctggacatcccctcaaagtatgactggtcaggagcagaggagtctgatgatgagaatgctgtgtgcgcagcacagaactgccaaaggccctgcaaggacaaggtagactgggtacaatgtgatggtggctgtgatgagtggtttcatcaagtttgtgtgggtgtatctccagaaatggctgaaaatgaagattacatctgtataaactgtgcaaagaagcaggggccagttagcccaggtccagcaccacctccttccttcataatgagctacaaactaccaatggaggatcttaaagagaccagttagcagatgcttggttagtttgggacatggggggacatggaccacattgagaccttagtcatcaagtagagtggtttatatccacttggaatgttgcttccaaagatgaatggccttcagagaaagtccccttagtgctggcttcctctttgcatggactctgtgggttacattctctatcaacatatctatgcagagggtgtcttctttggtacaacagccaatatttcatgtctcctttgagtgtggtttactgcattaaggccagatgcttaattgagctctagggtggctggttagtattaatacattggtgtgctaacagggcatataggatgtggcttttgtccagctgatagtagttagaggcttacaacttaggagcagcaccaactgaaggtgctaattgcttggatctccttcattgggatagttggagagggattggagtaccactttccttccactgttacctggtacttaatgccctaaagatacaactaggagtaacagggccaaagttatttctgttagacgtcaaggaatggtatcacagtctattgacctcagcgatttgtgcttgtttgtgctagaagaacatcccaaataggagaacctctcacaagctggggcaggtcaccttatctttgtaagatgaggatatcatctagatcagaaatctgactagattggattctgaggagaagaacctactacaaggcaaggagccgttttttggctttgaaaagtcttgctgtcttgggtctacattttagggaagagcaggtacatggatccaggcttctgccaaaaaaaaaaagagaagaagatgacgatgatgaccagtcgtactatcttactgagccacagtgatgcatgcttttcggggaaaacttcattcacaagtattccagacaccaggcttcaggcatggccatgagcaagaccagcaaataacagctttttgccttgcagccctgaccccaatgtctgctgtttccaacactggtgatttctaactacggcccacagcagatgctgttgaataacaccatggcttcatcagaggatgtggggttgtagtacctctgggtgatgaagttgttttagtaaatccatttttaaaaaaaaaaaaggacttgtttttacttttttctaaatgtctctgactactgactgttctatacatagattatttttccttttttaatatacatatatgaatatataaatatatatatttactgttaccagcagcatatgacagagtttcaacatcaaaaatccatttgggggcttgctttttcttttttgctttaaaaaaaaaaatcccattccttctttgtagtacaaggagttagcactccctcctccatcccagcctgaccagatcttccattttgcttttgttcatatagataattatatgtcctttgtgtgttgggacttgtccctgtctgttgggaaacttggtctcactctagtctgtgctggctcttttttcttttgtgtgtgaatgtttgaaactatggtgctgtgtcctcttccctcctgttgtgttctctgttcttcttaaggtattaggtaagctgtatgtaaactcttattagaaggggactaatttttttttaaaggacaaaaaaaaaaatgactaaaaatagtgttttgtcatcactgtctggtgtctttattttggtttaaaaaaatctgtggtttgacttaaattcatcagttttccttttaaaggggggattggggtggacctagcaacagcttatagtttcctcttccctttttgccccagtctcttttaaagaactgtcttctagtaactagaagtgaaatgtactgtccagttacagtttgagtgggtatgagatttaactcaaaaggaatcttacaaaaaaaaagatgttttcttataaaatccaatttctgtaaatgttttctctgaagttcatactacctactttttattcattcttaatactgtataacattttgagtgttttgacttgttcagaggtttgttagtgttgctgtgcatatgtcttgaggtctcatctgaagtaagtttgtgtatgatcgaagatttcaatggatattgcaaggtaactaattaactgatttcataagttttcgttttgccaagctaacgattatcaattaagaatttcctctggttgatgttatacaagaaagcacaatattttttgcctgttgatcttctttgtaacagtcttcagatatttgtgggttaaaaattgaatgtaattttaagtgacagatgcctggaatacatttaaaatttttatttttccttcctaatcatccattaactattccactatcagtggagagtcatgaggatgctgagaaagtatgaatagcttcctgtcaccttctgacgttttgaaacttaaatatgtcttttcgttgatactgtgggattttctgtatttacttgacagtcatggaggatttggtatgacttgaccacaggtttagaccaaggctgagaagaacagaagggagaaattaatggcaaaacaaaaaatacacaaatctgcggttttggaattaatgaaacaagattcatctatttaaagaaatgttggtgttctaatacaaagcattattttcacttagagaaaattacttacttgctcccttctgtattgtaatattttgtattaagacatgatttaaaatgtctttctacccttatctcctctaaactgcaactgaagttgcaattcttcatcattagtattttaactctggcaaaggttatagaaagaaaaatggaaatatggtaggcctgtggtattcttaaaagctaagtcattagaactatgcagatccccaagtttaaaagtacaaatacagcaccagtagttagctttctagctgggggagaagacaggagatttttcttccacagatgtttattttgcttcctgataggtactgcagcaaagccatgttgatgtgtagatgcatgacttcctcactaagctgctgcacaccagctttgcctgcatgattcaaatttgtgcctcagtaaaattataaattattgcatgtcataccttgaataatggaaacggcaaacattaaacctgtgattacccataatgtactttaataataaaaaacatggcagccaggtgcagtagagtgcacctgtggtcaggaggctgaagtgggaagattgcttcaacctgtgagtttgagtcccgcctggtcaacagcgagaccccatgtgtctgtctgtctctctctttttttaaaggacagaggctaagctgtaaggttagcatggttctgcctgggctttgcttctgtgcttctgtgcaggctgagctgtaaggttagcatggttctgcctgggctttgcttctgcgcttctgtgcaggctgagctgtaaggttagcatggttctgcctgggctttgcttctgcgcttctgtgcaggctgagctgtaaggttagcatggttctgcctgggctttgcttctgcgcttctgtgctagcaggtgcccacaaaatgtctttttgaatttcttaatttttgggttctggatgcaattcgtgcacgccaagaaactacttgcttgtcagtattttaattctgtagtacatgtgtgtgaatatcagccagtacttacagtaggaggatgaacagaaaaactgagaagacctgtctttcaaaagatgggtttatccactttttaagggaaaaagtgacagtttggcatgggatttgaaaagtggaaattgtggaaaaattgagctgttgaagtcccacatataaccagatttaataaagcttcacatgtgaattagctccatatgtgtgtagaaggttgcttttatagcaggtccttaagtactccttttgaaattcctcctttttttttaagtcataccattacttctttggatatgaatgtcccaagtggtatctcctactgtagtatgaggaagaatggctgttaatgtattttttgaattttggtcttgtcttggcctggatcatatccagtcaccactatgcaacaaatgatgtgcactgggcaaggatatgatgggttatgaaagctgtatcttgtttgttttttcttttgcagtactccaagtggtctaaacaggaatgtcttgtaaaacctcaagactccctattgattattcccttacatatttatttacaatttatcagggtaattggtggtgccttatgaaaagtataactcgatttcttgatctttgagcatgttttgtgtttcttgtgttttctaaaagaatattagatatggttaattgcattacatctaaaagatttaaaaaattgtgtgtatgctcaggttccccacacccatacccaccctaacccctgtcatttacattggtggcaactttaaatggtaaccaagcaaaagtacattttgataatgagtattgataatcctgaggaaaactagtgagtatatgggagccacctttgacctgtgccaaagcagtttctaatttcatttgctaactataaaataaagaactgagccaaaataatttgatcagtggtgtgattagcctattatcattgctgagaatagtgtttttggagtgtgaagtgattcctgaagatttcacctgccttctgtttccagcaagaatccagtgatgaccaacacatttcctcacttttggttcttgagaagtttatccctttgcaacaaaccattaatagggaaaacaaggaaatgctttccctttctctttggcttcttaaagctcacaaccaattcagaccccaagttacttcagagaagcaaatggcaccttttccccattgccaaggatcccagcttatgcagatatgaaggacggatcatttctgaaaatgttaagactctgcttgcagtggacttggcctcagtttcatgaaatgtgtaactctgtatgtgtatgttaggaggagggttggttgaaagagcgggggcagggaggggaatctgattacctcttgggaaataattttcttgccaacaaaaagatacacttgaagtttcttaaggtggcaagtccattaaaaaaaaaaattgtgttggaccctcccagtttagatcaagtatttcttgggggtcttgctattgtggttgataccaataaatggaagatccagaatattttcatttaaagctcaaccattaattggaacatggtgaaacattgtacacattgtaaaagtagggaacagtacaaaagaatggaatcaaatactatattatgtgaataaactagagtgattttggaatttcactctcttca

SEQ ID NO: 150192 - DNA, 558 bp, Homo sapiens
  Payload ID: 9655
  Gene Symbol: KDM5A
  Gene Name: lysine (K)-specific demethylase 5A
  ENST ID: ENST00000536014
  CDS Start-End: 191-558
ctcatctcagggctagggtttctgaaaaggttatctgagctctagtctcaccggatggtattactagacaagaactccagactaattattgccgcagtgaaaaagtcttagcggggaaagagaaggagcagcaataattctaaaatttagaggtttaggaaaaattggtttatagtggaggtggaaggaaatgttgaaatctcttgacgtagggaactcaagatcaacgattttagaatcacagttattgcagataactaggtttgcctataaggttaattataatctcacctttgaggactggcagcctccatttgcctgtgaagtaaaaagctttcgtttcactccaagagtccagcgcctgaatgaacttgaggcaatgaccagagtgagattggatttcttggatcaactagcaaaattttgggaacttcaaggatctactctgaagatccctgtggtagagagaaaaatcctggatctgtatgctttgagcaagattgttgccagcaaaggaggttttgaaatggtcaccaaagagaagaaatggtctaaagt

SEQ ID NO: 150193 - DNA, 2338 bp, Homo sapiens
  Payload ID: 9655
  Gene Symbol: KDM5A
  Gene Name: lysine (K)-specific demethylase 5A
  ENST ID: ENST00000544760
  CDS Start-End: 192-2338
tggaaaagccttgcaagaaacaataacaaacgggaggaggaagcgattctggggtttctgtgttgaacggttcttgtccgcgaagatgcgcttcggcctctgtcaggggacttgaacgggcttagtgggcttcagccagcttttctccaccggttccccacggggacccccccccccccccggccgttgcaatggcgggcgtggggccggggggctacgcggcggagttcgtgccaccgccagagtgccccgtctttgagccgagttgggaggagttcacagatccgctcagctttatcggccgcatccggcctttggcggagaaaaccggcatctgcaaaattcggccgcccaaggaatatgcactttctggttggaatttgaataacatgcctgtcctggaacagtctgttcttgcacatattaatgtggacatctctggtatgaaagtgccgtggctctatgtgggaatgtgcttctcttctttttgctggcacattgaggatcactggagttattccatcaactacttgcactggggggagccaaagacatggtatggtgtgccatctcatgctgcagagcaactggaggaggtgatgagagagctggcccccgagttatttgaatcccagcctgatcttctgcatcagttagttaccatcatgaaccccaacgtgctaatggagcatggtgtgcctgtgtacaggaccaatcagtgtgctggcgagtttgttgtgacatttcctcgtgcctatcactctggatttaaccagggctacaactttgctgaagctgtgaacttctgtactgctgactggttgcccattggacgtcaatgtgtaaatcattaccgacgcctaaggcgccactgtgtcttttcacacgaggaactaattttcaagatggcagcagatccagaatgcttagatgtggggctggctgccatggtctgcaaagaattgactctcatgactgaagaagaaacacgattaagagagtctgttgtacagatgggtgtcctgatgtcagaagaagaagtgtttgaacttgttcctgatgatgagcggcagtgttcagcatgcagaaccacatgttttctctctgctctcacatgttcctgtaatcctgagcggcttgtatgtctctaccatccaactgatctgtgcccctgccccatgcagaagaaatgtcttagatatcgctacccattagaagacctcccttctctgctatatggtgtaaaagtcagggcacagtcctatgacacttgggtcagtcgtgttacagaagcattgtctgctaacttcaaccacaaaaaagatttgattgaattgcgagtaatgctggaagatgctgaggataggaaatacccagagaatgatctctttcgaaaactcagggatgctgtaaaagaagctgagacctgtgcttctgtggctcagctgcttctgagcaaaaagcagaaacacagacagagcccagatagtgggaggactcggaccaaactgacagtggaagaattgaaggcctttgtccaacaactttttagtcttccgtgtgtcatcagccaagctcggcaagtaaagaatctgctagatgatgtggaagagtttcatgaacgtgctcaggaggccatgatggatgaaaccccagattcttccaaactccagatgttgatagatatgggctctagtctctatgtggaactccctgaattaccacgactgaagcaagagctacaacaggctcggtggttggacgaagtaagactgaccttatcagatccgcaacaagtcactttggatgtcatgaagaagctgatagactctggggtagggttggcaccccaccatgctgtggagaaagcaatggctgaactacaggagctccttacagtctctgaacgatgggaagaaaaggctaaggtctgcctacaggcaagaccgaggcacagtgtggcaagtttagaaagcattgtgaatgaagccaagaacattccagcctttctacccaatgtgttgtccttgaaagaagccttacaaaaggctcgagaatggaccgctaaagtggaagctattcagagtggcagcaattacgcttatttggagcagcttgagagcttgtctgcgaaaggacgccctattcctgtgcgtcttgaagcactgccgcaagtggaatcacaggtagcagcagcacgggcatggagagaacggactgggcggacgtttcttaagaagaattctagccatacattgttacaggtgctgagcccccggaccgacattggtgtatatgggagtggcaaaaataggaggaaaaaagtaaaagaactaat

SEQ ID NO: 150194 - DNA, 551 bp, Homo sapiens
  Payload ID: 9655
  Gene Symbol: KDM5A
  Gene Name: lysine (K)-specific demethylase 5A
  ENST ID: ENST00000535014
  CDS Start-End: 174-551
aacaataacaaacgggaggaggaagcgattctggggtttctgtgttgaacggttcttgtccgcgaagatgcgcttcggcctctgtcaggggacttgaacgggcttagtgggcttcagccagcttttctccaccggttccccacggggacccccccccccccccggccgttgcaatggcgggcgtggggccggggggctacgcggcggagttcgtgccaccgccagagtgccccgtctttgagccgagttgggaggagttcacagatccgctcagctttatcggccgcatccggcctttggcggagaaaaccggcatctgcaaaattcggccgcccaaggactggcagcctccatttgcctgtgaagtaaaaagctttcgtttcactccaagagtccagcgcctgaatgaacttgagattgttgccagcaaaggaggttttgaaatggtcaccaaagagaagaaatggtctaaagtgggtagtcgcttgggatatctgccaggaaaaggaactgggtctcttttgaagtcacattatgaaagaattctctac

SEQ ID NO: 150195 - DNA, 575 bp, Homo sapiens
  Payload ID: 9655
  Gene Symbol: KDM5A
  Gene Name: lysine (K)-specific demethylase 5A
  ENST ID: ENST00000543507
  CDS Start-End: 183-575
cttgcaagaaacaataacaaacgggaggaggaagcgattctggggtttctgtgttgaacggttcttgtccgcgaagatgcgcttcggcctctgtcaggggacttgaacgggcttagtgggcttcagccagcttttctccaccggttccccacggggacccccccccccccccggccgttgcaatggcgggcgtggggccggggggctacgcggcggagttcgtgccaccgccagagtgccccgtctttgagccgagttgggaggagttcacagatccgctcagctttatcggccgcatccggcctttggcggagaaaaccggcatctgcaaaattcggccgcccaagttttggcagatttcttcagtttccaaggactggcagcctccatttgcctgtgaagtaaaaagctttcgtttcactccaagagtccagcgcctgaatgaacttgaggcaatgaccagagtgagattggatttcttggatcaactagcaaaattttgggaacttcaaggatctactctgaagatccctgtggtagagagaaaaatcctggatctgtatgctttgagcaag

SEQ ID NO: 150196 - DNA, 4418 bp, Homo sapiens
  Payload ID: 9656
  Gene Symbol: KDM5B
  Gene Name: lysine (K)-specific demethylase 5B
  ENST ID: ENST00000235790
  CDS Start-End: 594-4418
acactcccggcttcttctggctcagccgctcggctccccggggaggcctgggctgtgctggtggggatggggtccgggcgaggccgtgtttgtaggggaacgtcagacggagagacctccgaagatttcgtgctcgtttcccccggccctcaggctccgggcactgaaaggcagtcacccaccgcagcccttccagccctgtctacagcgcctcgggcctgggggcagtgagtgaggggtgggtgttgctgaaaccatccgtaacggctccaacgttcgctgaggagagcccggccaactccttcctccgtggccggaactgggattggcagccaccatttgcatgtgatgttgataaacttcattttacgccacgtatccagagactgaatgaattggaggcccaaactcgtgtaaaattgaatttcttggaccagattgcaaagtactgggagttacagggaagtactctgaaaattccacatgtggagaggaagatcttggacttatttcagcttaataagttagttgcagaagaaggtggatttgcagttgtttgcaaggatagaaaatggaccaaaattgctaccaagatggggtttgctcctggcaaagcagtgggctcacatatcagagggcattatgaacgaattctcaacccctacaacttattcctgtccggagacagcctaaggtgtttgcagaagccaaacctgaccacagacactaaggacaaggagtacaaaccccatgatattccccagaggcagtctgtgcagccttcggaaacgtgccccccagcccgacgagcaaaacgcatgagagcagaggccatgaatattaaaatagaacccgaggagacaacggaagccagaactcataatctgagacgtcgaatgggttgtccaactccaaaatgtgaaaatgagaaagaaatgaagagtagcatcaagcaagaacctattgagaggaaagattatattgtagaaaatgagaaggaaaagcccaagagtcgatctaaaaaagccaccaatgctgtggacctgtatgtctgtcttttatgtggcagtggcaatgatgaagaccggctactgttgtgtgatggctgtgatgacagttaccataccttttgcttgatcccacctctccatgatgttcccaagggagactggaggtgtcctaagtgtttggctcaggaatgtagtaagccacaagaagcatttggctttgaacaagcagccagggactataccctccgtacttttggggaaatggcagatgcgttcaaatctgattacttcaacatgccagtccatatggtccccacagagcttgttgagaaagaattttggagactagtaagcactattgaggaggatgtcacagtggaatatggagctgacattgcctcaaaggaatttggcagtggctttcctgtccgagatgggaaaatcaaactctcacctgaggaagaggagtatcttgatagtggctggaatttgaacaacatgccagtgatggagcagtctgtccttgcacatattactgctgatatatgtggcatgaaacttccttggttgtatgtgggaatgtgcttttcttcattctgttggcacattgaagaccactggagctattcaattaactacttgcactggggtgagccaaaaacctggtatggagtcccagggtatgctgctgagcagctagaaaatgtaatgaagaaactagctccagaactctttgtgtcccagccggatctcctccatcagcttgtgaccatcatgaaccccaataccctgatgactcatgaagtgcctgtttaccgaactaatcagtgtgctggggagtttgtgattacatttccaagagcctaccacagtggttttaaccagggttttaattttgctgaggctgttaacttctgcactgttgattggctgccattaggccgacagtgtgtggagcattatcgcttgcttcatcgatattgtgtgttttcccacgatgagatgatctgcaagatggcttccaaggctgatgtattagatgttgtagtggcttcaactgttcagaaagacatggccattatgattgaggatgagaaagctttaagagaaactgtccgtaaattgggagtgattgattcggaaagaatggattttgagctgttgccagatgatgaacgtcagtgtgtaaaatgcaaaactacatgcttcatgtctgccatctcctgttcttgtaaacctggccttcttgtttgcctgcatcatgtaaaagaattgtgttcctgtcctccttacaaatataaattgcggtataggtacacgctggatgatctctaccctatgatgaatgcattgaagcttcgagcagaatcttacaacgaatgggccttgaatgtgaatgaagctttggaggcaaagatcaacaagaagaaaagccttgtcagcttcaaggctttaattgaagaatctgaaatgaagaaattcccagacaatgatcttttgcgacaccttcgcctagtcacacaggatgcagagaagtgtgcctctgttgcgcagcagttgcttaatggcaaaaggcaaactagatatcgatctggtggagggaaatcccaaaatcagttgacagtgaatgagctccggcagtttgtaacacagctgtatgctcttccatgtgtcctcagtcagacaccattactaaaggatctcttgaatcgtgtagaagattttcaacagcatagtcagaaactactctctgaggaaacgcctagtgctgcggagctgcaggacttgctagatgtcagctttgaatttgatgttgaacttccacagcttgctgagatgcgtatccgtttggaacaagcccgttggctagaagaggtgcagcaagcttgcctagaccccagctcccttactttagatgatatgagacgtctcatagacctaggggtagggctggccccgtattcagcagtggagaaagctatggcccggctgcaggaactgctcacagtgtcagagcactgggacgacaaagccaagagtctcctcaaggccaggccacgacattcattgaatagccttgctacggcagtaaaggaaatcgaagagatccctgcatatctgcccaatggtgcggctctgaaagactcagtgcagagagccagagactggcttcaggatgtagagggcctgcaggctggaggacgtgtgccagtgttagacacactcatagaacttgttacacgaggccgatctatccccgtacatctgaattctttgccaagactggaaaccctagtagctgaggttcaggcttggaaagaatgtgctgttaatacattcttgactgagaattctccatattctctcttagaggtgctgtgtcctcgatgtgatattggccttttgggattgaaaaggaagcagagaaagttaaaggagcccttgccaaatggaaagaaaaaaagcaccaaattagagagtctgagtgacctggagagagctttaactgaaagcaaggagactgcttcagctatggcaactcttggggaagctcgcctaagggaaatggaagccttgcagtctctcagactcgccaatgaagggaaattgctgtcgcctctccaagatgtggatataaaaatctgcctatgtcagaaggccccagctgcccctatgattcaatgtgaactctgcagggatgctttccacaccagttgtgtggcggtacccagtatttcacagggcctgcgaatctggctttgtccccattgtcggaggtcagagaaacctccattagagaaaattctgcccctgctcgcctcccttcagcgtatccgagttcgccttcctgagggagatgcacttcgatatatgattgaaagaaccgtgaactggcagcacagagcccagcaactgctttcgtcagggaatcttaaatttgtgcaagatcgagtgggctcaggactgttatatagcagatggcaagcctcagcaggacaggtgtcagacacaaacaaggtatctcaacctcctggcacaacatcattttctttgcctgatgactgggacaacagaacctcatatttgcactcccccttctcaactggacgaagttgtatccccctccatggtgttagtccagaagtgaatgaactattgatggaagcccagctgctccaggtatcccttcctgaaattcaggaactttaccagactttacttgcaaagccaagccctgctcagcagactgaccgaagctcaccagtgagacccagcagtgagaagaatgactgttgccgagggaagcgagatggaattaacagtcttgagagaaaactgaagagacgcctggaaagagagggcctctccagtgagcggtgggaacgagttaagaaaatgcggaccccc

SEQ ID NO: 150197 - DNA, 6449 bp, Homo sapiens
  Payload ID: 9656
  Gene Symbol: KDM5B
  Gene Name: lysine (K)-specific demethylase 5B
  Uniprot ID: Q9UGL1
  ENST ID: ENST00000367264
  CDS Start-End: 114-4856
caactcggacttgctgttgctcgagccgcgtctgcacgggtctcggaccgagcggagctcgcagcctcggtcccggagcccaccttcgcctcgcccttgcccagcctgcggtgatggaggcggccaccacactgcacccaggcccgcgcccggcgctgcccctcgggggcccgggcccgctgggcgagttcctgcctccacccgagtgcccggtcttcgaacccagctgggaagagttcgcggaccccttcgctttcatccacaagatccggcccatagccgagcagactggcatctgtaaggtgcggccgccgccggattggcagccaccatttgcatgtgatgttgataaacttcattttacgccacgtatccagagactgaatgaattggaggcccaaactcgtgtaaaattgaatttcttggaccagattgcaaagtactgggagttacagggaagtactctgaaaattccacatgtggagaggaagatcttggacttatttcagcttaataagttagttgcagaagaaggtggatttgcagttgtttgcaaggatagaaaatggaccaaaattgctaccaagatggggtttgctcctggcaaagcagtgggctcacatatcagagggcattatgaacgaattctcaacccctacaacttattcctgtccggagacagcctaaggtgtttgcagaagccaaacctgaccacagacactaaggacaaggagtacaaaccccatgatattccccagaggcagtctgtgcagccttcggaaacgtgccccccagcccgacgagcaaaacgcatgagagcagagagacagagtctcgctgtgttgcccaggctggagtgcagtggcgcgatcttggctcactgcaacctccgcctcctagattccagcaattcttctgcctcagcctcccaagccatgaatattaaaatagaacccgaggagacaacggaagccagaactcataatctgagacgtcgaatgggttgtccaactccaaaatgtgaaaatgagaaagaaatgaagagtagcatcaagcaagaacctattgagaggaaagattatattgtagaaaatgagaaggaaaagcccaagagtcgatctaaaaaagccaccaatgctgtggacctgtatgtctgtcttttatgtggcagtggcaatgatgaagaccggctactgttgtgtgatggctgtgatgacagttaccataccttttgcttgatcccacctctccatgatgttcccaagggagactggaggtgtcctaagtgtttggctcaggaatgtagtaagccacaagaagcatttggctttgaacaagcagccagggactataccctccgtacttttggggaaatggcagatgcgttcaaatctgattacttcaacatgccagtccatatggtccccacagagcttgttgagaaagaattttggagactagtaagcactattgaggaggatgtcacagtggaatatggagctgacattgcctcaaaggaatttggcagtggctttcctgtccgagatgggaaaatcaaactctcacctgaggaagaggagtatcttgatagtggctggaatttgaacaacatgccagtgatggagcagtctgtccttgcacatattactgctgatatatgtggcatgaaacttccttggttgtatgtgggaatgtgcttttcttcattctgttggcacattgaagaccactggagctattcaattaactacttgcactggggtgagccaaaaacctggtatggagtcccagggtatgctgctgagcagctagaaaatgtaatgaagaaactagctccagaactctttgtgtcccagccggatctcctccatcagcttgtgaccatcatgaaccccaataccctgatgactcatgaagtgcctgtttaccgaactaatcagtgtgctggggagtttgtgattacatttccaagagcctaccacagtggttttaaccagggttttaattttgctgaggctgttaacttctgcactgttgattggctgccattaggccgacagtgtgtggagcattatcgcttgcttcatcgatattgtgtgttttcccacgatgagatgatctgcaagatggcttccaaggctgatgtattagatgttgtagtggcttcaactgttcagaaagacatggccattatgattgaggatgagaaagctttaagagaaactgtccgtaaattgggagtgattgattcggaaagaatggattttgagctgttgccagatgatgaacgtcagtgtgtaaaatgcaaaactacatgcttcatgtctgccatctcctgttcttgtaaacctggccttcttgtttgcctgcatcatgtaaaagaattgtgttcctgtcctccttacaaatataaattgcggtataggtacacgctggatgatctctaccctatgatgaatgcattgaagcttcgagcagaatcttacaacgaatgggccttgaatgtgaatgaagctttggaggcaaagatcaacaagaagaaaagccttgtcagcttcaaggctttaattgaagaatctgaaatgaagaaattcccagacaatgatcttttgcgacaccttcgcctagtcacacaggatgcagagaagtgtgcctctgttgcgcagcagttgcttaatggcaaaaggcaaactagatatcgatctggtggagggaaatcccaaaatcagttgacagtgaatgagctccggcagtttgtaacacagctgtatgctcttccatgtgtcctcagtcagacaccattactaaaggatctcttgaatcgtgtagaagattttcaacagcatagtcagaaactactctctgaggaaacgcctagtgctgcggagctgcaggacttgctagatgtcagctttgaatttgatgttgaacttccacagcttgctgagatgcgtatccgtttggaacaagcccgttggctagaagaggtgcagcaagcttgcctagaccccagctcccttactttagatgatatgagacgtctcatagacctaggggtagggctggccccgtattcagcagtggagaaagctatggcccggctgcaggaactgctcacagtgtcagagcactgggacgacaaagccaagagtctcctcaaggccaggccacgacattcattgaatagccttgctacggcagtaaaggaaatcgaagagatccctgcatatctgcccaatggtgcggctctgaaagactcagtgcagagagccagagactggcttcaggatgtagagggcctgcaggctggaggacgtgtgccagtgttagacacactcatagaacttgttacacgaggccgatctatccccgtacatctgaattctttgccaagactggaaaccctagtagctgaggttcaggcttggaaagaatgtgctgttaatacattcttgactgagaattctccatattctctcttagaggtgctgtgtcctcgatgtgatattggccttttgggattgaaaaggaagcagagaaagttaaaggagcccttgccaaatggaaagaaaaaaagcaccaaattagagagtctgagtgacctggagagagctttaactgaaagcaaggagactgcttcagctatggcaactcttggggaagctcgcctaagggaaatggaagccttgcagtctctcagactcgccaatgaagggaaattgctgtcgcctctccaagatgtggatataaaaatctgcctatgtcagaaggccccagctgcccctatgattcaatgtgaactctgcagggatgctttccacaccagttgtgtggcggtacccagtatttcacagggcctgcgaatctggctttgtccccattgtcggaggtcagagaaacctccattagagaaaattctgcccctgctcgcctcccttcagcgtatccgagttcgccttcctgagggagatgcacttcgatatatgattgaaagaaccgtgaactggcagcacagagcccagcaactgctttcgtcagggaatcttaaatttgtgcaagatcgagtgggctcaggactgttatatagcagatggcaagcctcagcaggacaggtgtcagacacaaacaaggtatctcaacctcctggcacaacatcattttctttgcctgatgactgggacaacagaacctcatatttgcactcccccttctcaactggacgaagttgtatccccctccatggtgttagtccagaagtgaatgaactattgatggaagcccagctgctccaggtatcccttcctgaaattcaggaactttaccagactttacttgcaaagccaagccctgctcagcagactgaccgaagctcaccagtgagacccagcagtgagaagaatgactgttgccgagggaagcgagatggaattaacagtcttgagagaaaactgaagagacgcctggaaagagagggcctctccagtgagcggtgggaacgagttaagaaaatgcggacccccaaaaagaagaaaatcaaactgagccaccccaaggacatgaacaatttcaagttagagagagagcgtagctatgaattagttcgttctgctgaaactcattccctgccctcagacacatcctattccgaacaggaagactctgaggatgaagatgccatctgcccagctgtgagctgcctgcagccagaaggagatgaggtggactgggtccagtgtgatggcagctgcaatcagtggtttcatcaggtctgtgttggtgtctccccagagatggcagagaaagaagactacatctgtgtgcgctgtactgtgaaggacgcaccaagccgaaagtaaaaacacaaaaacagatacccccctacttaatgtaattcaggactccaaccaagaggatttcttcaaatctcagcaaagctacaggactggtactcaagccagcctgtaaacggtgctatttctattccttatgggatcatttttccaggactctttgaagaaaagaaaaaacaactaaaaaaatttttgacactttttgtattttttccttaagagctatttgtggttgttgaggtttgaaaagctgactgttttttttgcaggggttcccaccaatttggaaggcattgaagcttgcaccttttcatgtacagcattaaaattttacctctctctgggatttaccagcttaagagtccaactcacttccagtgcccaaaagggcacccaccagaaattccagtaaatcctcatttgaggaagctctcccttgtttactctgttaccacattggggaaatttttaagtttttcactttgggagtttttgtttgtttcttcttttcctttatccacttttcttcttcctggtagactaggtttatttatctgagcaataacttctatgttggtttcagtggctggaattaaaacaaaacaaaacaaacttccaaacagtgtgttggtgctttagcgattgattgatgtacagaacacaaatgtctagtttctagtgtcactgatgaactagtgatgtagaaaagagacttctctgtaagtaattgccacagctgtattttggctttctccctgtcccttcctttctcccctattttttggtagcttgtatcaaatgttacagtttatattgtggaataaatccttcgtcctaacataacactaaatgctgattatttagagccattagagcacagcttcttctgcccctctactgttgcacagccagaaggggctgcttgcttttgcctctgcccaaccaggttgcagtagcagtggatgttagcctgcaaacaacattaggggattcttcttttgtgtcctgctctgtttggtgggccatatgcctacagccctcactaacaaagaacccctctgtcttcaaggactagaacctatctttaaagccgtgctcttttaaaataagctttctcagaatgttggcaaatcacttcaatcctcaaatcagtcttccttgtggaatgctgcctttattatatttgaattgacaggggaacttggtttagggttaagacgttggaaggaaatctaaggaaaattaatcctcacagaggtccgggtttagtatatgtcttgagaggagacttgtgaattcccagactctgcctcctggtttcctttctcatttctttctaactgtagctatcattactggctgtggatagcccatagctattttccttgcttttcttttttaaaggggtctgttctgcagtggagaagacattctggtgaccagacttttgcttaccttttcctattctgttgccaatttttgttttccccacattctatagccataaacctgaagatgagtaaaactggtgggtctttaataaaacaacaacaaaaacagcagtttgtgatatagcagaggtttaaatgtaccctcccc

SEQ ID NO: 150198 - DNA, 10345 bp, Homo sapiens
  Payload ID: 9656
  Gene Symbol: KDM5B
  Gene Name: lysine (K)-specific demethylase 5B
  Uniprot ID: Q9UGL1
  ENST ID: ENST00000367265
  CDS Start-End: 1166-5800
ttcagtctgttgaaggataccccgttgtgtatttctacctgtatgtaccagagacacctcaaattcaaaatgtccagaaatgaacacagtatcttcttcccttgagtaactcgccttctgtatataattggggtgaatgttccagcaatgccaacgggctagcatctactcaggcaggtacgccagacatctgaatcttaatacctcgtcgtcccccctcaatctgtcactatgtcctaattttatttcctacctttgcatcccttcctcataattatcagcaccactgccttaatttagatcctatcattccttgtctggattatttcaagtctttcgcccctctcaagtctgacctcgtcatagactgtttgtggatgattattttccctgcaacatctccacctcccaatagtctccatcacttattagccatgtgaattatggcaaattgcttaacctacctatgcctcactttccttattgtaaagtggaaataagagtacctatctcatagggttgtgtgattaatcatgcgatgcaattagaacagtgcctaggatatgaaagtgccccaaaatgttacgttattattattattactactattgccttctcatgaacatgctatgtgtatgttcaagctgttatctctactggaaaatccttctccgtttccaatactctttccaaaaccccctcctgggttttactgcacctaccattgtgtactgacgtgattgaatgattggcttatgggactgatcctttctaccagacttaacttcttcagggcaggaactctgatacatagtaaatggtcaataaaagttggctcaactgaaaccctaaggataaactccatccacagcggaaggcgcggccccgcccgattcgggggcggggcggggagccgcgcgcggagggtgggtcgatgggggtggggtgggactctttttcctcgccgtggcggcggaggcgcacggcgtgggcttgcggcgagacgtcgtcgtcggaggctgaaaaagcccaaggtgctgccgttgcccgtacaactcggacttgctgttgctcgagccgcgtctgcacgggtctcggaccgagcggagctcgcagcctcggtcccggagcccaccttcgcctcgcccttgcccagcctgcggtgatggaggcggccaccacactgcacccaggcccgcgcccggcgctgcccctcgggggcccgggcccgctgggcgagttcctgcctccacccgagtgcccggtcttcgaacccagctgggaagagttcgcggaccccttcgctttcatccacaagatccggcccatagccgagcagactggcatctgtaaggtgcggccgccgccggattggcagccaccatttgcatgtgatgttgataaacttcattttacgccacgtatccagagactgaatgaattggaggcccaaactcgtgtaaaattgaatttcttggaccagattgcaaagtactgggagttacagggaagtactctgaaaattccacatgtggagaggaagatcttggacttatttcagcttaataagttagttgcagaagaaggtggatttgcagttgtttgcaaggatagaaaatggaccaaaattgctaccaagatggggtttgctcctggcaaagcagtgggctcacatatcagagggcattatgaacgaattctcaacccctacaacttattcctgtccggagacagcctaaggtgtttgcagaagccaaacctgaccacagacactaaggacaaggagtacaaaccccatgatattccccagaggcagtctgtgcagccttcggaaacgtgccccccagcccgacgagcaaaacgcatgagagcagaggccatgaatattaaaatagaacccgaggagacaacggaagccagaactcataatctgagacgtcgaatgggttgtccaactccaaaatgtgaaaatgagaaagaaatgaagagtagcatcaagcaagaacctattgagaggaaagattatattgtagaaaatgagaaggaaaagcccaagagtcgatctaaaaaagccaccaatgctgtggacctgtatgtctgtcttttatgtggcagtggcaatgatgaagaccggctactgttgtgtgatggctgtgatgacagttaccataccttttgcttgatcccacctctccatgatgttcccaagggagactggaggtgtcctaagtgtttggctcaggaatgtagtaagccacaagaagcatttggctttgaacaagcagccagggactataccctccgtacttttggggaaatggcagatgcgttcaaatctgattacttcaacatgccagtccatatggtccccacagagcttgttgagaaagaattttggagactagtaagcactattgaggaggatgtcacagtggaatatggagctgacattgcctcaaaggaatttggcagtggctttcctgtccgagatgggaaaatcaaactctcacctgaggaagaggagtatcttgatagtggctggaatttgaacaacatgccagtgatggagcagtctgtccttgcacatattactgctgatatatgtggcatgaaacttccttggttgtatgtgggaatgtgcttttcttcattctgttggcacattgaagaccactggagctattcaattaactacttgcactggggtgagccaaaaacctggtatggagtcccagggtatgctgctgagcagctagaaaatgtaatgaagaaactagctccagaactctttgtgtcccagccggatctcctccatcagcttgtgaccatcatgaaccccaataccctgatgactcatgaagtgcctgtttaccgaactaatcagtgtgctggggagtttgtgattacatttccaagagcctaccacagtggttttaaccagggttttaattttgctgaggctgttaacttctgcactgttgattggctgccattaggccgacagtgtgtggagcattatcgcttgcttcatcgatattgtgtgttttcccacgatgagatgatctgcaagatggcttccaaggctgatgtattagatgttgtagtggcttcaactgttcagaaagacatggccattatgattgaggatgagaaagctttaagagaaactgtccgtaaattgggagtgattgattcggaaagaatggattttgagctgttgccagatgatgaacgtcagtgtgtaaaatgcaaaactacatgcttcatgtctgccatctcctgttcttgtaaacctggccttcttgtttgcctgcatcatgtaaaagaattgtgttcctgtcctccttacaaatataaattgcggtataggtacacgctggatgatctctaccctatgatgaatgcattgaagcttcgagcagaatcttacaacgaatgggccttgaatgtgaatgaagctttggaggcaaagatcaacaagaagaaaagccttgtcagcttcaaggctttaattgaagaatctgaaatgaagaaattcccagacaatgatcttttgcgacaccttcgcctagtcacacaggatgcagagaagtgtgcctctgttgcgcagcagttgcttaatggcaaaaggcaaactagatatcgatctggtggagggaaatcccaaaatcagttgacagtgaatgagctccggcagtttgtaacacagctgtatgctcttccatgtgtcctcagtcagacaccattactaaaggatctcttgaatcgtgtagaagattttcaacagcatagtcagaaactactctctgaggaaacgcctagtgctgcggagctgcaggacttgctagatgtcagctttgaatttgatgttgaacttccacagcttgctgagatgcgtatccgtttggaacaagcccgttggctagaagaggtgcagcaagcttgcctagaccccagctcccttactttagatgatatgagacgtctcatagacctaggggtagggctggccccgtattcagcagtggagaaagctatggcccggctgcaggaactgctcacagtgtcagagcactgggacgacaaagccaagagtctcctcaaggccaggccacgacattcattgaatagccttgctacggcagtaaaggaaatcgaagagatccctgcatatctgcccaatggtgcggctctgaaagactcagtgcagagagccagagactggcttcaggatgtagagggcctgcaggctggaggacgtgtgccagtgttagacacactcatagaacttgttacacgaggccgatctatccccgtacatctgaattctttgccaagactggaaaccctagtagctgaggttcaggcttggaaagaatgtgctgttaatacattcttgactgagaattctccatattctctcttagaggtgctgtgtcctcgatgtgatattggccttttgggattgaaaaggaagcagagaaagttaaaggagcccttgccaaatggaaagaaaaaaagcaccaaattagagagtctgagtgacctggagagagctttaactgaaagcaaggagactgcttcagctatggcaactcttggggaagctcgcctaagggaaatggaagccttgcagtctctcagactcgccaatgaagggaaattgctgtcgcctctccaagatgtggatataaaaatctgcctatgtcagaaggccccagctgcccctatgattcaatgtgaactctgcagggatgctttccacaccagttgtgtggcggtacccagtatttcacagggcctgcgaatctggctttgtccccattgtcggaggtcagagaaacctccattagagaaaattctgcccctgctcgcctcccttcagcgtatccgagttcgccttcctgagggagatgcacttcgatatatgattgaaagaaccgtgaactggcagcacagagcccagcaactgctttcgtcagggaatcttaaatttgtgcaagatcgagtgggctcaggactgttatatagcagatggcaagcctcagcaggacaggtgtcagacacaaacaaggtatctcaacctcctggcacaacatcattttctttgcctgatgactgggacaacagaacctcatatttgcactcccccttctcaactggacgaagttgtatccccctccatggtgttagtccagaagtgaatgaactattgatggaagcccagctgctccaggtatcccttcctgaaattcaggaactttaccagactttacttgcaaagccaagccctgctcagcagactgaccgaagctcaccagtgagacccagcagtgagaagaatgactgttgccgagggaagcgagatggaattaacagtcttgagagaaaactgaagagacgcctggaaagagagggcctctccagtgagcggtgggaacgagttaagaaaatgcggacccccaaaaagaagaaaatcaaactgagccaccccaaggacatgaacaatttcaagttagagagagagcgtagctatgaattagttcgttctgctgaaactcattccctgccctcagacacatcctattccgaacaggaagactctgaggatgaagatgccatctgcccagctgtgagctgcctgcagccagaaggagatgaggtggactgggtccagtgtgatggcagctgcaatcagtggtttcatcaggtctgtgttggtgtctccccagagatggcagagaaagaagactacatctgtgtgcgctgtactgtgaaggacgcaccaagccgaaagtaaaaacacaaaaacagatacccccctacttaatgtaattcaggactccaaccaagaggatttcttcaaatctcagcaaagctacaggactggtactcaagccagcctgtaaacggtgctatttctattccttatgggatcatttttccaggactctttgaagaaaagaaaaaacaactaaaaaaatttttgacactttttgtattttttccttaagagctatttgtggttgttgaggtttgaaaagctgactgttttttttgcaggggttcccaccaatttggaaggcattgaagcttgcaccttttcatgtacagcattaaaattttacctctctctgggatttaccagcttaagagtccaactcacttccagtgcccaaaagggcacccaccagaaattccagtaaatcctcatttgaggaagctctcccttgtttactctgttaccacattggggaaatttttaagtttttcactttgggagtttttgtttgtttcttcttttcctttatccacttttcttcttcctggtagactaggtttatttatctgagcaataacttctatgttggtttcagtggctggaattaaaacaaaacaaaacaaacttccaaacagtgtgttggtgctttagcgattgattgatgtacagaacacaaatgtctagtttctagtgtcactgatgaactagtgatgtagaaaagagacttctctgtaagtaattgccacagctgtattttggctttctccctgtcccttcctttctcccctattttttggtagcttgtatcaaatgttacagtttatattgtggaataaatccttcgtcctaacataacactaaatgctgattatttagagccattagagcacagcttcttctgcccctctactgttgcacagccagaaggggctgcttgcttttgcctctgcccaaccaggttgcagtagcagtggatgttagcctgcaaacaacattaggggattcttcttttgtgtcctgctctgtttggtgggccatatgcctacagccctcactaacaaagaacccctctgtcttcaaggactagaacctatctttaaagccgtgctcttttaaaataagctttctcagaatgttggcaaatcacttcaatcctcaaatcagtcttccttgtggaatgctgcctttattatatttgaattgacaggggaacttggtttagggttaagacgttggaaggaaatctaaggaaaattaatcctcacagaggtccgggtttagtatatgtcttgagaggagacttgtgaattcccagactctgcctcctggtttcctttctcatttctttctaactgtagctatcattactggctgtggatagcccatagctattttccttgcttttcttttttaaaggggtctgttctgcagtggagaagacattctggtgaccagacttttgcttaccttttcctattctgttgccaatttttgttttccccacattctatagccataaacctgaagatgagtaaaactggtgggtctttaataaaacaacaacaaaaacagcagtttgtgatatagcagaggtttaaatgtaccctccccttttatgcacttcaaataattaaatctctttaagaatgacttctagttgtctgcagttttctgcagttgttgtgatgtttctcttcgtctgatggtggttctggggccaatagagaagaatagtctccagagtacaatttggaatcatcgtggtttggccttgttagtattcaaattcttagaatcccctccatcacccccgactttgagataggatgccaactgtcccagtcctcaccttccattgagaaattaagcttaaaaggagaccctgctgctaatataaagccactgcctttagagagcttttgccatcttagtaagcacaacccctacccccatccccactagtttttcttcttcacctgtgggtggtggtacacagtccctgacaatagcatctttgaggaagtcagatctttgtatctctgagtgagttagaaaaggtaggcatgtgtgtatttgaaccactccctccctggatgagaaccactgatcattttatgtgtgatgatgctgaatttaaagagaatgtcagttgcccaaagctacactgtactactagtaaataacaaagcctgggttttatcttccagttttcctacagtattcctcctaccttgtacaccatcacactactaatgaacacagataacgtttactttccagtttatgcctttgttgtatccctaaaatgactacagactgatgtgatctaaaaaccatgtttcattgtgtgttagctgtgaagctggcctgtaccagagaaacctctgaacttgtaggggaaaatgataaaatgcacatggaaactgacacttcagtttccatctcagtagtcctgcagctttgtgaggtgggagaggggaagggactgtgttaagttagagcctgaaccagaaggagggtcagtgggtaaagaaagaaagggtagatgaggtgtgccttccacctcacctaaatgaatactgtttgttttttgtttttccttccagattagactttgggggatttcttatatagaataaagggcttgattatatgtagcctctatcctggagaaaggttatgtaatttggactatgtaaaggaagttgacttctttacagcttcgtttcagtatcctaggaggtgggattcatttttctatcttaagttaacctaaaggagagatgccacttgtggtgatggaggttgttaaaaacctgaatttccctgcttcattctccagtgaagagcttaagaaaatgaggctttggatattttggcagaagtgtctgaaatgcacctgatttgccattatacccaccatcaaaagcaacatggccctttgggtattagtgcaagattagcctaagaatagagtagatctctacctggaagagggtgaaacatggctctctactgatttgggttgtactctgaaggccctttgtaatgggtttctgcctctttgtatttcacttaaaaaatcttgatggatatttggcagtctgttaagacctgcttctggcttggagcaggtattgattggtatttagtacccatgggtgtttttctgggctcagtcttgcctatgtttcttgccatatgacacataccggaatggattccagatgctatatacctgtaacaggagacagaattggacaacaaggattttaagagtcattgcccattgtaaagcattaagccagagctggttattcattatcagactaactacatactagtccatgctagtgtcagcctatattaaaatagtctttccttgccatagtgctggcgaaaacccaatcccttctgatgaaacattgcttcttgggaagacaagctgaggaaagcaatgaagatcccagtgtcggcctttattgagctatgtatgagggtcagggtccctcaactcctagtgactatgaagcagcagtgtgatggcttcgccctctttgcccctctgtcatcaatcctttgcatgtggctattttaagcttctcagctttcttttgggaggcttcatgtgtaacttattatagaaatgttactgaaaagctgcctaaacaaaaaattgtataaagtaggaatttgtataaagtaatactgttgtaaatccatcttcaagatgtaaagaatcaatttgtaaagtgtatattttcacttctcccttcaaatttatgtgaacaagtttttcatgtttcaatattgcttacataggaatacaccttacgtttttatcagtataaatggaacatttaaaaccagtcaacaacagaacagataatccagctccctgtttgtgttctgggttaattttgcaaggatgaagggctagaaagtggtgagtttcggtgtgtttcttattttcaggataaccggctgcattgcagtagaggaatggaatggtgaggtcatttgacctgttccaggtgagtggaggccaaagaacattctttctgcctccccttggatgggaaaattgagaaattaaaaagttgcctttctgaggaaacaaaagttattttctctatttaaaataaatgtccaaaggcacccctctaaacaccaaaacttttagctcctggcaaacttacctagctagaagttggagaagagtgcggtttcaaaccatgcttcctttctgcccttgccaatacgttctcactgactgtgattctgctgtgaacacacacacacacacaaacacacacacaagccccttctgtgtatgatcaggacaagtagttcaacagttaataaaaaagttaaattattggatgagaaagatatatttaacctaaatcataaatatgtatatccatttaataaacactaaaattgagaaaaattagtttggggatgagggccttcattcataatagccataatgcattatctatgatgtgagcttgattgagcttctttaaaatgcataaagaatttgaacaacaaaagaaa

SEQ ID NO: 150199 - DNA, 542 bp, Homo sapiens
  Payload ID: 9656
  Gene Symbol: KDM5B
  Gene Name: lysine (K)-specific demethylase 5B
  ENST ID: ENST00000602511
  CDS Start-End: 1-234
atctgtaaggtgcggccgccgccggattggcagccaccatttgcatgtgatgttgataaacttcattttacgccacgtatccagagactgaatgaattggagtcccgctctgtcacccagggtggagtgcagcagcattatcctggttcactgcaacctctgcctcctgggttcaagtcattctcctgcctcagcctcccaagtagctgggattacaggcccaaactcgtgtaaaattgaatttcttggaccagattgcaaagtactgggagttacagggaagtactctgaaaattccacatgtggagaggaagatcttggacttatttcagcttaataagttagttgcagaagaaggtggatttgcagttgtttgcaaggatagaaaatggaccaaaattgctaccaagatggggtttgctcctggcaaagcagtgggctcacatatcagagggcattatgaacgaattctcaacccctacaacttattcctgtccggagacagcctaaggtgtttgcagaagccaaacctgaccacagac

SEQ ID NO: 150200 - DNA, 548 bp, Homo sapiens
  Payload ID: 9657
  Gene Symbol: KDM5C
  Gene Name: lysine (K)-specific demethylase 5C
  ENST ID: ENST00000349663
  CDS Start-End: 310-534
agatggcggcggcggcgctgaaggccgcggcgtttgggaggtaactgtggtggcgaaggctgcggtagtggggaggcaaccacacagtttggaagaaacggagcgggacgaagaggcggtagcagtagagtcagcctgagactctcagagcacgacggccacacgcccccttaggccctcggcgggcggcggctgccccgcttagggcctagcctccgagcattgcctcggcttcaaacagcggcggcgccatgagtccttaagggcggtccaagcctcccgatccctggcccagacctcgggcccaccatggagccggggtccgacgatttcctaccgccaccggagtgcccggtgttcgagcctagctgggccgagttccgagaccctcttggctacatcgcgaaaatcaggcccatcgcagagaaatcgggcatttgcaagatccgcccacccgcgtcaggcatcccagcacttacccccaccccctggggcttcctcccctgcctcttcctgtaccaggcaggtgtatgagagaggatctacag

SEQ ID NO: 150201 - DNA, 5245 bp, Homo sapiens
  Payload ID: 9657
  Gene Symbol: KDM5C
  Gene Name: lysine (K)-specific demethylase 5C
  Uniprot ID: P41229
  ENST ID: ENST00000375379
  CDS Start-End: 534-5207
cttgttcctccgccgttgcaatgaactattttctctcagtccggggtggtacttttgagtaaccccttccaaatagaaacccataccagcctatttagctcggtctccactatatgaaggtttcctagggcttggtgtgacgcaacgtatacgaggctcggaaggacaccccgcggaaggatccggtttgttgtggtgtggggaggggagacgctgacaaaccaagatggcggcggcggcgctgaaggccgcggcgtttgggaggtaactgtggtggcgaaggctgcggtagtggggaggcaaccacacagtttggaagaaacggagcgggacgaagaggcggtagcagtagagtcagcctgagactctcagagcacgacggccacacgcccccttaggccctcggcgggcggcggctgccccgcttagggcctagcctccgagcattgcctcggcttcaaacagcggcggcgccatgagtccttaagggcggtccaagcctcccgatccctggcccagacctcgggcccaccatggagccggggtccgacgatttcctaccgccaccggagtgcccggtgttcgagcctagctgggccgagttccgagaccctcttggctacatcgcgaaaatcaggcccatcgcagagaaatcgggcatttgcaagatccgcccacccgcggactggcagccaccctttgctgtggaagtggacaacttcaggtttaccccccgaatccagaggctgaatgagctagaggcccagacgagagtgaaactgaactacttggaccagattgccaaattctgggaaatccagggctcctccttaaagattcccaatgtagaacggcggatcttggacctctacagtctcagcaaaattgtggtggaggaaggtggttatgaagctatctgcaaggaccgtcggtgggctcgggtagcccagcgcctcaactatccaccaggcaaaaatattggctccttgctacgctcccactacgaacgcattgtttatccctatgaaatgtaccagtctggagccaaccttgtgcagtgtaacacacgtccatttgataatgaggagaaggacaaggaatacaaaccccacagcatccccctacgacagtctgtgcagccttccaagttcaacagctatggccggcgggccaagagactgcagcctgatccggaacccacagaggaagacattgagaagaatccagagctgaaaaagctacagatctatggggcaggccccaagatgatgggcctgggcctcatggccaaagacaagactctgcggaagaaagataaggaggggcctgagtgtccccccacagtagtggtgaaggaggagttaggtggggatgtgaaggtggagtcaacatcgcctaagaccttcctggagagcaaggaggagctgagtcacagcccagaaccctgcaccaagatgaccatgaggctacggaggaaccacagcaatgcccagtttattgagtcatatgtctgccggatgtgttctcgaggggatgaggatgacaagctcctgctgtgtgatggctgtgatgacaactaccacatcttctgcctgctgcctcctctgcctgagatccccaagggtgtctggcggtgcccaaagtgtgtcatggcggagtgtaagcggcccccagaagcctttggctttgagcaggctacccgggaatacactctgcagagctttggcgagatggccgactcctttaaagctgactacttcaacatgcccgtgcatatggtgcccacagaacttgtggagaaggagttctggaggctggtaaatagcattgaggaagatgtgactgttgagtatggagctgacatccattccaaagaatttggcagcggtttccctgtcagtgacagtaaacggcacctaacccccgaagaggaggagtatgctaccagtggttggaacctaaatgtgatgccggtgttggaacagtctgtactgtgccacatcaatgcagatatctctggcatgaaggtgccctggctctacgtgggcatggtcttctcagccttttgctggcatattgaggatcactggagttactccattaactacctccactggggtgagccgaagacctggtatggggtgccctcacttgcagcagaacatttggaagaagtgatgaagaagctgacacctgaactatttgatagccagcctgacctcctgcaccaacttgtcaccctcatgaatcccaacaccctcatgtcccatggtgtgccagttgtccgcacaaaccagtgtgcaggagagtttgtcatcaccttcccccgtgcttaccacagcggcttcaaccaaggctacaactttgccgaggctgtcaacttttgcactgctgactggttgcctgctgggcgccagtgcattgagcactaccgccggctccggagatactgcgtcttctcccatgaggagcttatctgcaagatggctgcctgcccagagaagctagacctgaacctggcggcagctgtgcataaggagatgttcatcatggtgcaagaagagcggcgtctacgaaaggccctgctggagaagggtatcacagaggctgagcgagaggctttcgagctgctcccagatgatgagcgccagtgtatcaagtgcaagactacgtgtttcctgtcagccctggcctgctacgactgcccagacggccttgtctgcctttcccacatcaatgatctctgcaagtgctccagtagccggcagtacctgcggtatcggtataccttggatgagcttcctgccatgctgcataagctgaaggttcgggctgagtcctttgacacctgggccaacaaagtgcgagtggccctggaggtggaggatgggcggaagcgcagccttgaagaactgagggcactagagtctgaagcccgtgagcggaggtttcctaatagtgagctgctgcagcaactaaagaactgcctgagtgaggcagaggcttgcgtgtcccgagctctgggactggtcagcggccaggaagctggcccccacagggtggctggtctacagatgaccctgactgagctccgggcctttctggaccagatgaacaacctgccttgcgccatgcaccagattggggatgtcaagggtgttctggaacaggtggaggcctaccaggctgaggctcgtgaggccctggcctcactgccctccagtccagggctactgcagtccctgttggagagggggcggcagctgggggtggaggtgcctgaggcccagcagctccagcggcaggtggaacaggcgcgatggctggatgaggtgaaacgcacactggccccctcagcccgaaggggcaccttggctgtcatgcgaggactgttggtcgcgggtgccagtgtagcccctagccctgctgtggataaagcccaggccgagctgcaggaactgctgaccattgctgaacgctgggaggagaaagcccacctctgcctggaggccaggcagaagcatccaccagccacacttgaggccataatccgtgaagcggaaaacatccctgttcacctgcccaacatccaggctctcaaggaggctcttgctaaggcccgggcctggattgctgatgttgatgagatccaaaatggtgaccactacccctgcctggatgacttggagggcctagtagctgtgggccgggacctacctgtggggctggaggagctgagacagctagagctacaggtactgacagcgcactcctggagggagaaggcctccaagaccttcctcaagaaaaattcttgctacacgctgctggaggttctctgcccatgtgcagatgccggctcagacagcaccaagcgcagccggtggatggagaaggagctggggttgtacaaatctgacacagagctgctggggctgtctgcgcaggacctcagggacccaggctctgtgatcgtggccttcaaggagggggaacagaaggagaaggagggtatcctgcagctgcgtcgcaccaattcggccaagcccagtccactggcatcatcgagcacggcctcctctacaacctctatctgtgtgtgtgggcaggtgctggctggggcgggagctctgcagtgtgacctgtgtcaggactggttccatgggcggtgtgtgtcagtgcctcgcctcctcagctctccgaggcccaatcccacctcatccccactgctggcctggtgggaatgggacaccaaattcctgtgtccactgtgtatgcgctcaaggcgcccgcgcctggagaccatcctggcactgctggtagccctgcagagactgcctgtgcggctgcccgagggcgaggccctgcagtgcctcacagagagggccatcagctggcaaggccgcgccaggcaggctctggcctctgaagatgtgactgctcttttgggacggctggctgagctccgccaacggctacaggctgaacctagacctgaggagcctcctaactaccctgcagcccctgcttctgaccccctcagagagggcagtggcaaggatatgcctaaggtccagggcttactggagaatggagacagtgtgaccagtcctgagaaggtagccccggaggagggctcagatctggagctgctgtcctcgctgttgccacagttgactggccctgtgttggaactgcctgaggcaacccgggcccccttggaggagctcatgatggagggggacctgctcgaggtgaccctggatgagaaccacagcatatggcagctgctgcaggctggacagcccccagacctggagaggatccgcacacttctggagctggagaaggcagagcgtcacgggagtcgggctcggggccgggccctggagaggcggcggcggcggaaggtggatcggggtggggagggcgatgacccagcccgagaggagctagagccaaagagggtacggagctcagggccagaggctgaggaggtccaggaggaggaagagctggaggaggagactgggggtgagggcccccctgcacccatccccaccactggcagccccagcacccaggagaaccagaatggcttggaaccggcggaagggaccacttcaggcccctcggcccctttctccactctgactccccggctgcatctgccctgcccacagcagccgcctcagcaacagttgtgacagtggctgagcctagcacagaccctgacagagacccc

SEQ ID NO: 150202 - DNA, 5122 bp, Homo sapiens
  Payload ID: 9657
  Gene Symbol: KDM5C
  Gene Name: lysine (K)-specific demethylase 5C
  Uniprot ID: P41229
  ENST ID: ENST00000375383
  CDS Start-End: 534-5084
cttgttcctccgccgttgcaatgaactattttctctcagtccggggtggtacttttgagtaaccccttccaaatagaaacccataccagcctatttagctcggtctccactatatgaaggtttcctagggcttggtgtgacgcaacgtatacgaggctcggaaggacaccccgcggaaggatccggtttgttgtggtgtggggaggggagacgctgacaaaccaagatggcggcggcggcgctgaaggccgcggcgtttgggaggtaactgtggtggcgaaggctgcggtagtggggaggcaaccacacagtttggaagaaacggagcgggacgaagaggcggtagcagtagagtcagcctgagactctcagagcacgacggccacacgcccccttaggccctcggcgggcggcggctgccccgcttagggcctagcctccgagcattgcctcggcttcaaacagcggcggcgccatgagtccttaagggcggtccaagcctcccgatccctggcccagacctcgggcccaccatggagccggggtccgacgatttcctaccgccaccggagtgcccggtgttcgagcctagctgggccgagttccgagaccctcttggctacatcgcgaaaatcaggcccatcgcagagaaatcgggcatttgcaagatccgcccacccgcggactggcagccaccctttgctgtggaagtggacaacttcaggtttaccccccgaatccagaggctgaatgagctagagattgtggtggaggaaggtggttatgaagctatctgcaaggaccgtcggtgggctcgggtagcccagcgcctcaactatccaccaggcaaaaatattggctccttgctacgctcccactacgaacgcattgtttatccctatgaaatgtaccagtctggagccaaccttgtgcagtgtaacacacgtccatttgataatgaggagaaggacaaggaatacaaaccccacagcatccccctacgacagtctgtgcagccttccaagttcaacagctatggccggcgggccaagagactgcagcctgatccggaacccacagaggaagacattgagaagaatccagagctgaaaaagctacagatctatggggcaggccccaagatgatgggcctgggcctcatggccaaagacaagactctgcggaagaaagataaggaggggcctgagtgtccccccacagtagtggtgaaggaggagttaggtggggatgtgaaggtggagtcaacatcgcctaagaccttcctggagagcaaggaggagctgagtcacagcccagaaccctgcaccaagatgaccatgaggctacggaggaaccacagcaatgcccagtttattgagtcatatgtctgccggatgtgttctcgaggggatgaggatgacaagctcctgctgtgtgatggctgtgatgacaactaccacatcttctgcctgctgcctcctctgcctgagatccccaagggtgtctggcggtgcccaaagtgtgtcatggcggagtgtaagcggcccccagaagcctttggctttgagcaggctacccgggaatacactctgcagagctttggcgagatggccgactcctttaaagctgactacttcaacatgcccgtgcatatggtgcccacagaacttgtggagaaggagttctggaggctggtaaatagcattgaggaagatgtgactgttgagtatggagctgacatccattccaaagaatttggcagcggtttccctgtcagtgacagtaaacggcacctaacccccgaagaggaggagtatgctaccagtggttggaacctaaatgtgatgccggtgttggaacagtctgtactgtgccacatcaatgcagatatctctggcatgaaggtgccctggctctacgtgggcatggtcttctcagccttttgctggcatattgaggatcactggagttactccattaactacctccactggggtgagccgaagacctggtatggggtgccctcacttgcagcagaacatttggaagaagtgatgaagaagctgacacctgaactatttgatagccagcctgacctcctgcaccaacttgtcaccctcatgaatcccaacaccctcatgtcccatggtgtgccagttgtccgcacaaaccagtgtgcaggagagtttgtcatcaccttcccccgtgcttaccacagcggcttcaaccaaggctacaactttgccgaggctgtcaacttttgcactgctgactggttgcctgctgggcgccagtgcattgagcactaccgccggctccggagatactgcgtcttctcccatgaggagcttatctgcaagatggctgcctgcccagagaagctagacctgaacctggcggcagctgtgcataaggagatgttcatcatggtgcaagaagagcggcgtctacgaaaggccctgctggagaagggtatcacagaggctgagcgagaggctttcgagctgctcccagatgatgagcgccagtgtatcaagtgcaagactacgtgtttcctgtcagccctggcctgctacgactgcccagacggccttgtctgcctttcccacatcaatgatctctgcaagtgctccagtagccggcagtacctgcggtatcggtataccttggatgagcttcctgccatgctgcataagctgaaggttcgggctgagtcctttgacacctgggccaacaaagtgcgagtggccctggaggtggaggatgggcggaagcgcagccttgaagaactgagggcactagagtctgaagcccgtgagcggaggtttcctaatagtgagctgctgcagcaactaaagaactgcctgagtgaggcagaggcttgcgtgtcccgagctctgggactggtcagcggccaggaagctggcccccacagggtggctggtctacagatgaccctgactgagctccgggcctttctggaccagatgaacaacctgccttgcgccatgcaccagattggggatgtcaagggtgttctggaacaggtggaggcctaccaggctgaggctcgtgaggccctggcctcactgccctccagtccagggctactgcagtccctgttggagagggggcggcagctgggggtggaggtgcctgaggcccagcagctccagcggcaggtggaacaggcgcgatggctggatgaggtgaaacgcacactggccccctcagcccgaaggggcaccttggctgtcatgcgaggactgttggtcgcgggtgccagtgtagcccctagccctgctgtggataaagcccaggccgagctgcaggaactgctgaccattgctgaacgctgggaggagaaagcccacctctgcctggaggccaggcagaagcatccaccagccacacttgaggccataatccgtgaagcggaaaacatccctgttcacctgcccaacatccaggctctcaaggaggctcttgctaaggcccgggcctggattgctgatgttgatgagatccaaaatggtgaccactacccctgcctggatgacttggagggcctagtagctgtgggccgggacctacctgtggggctggaggagctgagacagctagagctacaggtactgacagcgcactcctggagggagaaggcctccaagaccttcctcaagaaaaattcttgctacacgctgctggaggttctctgcccatgtgcagatgccggctcagacagcaccaagcgcagccggtggatggagaaggagctggggttgtacaaatctgacacagagctgctggggctgtctgcgcaggacctcagggacccaggctctgtgatcgtggccttcaaggagggggaacagaaggagaaggagggtatcctgcagctgcgtcgcaccaattcggccaagcccagtccactggcatcatcgagcacggcctcctctacaacctctatctgtgtgtgtgggcaggtgctggctggggcgggagctctgcagtgtgacctgtgtcaggactggttccatgggcggtgtgtgtcagtgcctcgcctcctcagctctccgaggcccaatcccacctcatccccactgctggcctggtgggaatgggacaccaaattcctgtgtccactgtgtatgcgctcaaggcgcccgcgcctggagaccatcctggcactgctggtagccctgcagagactgcctgtgcggctgcccgagggcgaggccctgcagtgcctcacagagagggccatcagctggcaaggccgcgccaggcaggctctggcctctgaagatgtgactgctcttttgggacggctggctgagctccgccaacggctacaggctgaacctagacctgaggagcctcctaactaccctgcagcccctgcttctgaccccctcagagagggcagtggcaaggatatgcctaaggtccagggcttactggagaatggagacagtgtgaccagtcctgagaaggtagccccggaggagggctcagatctggagctgctgtcctcgctgttgccacagttgactggccctgtgttggaactgcctgaggcaacccgggcccccttggaggagctcatgatggagggggacctgctcgaggtgaccctggatgagaaccacagcatatggcagctgctgcaggctggacagcccccagacctggagaggatccgcacacttctggagctggagaaggcagagcgtcacgggagtcgggctcggggccgggccctggagaggcggcggcggcggaaggtggatcggggtggggagggcgatgacccagcccgagaggagctagagccaaagagggtacggagctcagggccagaggctgaggaggtccaggaggaggaagagctggaggaggagactgggggtgagggcccccctgcacccatccccaccactggcagccccagcacccaggagaaccagaatggcttggaaccggcggaagggaccacttcaggcccctcggcccctttctccactctgactccccggctgcatctgccctgcccacagcagccgcctcagcaacagttgtgacagtggctgagcctagcacagaccctgacagagacccc

SEQ ID NO: 150203 - DNA, 6031 bp, Homo sapiens
  Payload ID: 9657
  Gene Symbol: KDM5C
  Gene Name: lysine (K)-specific demethylase 5C
  Uniprot ID: P41229
  ENST ID: ENST00000375401
  CDS Start-End: 534-5216
cttgttcctccgccgttgcaatgaactattttctctcagtccggggtggtacttttgagtaaccccttccaaatagaaacccataccagcctatttagctcggtctccactatatgaaggtttcctagggcttggtgtgacgcaacgtatacgaggctcggaaggacaccccgcggaaggatccggtttgttgtggtgtggggaggggagacgctgacaaaccaagatggcggcggcggcgctgaaggccgcggcgtttgggaggtaactgtggtggcgaaggctgcggtagtggggaggcaaccacacagtttggaagaaacggagcgggacgaagaggcggtagcagtagagtcagcctgagactctcagagcacgacggccacacgcccccttaggccctcggcgggcggcggctgccccgcttagggcctagcctccgagcattgcctcggcttcaaacagcggcggcgccatgagtccttaagggcggtccaagcctcccgatccctggcccagacctcgggcccaccatggagccggggtccgacgatttcctaccgccaccggagtgcccggtgttcgagcctagctgggccgagttccgagaccctcttggctacatcgcgaaaatcaggcccatcgcagagaaatcgggcatttgcaagatccgcccacccgcggactggcagccaccctttgctgtggaagtggacaacttcaggtttaccccccgaatccagaggctgaatgagctagaggcccagacgagagtgaaactgaactacttggaccagattgccaaattctgggaaatccagggctcctccttaaagattcccaatgtagaacggcggatcttggacctctacagtctcagcaaaattgtggtggaggaaggtggttatgaagctatctgcaaggaccgtcggtgggctcgggtagcccagcgcctcaactatccaccaggcaaaaatattggctccttgctacgctcccactacgaacgcattgtttatccctatgaaatgtaccagtctggagccaaccttgtgcagtgtaacacacgtccatttgataatgaggagaaggacaaggaatacaaaccccacagcatccccctacgacagtctgtgcagccttccaagttcaacagctatggccggcgggccaagagactgcagcctgatccggaacccacagaggaagacattgagaagaatccagagctgaaaaagctacagatctatggggcaggccccaagatgatgggcctgggcctcatggccaaagacaagactctgcggaagaaagataaggaggggcctgagtgtccccccacagtagtggtgaaggaggagttaggtggggatgtgaaggtggagtcaacatcgcctaagaccttcctggagagcaaggaggagctgagtcacagcccagaaccctgcaccaagatgaccatgaggctacggaggaaccacagcaatgcccagtttattgagtcatatgtctgccggatgtgttctcgaggggatgaggatgacaagctcctgctgtgtgatggctgtgatgacaactaccacatcttctgcctgctgcctcctctgcctgagatccccaagggtgtctggcggtgcccaaagtgtgtcatggcggagtgtaagcggcccccagaagcctttggctttgagcaggctacccgggaatacactctgcagagctttggcgagatggccgactcctttaaagctgactacttcaacatgcccgtgcatatggtgcccacagaacttgtggagaaggagttctggaggctggtaaatagcattgaggaagatgtgactgttgagtatggagctgacatccattccaaagaatttggcagcggtttccctgtcagtgacagtaaacggcacctaacccccgaagaggaggagtatgctaccagtggttggaacctaaatgtgatgccggtgttggaacagtctgtactgtgccacatcaatgcagatatctctggcatgaaggtgccctggctctacgtgggcatggtcttctcagccttttgctggcatattgaggatcactggagttactccattaactacctccactggggtgagccgaagacctggtatggggtgccctcacttgcagcagaacatttggaagaagtgatgaagaagctgacacctgaactatttgatagccagcctgacctcctgcaccaacttgtcaccctcatgaatcccaacaccctcatgtcccatggtgtgccagttgtccgcacaaaccagtgtgcaggagagtttgtcatcaccttcccccgtgcttaccacagcggcttcaaccaaggctacaactttgccgaggctgtcaacttttgcactgctgactggttgcctgctgggcgccagtgcattgagcactaccgccggctccggagatactgcgtcttctcccatgaggagcttatctgcaagatggctgcctgcccagagaagctagacctgaacctggcggcagctgtgcataaggagatgttcatcatggtgcaagaagagcggcgtctacgaaaggccctgctggagaagggtatcacagaggctgagcgagaggctttcgagctgctcccagatgatgagcgccagtgtatcaagtgcaagactacgtgtttcctgtcagccctggcctgctacgactgcccagacggccttgtctgcctttcccacatcaatgatctctgcaagtgctccagtagccggcagtacctgcggtatcggtataccttggatgagcttcctgccatgctgcataagctgaaggttcgggctgagtcctttgacacctgggccaacaaagtgcgagtggccctggaggtggaggatgggcggaagcgcagccttgaagaactgagggcactagagtctgaagcccgtgagcggaggtttcctaatagtgagctgctgcagcaactaaagaactgcctgagtgaggcagaggcttgcgtgtcccgagctctgggactggtcagcggccaggaagctggcccccacagggtggctggtctacagatgaccctgactgagctccgggcctttctggaccagatgaacaacctgccttgcgccatgcaccagattggggatgtcaagggtgttctggaacaggtggaggcctaccaggctgaggctcgtgaggccctggcctcactgccctccagtccagggctactgcagtccctgttggagagggggcggcagctgggggtggaggtgcctgaggcccagcagctccagcggcaggtggaacaggcgcgatggctggatgaggtgaaacgcacactggccccctcagcccgaaggggcaccttggctgtcatgcgaggactgttggtcgcgggtgccagtgtagcccctagccctgctgtggataaagcccaggccgagctgcaggaactgctgaccattgctgaacgctgggaggagaaagcccacctctgcctggaggccaggcagaagcatccaccagccacacttgaggccataatccgtgaagcggaaaacatccctgttcacctgcccaacatccaggctctcaaggaggctcttgctaaggcccgggcctggattgctgatgttgatgagatccaaaatggtgaccactacccctgcctggatgacttggagggcctagtagctgtgggccgggacctacctgtggggctggaggagctgagacagctagagctacaggtactgacagcgcactcctggagggagaaggcctccaagaccttcctcaagaaaaattcttgctacacgctgctggaggttctctgcccatgtgcagatgccggctcagacagcaccaagcgcagccggtggatggagaaggagctggggttgtacaaatctgacacagagctgctggggctgtctgcgcaggacctcagggacccaggctctgtgatcgtggccttcaaggagggggaacagaaggagaaggagggtatcctgcagctgcgtcgcaccaattcggccaagcccagtccactggcatcatcgagcacggcctcctctacaacctctatctgtgtgtgtgggcaggtgctggctggggcgggagctctgcagtgtgacctgtgtcaggactggttccatgggcggtgtgtgtcagtgcctcgcctcctcagctctccgaggcccaatcccacctcatccccactgctggcctggtgggaatgggacaccaaattcctgtgtccactgtgtatgcgctcaaggcgcccgcgcctggagaccatcctggcactgctggtagccctgcagagactgcctgtgcggctgcccgagggcgaggccctgcagtgcctcacagagagggccatcagctggcaaggccgcgccaggcaggctctggcctctgaagatgtgactgctcttttgggacggctggctgagctccgccaacggctacaggctgaacctagacctgaggagcctcctaactaccctgcagcccctgcttctgaccccctcagagagggcagtggcaaggatatgcctaaggtccagggcttactggagaatggagacagtgtgaccagtcctgagaaggtagccccggaggagggctcaggtaagagagatctggagctgctgtcctcgctgttgccacagttgactggccctgtgttggaactgcctgaggcaacccgggcccccttggaggagctcatgatggagggggacctgctcgaggtgaccctggatgagaaccacagcatatggcagctgctgcaggctggacagcccccagacctggagaggatccgcacacttctggagctggagaaggcagagcgtcacgggagtcgggctcggggccgggccctggagaggcggcggcggcggaaggtggatcggggtggggagggcgatgacccagcccgagaggagctagagccaaagagggtacggagctcagggccagaggctgaggaggtccaggaggaggaagagctggaggaggagactgggggtgagggcccccctgcacccatccccaccactggcagccccagcacccaggagaaccagaatggcttggaaccggcggaagggaccacttcaggcccctcggcccctttctccactctgactccccggctgcatctgccctgcccacagcagccgcctcagcaacagttgtgacagtggctgagcctagcacagaccctgacagagacccccctcggcctcaaggatcctctttctgaccatcaagcctgcttcttggggggtgggcgggtaggggggtggccatccctgctacccgcccacccctgagtcccttgacttttgtattctgactccaaggtattgttcagacctcagctcctgggggccggcccctggagtcttccctccctggtagcctctaaccagcattcccagacacctgaggcagatagatggatgggctggtgggcaggggggtggctggggctgggccatcaccattccagagacaaggccagtgtatatgcaaactgggggactctcctcccttctctccccagttctggtcctggccaggccatgctacactaacccctgcccccactctcctcccctcttttccttccttcctacccccttctccctctcccttcccctgactgttccacccaggaggaggaaacttcacatagccgtgctcacagttttttattttaaaggaatttggctggggagctgaacagggctccctgtgatctgaagaaagcttttggtgcttgtcctcacaaccacctcagtcctccctccctgtcctcccctgtctcctttcctcctcctgggttcatgttgtaataaaagaagattgttggtgtgtaattaatttgttcaaaagaaaaaaaaaagcaaaacaagaaacttggttccaactgaagcctattttaattttattttattattttcctcttgttagaaataaaacccttagaaacattttttggaaacatgtt

SEQ ID NO: 150204 - DNA, 5677 bp, Homo sapiens
  Payload ID: 9657
  Gene Symbol: KDM5C
  Gene Name: lysine (K)-specific demethylase 5C
  Uniprot ID: P41229
  ENST ID: ENST00000404049
  CDS Start-End: 288-4967
ggccgcggcgtttgggaggtaactgtggtggcgaaggctgcggtagtggggaggcaaccacacagtttggaagaaacggagcgggacgaagaggcggtagcagtagagtcagcctgagactctcagagcacgacggccacacgcccccttaggccctcggcgggcggcggctgccccgcttagggcctagcctccgagcattgcctcggcttcaaacagcggcggcgccatgagtccttaagggcggtccaagcctcccgatccctggcccagacctcgggcccaccatggagccggggtccgacgatttcctaccgccaccggagtgcccggtgttcgagcctagctgggccgagttccgagaccctcttggctacatcgcgaaaatcaggcccatcgcagagaaatcgggcatttgcaagatccgcccacccgcggactggcagccaccctttgctgtggaagtggacaacttcaggtttaccccccgaatccagaggctgaatgagctagaggcccagacgagagtgaaactgaactacttggaccagattgccaaattctgggaaatccagggctcctccttaaagattcccaatgtagaacggcggatcttggacctctacagtctcagcaaaattgtggtggaggaaggtggttatgaagctatctgcaaggaccgtcggtgggctcgggtagcccagcgcctcaactatccaccaggcaaaaatattggctccttgctacgctcccactacgaacgcattgtttatccctatgaaatgtaccagtctggagccaaccttgtgtgtaacacacgtccatttgataatgaggagaaggacaaggaatacaaaccccacagcatccccctacgacagtctgtgcagccttccaagttcaacagctatggccggcgggccaagagactgcagcctgatccggaacccacagaggaagacattgagaagaatccagagctgaaaaagctacagatctatggggcaggccccaagatgatgggcctgggcctcatggccaaagacaagactctgcggaagaaagataaggaggggcctgagtgtccccccacagtagtggtgaaggaggagttaggtggggatgtgaaggtggagtcaacatcgcctaagaccttcctggagagcaaggaggagctgagtcacagcccagaaccctgcaccaagatgaccatgaggctacggaggaaccacagcaatgcccagtttattgagtcatatgtctgccggatgtgttctcgaggggatgaggatgacaagctcctgctgtgtgatggctgtgatgacaactaccacatcttctgcctgctgcctcctctgcctgagatccccaagggtgtctggcggtgcccaaagtgtgtcatggcggagtgtaagcggcccccagaagcctttggctttgagcaggctacccgggaatacactctgcagagctttggcgagatggccgactcctttaaagctgactacttcaacatgcccgtgcatatggtgcccacagaacttgtggagaaggagttctggaggctggtaaatagcattgaggaagatgtgactgttgagtatggagctgacatccattccaaagaatttggcagcggtttccctgtcagtgacagtaaacggcacctaacccccgaagaggaggagtatgctaccagtggttggaacctaaatgtgatgccggtgttggaacagtctgtactgtgccacatcaatgcagatatctctggcatgaaggtgccctggctctacgtgggcatggtcttctcagccttttgctggcatattgaggatcactggagttactccattaactacctccactggggtgagccgaagacctggtatggggtgccctcacttgcagcagaacatttggaagaagtgatgaagaagctgacacctgaactatttgatagccagcctgacctcctgcaccaacttgtcaccctcatgaatcccaacaccctcatgtcccatggtgtgccagttgtccgcacaaaccagtgtgcaggagagtttgtcatcaccttcccccgtgcttaccacagcggcttcaaccaaggctacaactttgccgaggctgtcaacttttgcactgctgactggttgcctgctgggcgccagtgcattgagcactaccgccggctccggagatactgcgtcttctcccatgaggagcttatctgcaagatggctgcctgcccagagaagctagacctgaacctggcggcagctgtgcataaggagatgttcatcatggtgcaagaagagcggcgtctacgaaaggccctgctggagaagggtatcacagaggctgagcgagaggctttcgagctgctcccagatgatgagcgccagtgtatcaagtgcaagactacgtgtttcctgtcagccctggcctgctacgactgcccagacggccttgtctgcctttcccacatcaatgatctctgcaagtgctccagtagccggcagtacctgcggtatcggtataccttggatgagcttcctgccatgctgcataagctgaaggttcgggctgagtcctttgacacctgggccaacaaagtgcgagtggccctggaggtggaggatgggcggaagcgcagccttgaagaactgagggcactagagtctgaagcccgtgagcggaggtttcctaatagtgagctgctgcagcaactaaagaactgcctgagtgaggcagaggcttgcgtgtcccgagctctgggactggtcagcggccaggaagctggcccccacagggtggctggtctacagatgaccctgactgagctccgggcctttctggaccagatgaacaacctgccttgcgccatgcaccagattggggatgtcaagggtgttctggaacaggtggaggcctaccaggctgaggctcgtgaggccctggcctcactgccctccagtccagggctactgcagtccctgttggagagggggcggcagctgggggtggaggtgcctgaggcccagcagctccagcggcaggtggaacaggcgcgatggctggatgaggtgaaacgcacactggccccctcagcccgaaggggcaccttggctgtcatgcgaggactgttggtcgcgggtgccagtgtagcccctagccctgctgtggataaagcccaggccgagctgcaggaactgctgaccattgctgaacgctgggaggagaaagcccacctctgcctggaggccaggcagaagcatccaccagccacacttgaggccataatccgtgaagcggaaaacatccctgttcacctgcccaacatccaggctctcaaggaggctcttgctaaggcccgggcctggattgctgatgttgatgagatccaaaatggtgaccactacccctgcctggatgacttggagggcctagtagctgtgggccgggacctacctgtggggctggaggagctgagacagctagagctacaggtactgacagcgcactcctggagggagaaggcctccaagaccttcctcaagaaaaattcttgctacacgctgctggaggttctctgcccatgtgcagatgccggctcagacagcaccaagcgcagccggtggatggagaaggagctggggttgtacaaatctgacacagagctgctggggctgtctgcgcaggacctcagggacccaggctctgtgatcgtggccttcaaggagggggaacagaaggagaaggagggtatcctgcagctgcgtcgcaccaattcggccaagcccagtccactggcatcatcgagcacggcctcctctacaacctctatctgtgtgtgtgggcaggtgctggctggggcgggagctctgcagtgtgacctgtgtcaggactggttccatgggcggtgtgtgtcagtgcctcgcctcctcagctctccgaggcccaatcccacctcatccccactgctggcctggtgggaatgggacaccaaattcctgtgtccactgtgtatgcgctcaaggcgcccgcgcctggagaccatcctggcactgctggtagccctgcagagactgcctgtgcggctgcccgagggcgaggccctgcagtgcctcacagagagggccatcagctggcaaggccgcgccaggcaggctctggcctctgaagatgtgactgctcttttgggacggctggctgagctccgccaacggctacaggctgaacctagacctgaggagcctcctaactaccctgcagcccctgcttctgaccccctcagagagggcagtggcaaggatatgcctaaggtccagggcttactggagaatggagacagtgtgaccagtcctgagaaggtagccccggaggagggctcaggtaagagagatctggagctgctgtcctcgctgttgccacagttgactggccctgtgttggaactgcctgaggcaacccgggcccccttggaggagctcatgatggagggggacctgctcgaggtgaccctggatgagaaccacagcatatggcagctgctgcaggctggacagcccccagacctggagaggatccgcacacttctggagctggagaaggcagagcgtcacgggagtcgggctcggggccgggccctggagaggcggcggcggcggaaggtggatcggggtggggagggcgatgacccagcccgagaggagctagagccaaagagggtacggagctcagggccagaggctgaggaggtccaggaggaggaagagctggaggaggagactgggggtgagggcccccctgcacccatccccaccactggcagccccagcacccaggagaaccagaatggcttggaaccggcggaagggaccacttcaggcccctcggcccctttctccactctgactccccggctgcatctgccctgcccacagcagccgcctcagcaacagttgtgacagtggctgagcctagcacagaccctgacagagacccccctcggcctcaaggatcctctttctgaccatcaagcctgcttcttggggggtgggcgggtaggggggtggccatccctgctacccgcccacccctgagtcccttgacttttgtattctgactccaaggtattgttcagacctcagctcctgggggccggcccctggagtcttccctccctggtagcctctaaccagcattcccagacacctgaggcagatagatggatgggctggtgggcaggggggtggctggggctgggccatcaccattccagagacaaggccagtgtatatgcaaactgggggactctcctcccttctctccccagttctggtcctggccaggccatgctacactaacccctgcccccactctcctcccctcttttccttccttcctacccccttctccctctcccttcccctgactgttccacccaggaggaggaaacttcacatagccgtgctcacagttttttattttaaaggaatttggctggggagctgaacagggctccctgtgatctgaagaaagcttttggtgcttgtcctcacaaccacctcagtcctccctccctgtcctcccctgtctcctttcctcctcctgggttcatgttgtaataaaagaagattgttggtgtgtaattaatttgttcaaaagaaaaaaaaaa

SEQ ID NO: 150205 - DNA, 766 bp, Homo sapiens
  Payload ID: 9657
  Gene Symbol: KDM5C
  Gene Name: lysine (K)-specific demethylase 5C
  ENST ID: ENST00000428012
  CDS Start-End: 306-605
ggcggcggcggcgctgaaggccgcggcgtttgggaggtaactgtggtggcgaaggctgcggtagtggggaggcaaccacacagtttggaagaaacggagcgggacgaagaggcggtagcagtagagtcagcctgagactctcagagcacgacggccacacgcccccttaggccctcggcgggcggcggctgccccgcttagggcctagcctccgagcattgcctcggcttcaaacagcggcggcgccatgagtccttaagggcggtccaagcctcccgatccctggcccagacctcgggcccaccatggagccggggtccgacgatttcctaccgccaccggagtgcccggtgttcgagcctagctgggccgagttccgagaccctcttggctacatcgcgaaaatcaggcccatcgcagagaaatcgggcatttgcaagatccgcccacccgcggactggcagccaccctttgctgtggaagtggacaacttcaggtttaccccccgaatccagaggctgaatgagctagagttccagctactcaggaggctgaggcaggaggatcacttgagcccaggaggtcaagtctacagtcagccgtgattgcaccactccattccagcttgggcgacagagcaagaccgtctcaaaaaaacaaaaacgaaagaaatgagagtgaggcccagacgagagtgaaactgaactacttggaccagattgccaaattctgggaaatccagggctcctccttaaagattcccaat

SEQ ID NO: 150206 - DNA, 870 bp, Homo sapiens
  Payload ID: 9657
  Gene Symbol: KDM5C
  Gene Name: lysine (K)-specific demethylase 5C
  ENST ID: ENST00000429877
  CDS Start-End: 320-481
tgacaaaccaagatggcggcggcggcgctgaaggccgcggcgtttgggaggtaactgtggtggcgaaggctgcggtagtggggaggcaaccacacagtttggaagaaacggagcgggacgaagaggcggtagcagtagagtcagcctgagactctcagagcacgacggccacacgcccccttaggccctcggcgggcggcggctgccccgcttagggcctagcctccgagcattgcctcggcttcaaacagcggcggcgccatgagtccttaagggcggtccaagcctcccgatccctggcccagacctcgggcccaccatggagccggggtccgacgatttcctaccgccaccggagtgcccggtgttcgagcctagctgggccgagttccgagaccctcttggctacatcgcgaaaatcaggcccatcgcagagaaatcgggcatttgcaagatccgcccacccgcggcaggtgtatgagagaggatctacaggaagccttccagactgggactggcagccaccctttgctgtggaagtggacaacttcaggtttaccccccgaatccagaggctgaatgagctagaggcccagacgagagtgaaactgaactacttggaccagattgccaaattctgggaaatccagggctcctccttaaagattcccaatgtagaacggcggatcttggacctctacagtctcagcaaaattgtggtggaggaaggtggttatgaagctatctgcaaggaccgtcggtgggctcgggtagcccagcgcctcaactatccaccaggcaaaaatattggctccttgctacgctcccactacgaacgcattgtttatccctatgaaatgtaccagtctg

SEQ ID NO: 150207 - DNA, 6096 bp, Homo sapiens
  Payload ID: 9657
  Gene Symbol: KDM5C
  Gene Name: lysine (K)-specific demethylase 5C
  Uniprot ID: P41229
  ENST ID: ENST00000452825
  CDS Start-End: 534-4673
cttgttcctccgccgttgcaatgaactattttctctcagtccggggtggtacttttgagtaaccccttccaaatagaaacccataccagcctatttagctcggtctccactatatgaaggtttcctagggcttggtgtgacgcaacgtatacgaggctcggaaggacaccccgcggaaggatccggtttgttgtggtgtggggaggggagacgctgacaaaccaagatggcggcggcggcgctgaaggccgcggcgtttgggaggtaactgtggtggcgaaggctgcggtagtggggaggcaaccacacagtttggaagaaacggagcgggacgaagaggcggtagcagtagagtcagcctgagactctcagagcacgacggccacacgcccccttaggccctcggcgggcggcggctgccccgcttagggcctagcctccgagcattgcctcggcttcaaacagcggcggcgccatgagtccttaagggcggtccaagcctcccgatccctggcccagacctcgggcccaccatggagccggggtccgacgatttcctaccgccaccggagtgcccggtgttcgagcctagctgggccgagttccgagaccctcttggctacatcgcgaaaatcaggcccatcgcagagaaatcgggcatttgcaagatccgcccacccgcgattgtggtggaggaaggtggttatgaagctatctgcaaggaccgtcggtgggctcgggtagcccagcgcctcaactatccaccaggcaaaaatattggctccttgctacgctcccactacgaacgcattgtttatccctatgaaatgtaccagtctggagccaaccttgtgcagtgtaacacacgtccatttgataatgaggagaaggacaaggaatacaaaccccacagcatccccctacgacagtctgtgcagccttccaagttcaacagctatggccggcgggccaagagactgcagcctgatccggaacccacagaggaagacattgagaagaatccagagctgaaaaagctacagatctatggggcaggccccaagatgatgggcctgggcctcatggccaaagacaagactctgcggaagaaagataaggaggggcctgagtgtccccccacagtagtggtgaaggaggagttaggtggggatgtgaaggtggagtcaacatcgcctaagaccttcctggagagcaaggaggagctgagtcacagcccagaaccctgcaccaagatgaccatgaggctacggaggaaccacagcaatgcccagtttattgagtcatatgtctgccggatgtgttctcgaggggatgaggatgacaagctcctgctgtgtgatggctgtgatgacaactaccacatcttctgcctgctgcctcctctgcctgagatccccaagggtgtctggcggtgcccaaagtgtgtcatggcggagtgtaagcggcccccagaagcctttggctttgagcaggctacccgggaatacactctgcagagctttggcgagatggccgactcctttaaagctgactacttcaacatgcccgtgcatatggtgcccacagaacttgtggagaaggagttctggaggctggtaaatagcattgaggaagatgtgactgttgagtatggagctgacatccattccaaagaatttggcagcggtttccctgtcagtgacagtaaacggcacctaacccccgaagaggaggagtatgctaccagtggttggaacctaaatgtgatgccggtgttggaacagtctgtactgtgccacatcaatgcagatatctctggcatgaaggtgccctggctctacgtgggcatggtcttctcagccttttgctggcatattgaggatcactggagttactccattaactacctccactggggtgagccgaagacctggtatggggtgccctcacttgcagcagaacatttggaagaagtgatgaagaagctgacacctgaactatttgatagccagcctgacctcctgcaccaacttgtcaccctcatgaatcccaacaccctcatgtcccatggtgtgccagttgtccgcacaaaccagtgtgcaggagagtttgtcatcaccttcccccgtgcttaccacagcggcttcaaccaaggctacaactttgccgaggctgtcaacttttgcactgctgactggttgcctgctgggcgccagtgcattgagcactaccgccggctccggagatactgcgtcttctcccatgaggagcttatctgcaagatggctgcctgcccagagaagctagacctgaacctggcggcagctgtgcataaggagatgttcatcatggtgcaagaagagcggcgtctacgaaaggccctgctggagaagggtatcacagaggctgagcgagaggctttcgagctgctcccagatgatgagcgccagtgtatcaagtgcaagactacgtgtttcctgtcagccctggcctgctacgactgcccagacggccttgtctgcctttcccacatcaatgatctctgcaagtgctccagtagccggcagtacctgcggtatcggtataccttggatgagcttcctgccatgctgcataagctgaaggttcgggctgagtcctttgacacctgggccaacaaagtgcgagtggccctggaggtggaggatgggcggaagcgcagccttgaagaactgagggcactagagtctgaagcccgtgagcggaggtttcctaatagtgagctgctgcagcaactaaagaactgcctgagtgaggcagaggcttgcgtgtcccgagctctgggactggtcagcggccaggaagctggcccccacagggtggctggtctacagatgaccctgactgagctccgggcctttctggaccagatgaacaacctgccttgcgccatgcaccagattggggatgtcaagggtgttctggaacaggtggaggcctaccaggctgaggctcgtgaggccctggcctcactgccctccagtccagggctactgcagtccctgttggagagggggcggcagctgggggtggaggtgcctgaggcccagcagctccagcggcaggtggaacaggcgcgatggctggatgaggtgaaacgcacactggccccctcagcccgaaggggcaccttggctgtcatgcgaggactgttggtcgcgggtgccagtgtagcccctagccctgctgtggataaagcccaggccgagctgcaggaactgctgaccattgctgaacgctgggaggagaaagcccacctctgcctggaggccaggcagaagcatccaccagccacacttgaggccataatccgtgaagcggaaaacatccctgttcacctgcccaacatccaggctctcaaggaggctcttgctaaggcccgggcctggattgctgatgttgatgagatccaaaatggtgaccactacccctgcctggatgacttggagggcctagtagctgtgggccgggacctacctgtggggctggaggagctgagacagctagagctacaggtactgacagcgcactcctggagggagaaggcctccaagaccttcctcaagaaaaattcttgctacacgctgctggaggttctctgcccatgtgcagatgccggctcagacagcaccaagcgcagccggtggatggagaaggagctggggttgtacaaatctgacacagagctgctggggctgtctgcgcaggacctcagggacccaggctctgtgatcgtggccttcaaggagggggaacagaaggagaaggagggtatcctgcagctgcgtcgcaccaattcggccaagcccagtccactggcatcatcgagcacggcctcctctacaacctctatctgtgtgtgtgggcaggtgctggctggggcgggagctctgcagtgtgacctgtgtcaggactggttccatgggcggtgtgtgtcagtgcctcgcctcctcagctctccgaggcccaatcccacctcatccccactgctggcctggtgggaatgggacaccaaattcctgtgtccactgtgtatgcgctcaaggcgcccgcgcctggagaccatcctggcactgctggtagccctgcagagactgcctgtgcggctgcccgagggcgaggccctgcagtgcctcacagagagggccatcagctggcaaggccgcgccaggcaggctctggcctctgaagatgtgactgctcttttgggacggctggctgagctccgccaacggctacaggctgaacctagacctgaggagcctcctaactaccctgcagcccctgcttctgaccccctcagagagggcagtggcaaggatatgcctaaggtccagggcttactggagaatggagacagtgtgaccagtcctgagaaggtagccccggaggagggctcagatctggagctgctgtcctcgctgttgccacagttgactggccctgtgttggaactgcctgaggcaacccgggcccccttggaggagctcatgatggagggggacctgctcgaggtgaccctggatgagaaccacagcatccctgagtcccttgacttttgtattctgactccaaggtattgttcagacctcagctcctgggggccggcccctggagtcttccctccctggtagcctctaaccagcattcccagacacctgaggcagatagatggatgggctggtgggcaggggggtggctggggctgggccatcaccattccagagacaaggccagtgtatatgcaaactgggggactctcctcccttctctccccagttctggtcctggccaggccatgctacactaacccctgcccccactctcctcccctcttttccttccttcctacccccttctccctctcccttcccctgactgttccacccaggaggaggaaacttcacatagccgtgctcacagttttttattttaaaggaatttggctggggagctgaacagggctccctgtgatctgaagaaagcttttggtgcttgtcctcacaaccacctcagtcctccctccctgtcctcccctgtctcctttcctcctcctgggttcatgttgtaataaaagaagattgttggtgtgtaattaatttgttcaaaagaaaaaaaaaagcaaaacaagaaacttggttccaactgaagcctattttaattttattttattattttcctcttgttagaaataaaacccttagaaacattttttggaaacatgtttctgaagtgcatttctcttagacggggaagacagtgcttccatcaccagtcagtggagcagctgtagtgctggcaggagcactagggctgaagccagggagctctgggttctgaaatcaagttccaccagcttcttaaccttgggcaagacattctgatcctcccccgactctaaccccaagccactttccctcaagtccaaacagatgggctcgggccccctcacccaaactcctacactacaacctcccccagttgatgccctccagtttatcctcctcaagctcccaaagggatttttttgttaatggctttattgagatataatttacatactataaaattcacttgtttgaaatgtacaattcagtgatttggggggtttctaaagtgtagatctgattatatactgcttaaaaccttccatgatgctttattgcccttaagattatacatagaatctcgttcttcctagaatgttttcctgtctaacccatctactgcataattccctgatttttctccacaggttatgcccctgatgaatggggactaaagctcagatgtgtggtcatttgcaacccctgagttcacttttttaagacagcttattgatatatataatgtacataccatacagtcacccacttaaaagtatacaattaaatagcttttagtatattcagagttgtgcagccatcattcgaaaaaaaatttcagaacattttcatcactgcagaaagaaactccatatcccttaggcgtcctttacccctcatcccatttgcctattctggacattttacataaatggaatcgtataatatgtga

SEQ ID NO: 150208 - DNA, 5472 bp, Homo sapiens
  Payload ID: 9658
  Gene Symbol: KDM5D
  Gene Name: lysine (K)-specific demethylase 5D
  Uniprot ID: Q9BY66
  ENST ID: ENST00000317961
  CDS Start-End: 273-4892
cggccatactatttttatcttgctttttcgttctgtcgcagtactgtttaatatgagtccagcgacggctctgtgactgttttcctctggtaaaatcgctcttgcgtcctcagcgtttatctcaggtgcggaaggtctcacaggtttggaaatagcgccggaaaaatcgatccgcggagtgagacggctcgtaccacactgcagggcccggaggtcaagatggtggctgtaaaactaggatccctgacgattgcttagcattaaggcccgacatggaaccggggtgtgacgagttcctgccgccaccggagtgcccggtttttgagcctagctgggctgaattccaagacccgcttggctacattgcgaaaataaggcccatagcagagaagtctggcatctgcaaaatccgcccacccgcggattggcagcctccttttgcagtagaagttgacaatttcagatttactcctcgcgtccaaaggctaaatgaactggaggcccaaactagagtgaaattgaactatttggatcagattgcaaaattctgggaaattcaaggctcctctttaaagattcccaatgtggagcggaagatcttggacctctacagccttagtaagattgtgattgaggaaggtggctatgaagccatctgcaaggatcgtcggtgggctcgagttgcccagcgtctccactacccaccaggcaaaaacattggctccctgctacgatcacattacgaacgcattatttacccctatgaaatgtttcagtctggagccaaccatgtgcaatgtaacacacacccgtttgacaatgaggtaaaagataaggaatacaagccccacagcatcccccttagacagtctgtgcagccttcaaagttcagcagctacagtcgacgggcaaaaaggctacagcctgatccagagcctacagaggaggacattgagaagcatccagagctaaagaagttacagatatatgggccaggtcccaaaatgatgggcttgggccttatggctaaggataaggataagactgtgcataagaaagtcacatgccccccaactgttacggtgaaggatgagcaaagtggaggtgggaacgtgtcatcaacattgctcaagcagcacttgagcctagagccctgcactaagacaaccatgcaacttcgaaagaatcacagcagtgcccagtttattgactcatatatttgccaagtatgctcccgtggggatgaagatgataagcttcttttctgtgatggctgtgatgacaattaccacatcttctgcttgttaccaccccttcctgaaatccccagaggcatctggaggtgcccaaaatgtatcttggcggagtgtaaacagcctcctgaagcttttggatttgaacaggctacccaggagtacagtttgcagagttttggtgaaatggctgattccttcaagtccgactacttcaacatgcctgtacatatggtgcctacagaacttgtagagaaggaattctggaggctggtgagcagcattgaggaagacgtgacagttgaatatggagctgatattcattccaaagaatttggcagtggctttcctgtcagcaatagcaaacaaaacttatctcctgaggagaaggagtatgcgaccagtggttggaacctgaatgtgatgccagtgctagatcagtctgttctctgtcacatcaatgcagacatctcaggcatgaaggtgccctggctgtacgtgggcatggttttctcagcattttgttggcatattgaggatcactggagttactctattaactatctgcattggggtgagccgaagacctggtatggtgtaccctccctggcagcagagcatttggaggaggtgatgaagatgctgacacctgagctgtttgatagccagcctgatctcctacaccagcttgtcactctcatgaatcccaacactttgatgtcccatggtgtgccagttgtccgcacaaaccagtgtgcaggggagtttgtcatcacttttcctcgtgcttaccacagtggttttaaccaaggctacaattttgctgaagctgtcaacttttgtactgctgactggctacctgctggacgccagtgcattgaacactaccgccggctccggcgctattgtgtcttctcccacgaggagctcatctgcaagatggctgccttcccagagacgttggatctcaatctagcagtagctgtgcacaaggagatgttcattatggttcaggaggagcgacgtctacgaaaggcccttttggagaagggcgtcacggaggctgagcgagaggcttttgagctgctcccagatgatgaacgccagtgcatcaagtgcaagaccacgtgcttcttgtcagccctggcctgctacgactgcccagatggccttgtatgcctttcccacatcaatgacctctgcaagtgctctagtagccgacagtacctccggtatcggtacaccttggatgagctccccaccatgctgcataaactgaagattcgggctgagtcttttgacacctgggccaacaaagtgcgagtggccttggaggtggaggatggccgtaaacgcagctttgaagagctaagggcactggagtctgaggctcgtgagaggaggtttcctaatagtgagctgcttcagcgactgaagaactgcctgagtgaggtggaggcttgtattgctcaagtcctggggctggtcagtggtcaggtggccaggatggacactccacagctgaccttgactgaactccgggtccttcttgagcagatgggcagcctgccctgtgccatgcatcagattggggatgtcaaggatgtcctggaacaggtggaggcctatcaagctgaggctcgtgaggctctggccacactgccctctagtccagggctattgcggtccctgttggagagggggcagcagctgggtgtagaggtgcctgaagcccatcagcttcagcagcaggtggagcaggcgcaatggctagatgaagtgaagcaggccctggccccttctgctcacaggggctctctggtcatcatgcaggggcttttggttatgggtgccaagatagcctccagcccttctgtggacaaggcccgggctgagctgcaagaactactgaccattgcagagcgctgggaagaaaaggctcatttctgcctggaggccaggcagaagcatccaccagccacattggaagccataattcgtgagacagaaaacatccctgttcacctgcctaacatccaggctctcaaagaagctctgactaaggcacaagcttggattgctgatgtggatgagatccaaaatggtgaccactacccctgtctagatgacttggagggcctggtggctgtgggccgggacctgcctgtggggctggaagagctgagacagctagagctgcaggtattgacagcacattcctggagagagaaggcctccaagacctttctcaagaagaattcttgctacacactgcttgaggtgctttgcccgtgtgcagacgctggctcagacagcaccaagcgtagccggtggatggagaaggcgctggggttgtaccagtgtgacacagagctgctggggctgtctgcacaggacctcagagacccaggctctgtgattgtggccttcaaggaaggggaacagaaggagaaggagggtatcctgcagctgcgtcgcaccaactcagccaagcccagtccactggcaccatccctcatggcctcttctccgacttctatctgtgtgtgtgggcaggtgccagctggggtgggagttctgcagtgtgacctgtgtcaggactggttccatgggcagtgtgtgtcagtgccccatctcctcacctctccaaagcccagtctcacttcatctccactgctagcctggtgggaatgggacacaaaattcctgtgtccactgtgtatgcgctcacgacggccacgcctagagacaatcctagccttgctggttgccctgcagaggctgcccgtgcggctgcctgagggtgaggcccttcagtgtctcacagagagggccattggctggcaagaccgtgccagaaaggctctggcctctgaagatgtgactgctctgttgcgacagctggctgagcttcgccaacagctacaggccaaacccagaccagaggaggcctcagtctacacttcagccactgcctgtgaccctatcagagaaggcagtggcaacaatatttctaaggtccaagggctgctggagaatggagacagtgtgaccagtcctgagaacatggctccaggaaagggctctgacctggagctactgtcctcactgttgccgcagttgactggccctgtgttggagctgcctgaggcaatccgggctcccctggaggagctcatgatggaaggggacctgcttgaggtgaccctggatgagaaccacagcatctggcagctgctgcaggctggacagcctccagacctggacagaattcgcacacttctggagctggaaaaatttgaacatcaagggagtcggacaaggagccgggctctggagaggcgacggcggcggcagaaggtggatcagggtagaaacgttgagaatcttgttcaacaggagcttcagtcaaaaagggctcggagctcagggattatgtctcaggtgggccgagaagaagaacattatcaggagaaagcagaccgtgaaaatatgttcctgacaccttccacagaccacagccctttcttgaaaggaaaccaaaatagcttacaacacaaggattcaggctcttcagctgcttgtccttctttaatgcctttgctacaactctcctactctgatgagcaacagttgtgacagtggcaccaaaggtcatttgtggttgtttttgtttgtttgtttcttaaatcctactatctcctggcctggacctcagaaggagctttttgcttatctataatttttcactgccaatttttgatatcctctctcctagagttactgttaaaaggttggttcgtaaagtccacaccccgatgctcagaagtgtcttgccagcaacattcctgctagcatacaggagtgatttcctaaaccagtttcattctagtctgaatagggacaaacaaatcttgaggaagcccaagtgcgtacctttatttttgcccccaccaccctctttctgtacttcaatttttgtttgttttttgtttttttgtccctgtcataaaatattttggtgcttcaaaacttgtaccttcattgtacatccttttcttttctccccttgggtcttattataaaagaagacaatgtacgttgtaattaccaaaaagaatagggaaaaacaagaatttcatgactctacctgtggtctatctttaatttcatttcttttgttaaaaataaaacaatgagtatgtttggatactatgaa

SEQ ID NO: 150209 - DNA, 5134 bp, Homo sapiens
  Payload ID: 9658
  Gene Symbol: KDM5D
  Gene Name: lysine (K)-specific demethylase 5D
  Uniprot ID: Q9BY66
  ENST ID: ENST00000382806
  CDS Start-End: 111-4559
aaaatcgatccgcggagtgagacggctcgtaccacactgcagggcccggaggtcaagatggtggctgtaaaactaggatccctgacgattgcttagcattaaggcccgacatggaaccggggtgtgacgagttcctgccgccaccggagtgcccggtttttgagcctagctgggctgaattccaagacccgcttggctacattgcgaaaataaggcccatagcagagaagtctggcatctgcaaaatccgcccacccgcggattggcagcctccttttgcagtagaagttgacaatttcagatttactcctcgcgtccaaaggctaaatgaactggaggcccaaactagagtgaaattgaactatttggatcagattgcaaaattctgggaaattcaaggctcctctttaaagattcccaatgtggagcggaagatcttggacctctacagccttagtaagcaatgtaacacacacccgtttgacaatgaggtaaaagataaggaatacaagccccacagcatcccccttagacagtctgtgcagccttcaaagttcagcagctacagtcgacgggcaaaaaggctacagcctgatccagagcctacagaggaggacattgagaagcatccagagctaaagaagttacagatatatgggccaggtcccaaaatgatgggcttgggccttatggctaaggataaggataagactgtgcataagaaagtcacatgccccccaactgttacggtgaaggatgagcaaagtggaggtgggaacgtgtcatcaacattgctcaagcagcacttgagcctagagccctgcactaagacaaccatgcaacttcgaaagaatcacagcagtgcccagtttattgactcatatatttgccaagtatgctcccgtggggatgaagatgataagcttcttttctgtgatggctgtgatgacaattaccacatcttctgcttgttaccaccccttcctgaaatccccagaggcatctggaggtgcccaaaatgtatcttggcggagtgtaaacagcctcctgaagcttttggatttgaacaggctacccaggagtacagtttgcagagttttggtgaaatggctgattccttcaagtccgactacttcaacatgcctgtacatatggtgcctacagaacttgtagagaaggaattctggaggctggtgagcagcattgaggaagacgtgacagttgaatatggagctgatattcattccaaagaatttggcagtggctttcctgtcagcaatagcaaacaaaacttatctcctgaggagaaggagtatgcgaccagtggttggaacctgaatgtgatgccagtgctagatcagtctgttctctgtcacatcaatgcagacatctcaggcatgaaggtgccctggctgtacgtgggcatggttttctcagcattttgttggcatattgaggatcactggagttactctattaactatctgcattggggtgagccgaagacctggtatggtgtaccctccctggcagcagagcatttggaggaggtgatgaagatgctgacacctgagctgtttgatagccagcctgatctcctacaccagcttgtcactctcatgaatcccaacactttgatgtcccatggtgtgccagttgtccgcacaaaccagtgtgcaggggagtttgtcatcacttttcctcgtgcttaccacagtggttttaaccaaggctacaattttgctgaagctgtcaacttttgtactgctgactggctacctgctggacgccagtgcattgaacactaccgccggctccggcgctattgtgtcttctcccacgaggagctcatctgcaagatggctgccttcccagagacgttggatctcaatctagcagtagctgtgcacaaggagatgttcattatggttcaggaggagcgacgtctacgaaaggcccttttggagaagggcgtcacggaggctgagcgagaggcttttgagctgctcccagatgatgaacgccagtgcatcaagtgcaagaccacgtgcttcttgtcagccctggcctgctacgactgcccagatggccttgtatgcctttcccacatcaatgacctctgcaagtgctctagtagccgacagtacctccggtatcggtacaccttggatgagctccccaccatgctgcataaactgaagattcgggctgagtcttttgacacctgggccaacaaagtgcgagtggccttggaggtggaggatggccgtaaacgcagctttgaagagctaagggcactggagtctgaggctcgtgagaggaggtttcctaatagtgagctgcttcagcgactgaagaactgcctgagtgaggtggaggcttgtattgctcaagtcctggggctggtcagtggtcaggtggccaggatggacactccacagctgaccttgactgaactccgggtccttcttgagcagatgggcagcctgccctgtgccatgcatcagattggggatgtcaaggatgtcctggaacaggtggaggcctatcaagctgaggctcgtgaggctctggccacactgccctctagtccagggctattgcggtccctgttggagagggggcagcagctgggtgtagaggtgcctgaagcccatcagcttcagcagcaggtggagcaggcgcaatggctagatgaagtgaagcaggccctggccccttctgctcacaggggctctctggtcatcatgcaggggcttttggttatgggtgccaagatagcctccagcccttctgtggacaaggcccgggctgagctgcaagaactactgaccattgcagagcgctgggaagaaaaggctcatttctgcctggaggccaggcagaagcatccaccagccacattggaagccataattcgtgagacagaaaacatccctgttcacctgcctaacatccaggctctcaaagaagctctgactaaggcacaagcttggattgctgatgtggatgagatccaaaatggtgaccactacccctgtctagatgacttggagggcctggtggctgtgggccgggacctgcctgtggggctggaagagctgagacagctagagctgcaggtattgacagcacattcctggagagagaaggcctccaagacctttctcaagaagaattcttgctacacactgcttgaggtgctttgcccgtgtgcagacgctggctcagacagcaccaagcgtagccggtggatggagaaggcgctggggttgtaccagtgtgacacagagctgctggggctgtctgcacaggacctcagagacccaggctctgtgattgtggccttcaaggaaggggaacagaaggagaaggagggtatcctgcagctgcgtcgcaccaactcagccaagcccagtccactggcaccatccctcatggcctcttctccgacttctatctgtgtgtgtgggcaggtgccagctggggtgggagttctgcagtgtgacctgtgtcaggactggttccatgggcagtgtgtgtcagtgccccatctcctcacctctccaaagcccagtctcacttcatctccactgctagcctggtgggaatgggacacaaaattcctgtgtccactgtgtatgcgctcacgacggccacgcctagagacaatcctagccttgctggttgccctgcagaggctgcccgtgcggctgcctgagggtgaggcccttcagtgtctcacagagagggccattggctggcaagaccgtgccagaaaggctctggcctctgaagatgtgactgctctgttgcgacagctggctgagcttcgccaacagctacaggccaaacccagaccagaggaggcctcagtctacacttcagccactgcctgtgaccctatcagagaaggcagtggcaacaatatttctaaggtccaagggctgctggagaatggagacagtgtgaccagtcctgagaacatggctccaggaaagggctctgacctggagctactgtcctcactgttgccgcagttgactggccctgtgttggagctgcctgaggcaatccgggctcccctggaggagctcatgatggaaggggacctgcttgaggtgaccctggatgagaaccacagcatctggcagctgctgcaggctggacagcctccagacctggacagaattcgcacacttctggagctggaaaaatttgaacatcaagggagtcggacaaggagccgggctctggagaggcgacggcggcggcagaaggtggatcagggtagaaacgttgagaatcttgttcaacaggagcttcagtcaaaaagggctcggagctcagggattatgtctcaggtgggccgagaagaagaacattatcaggagaaagcagaccgtgaaaatatgttcctgacaccttccacagaccacagccctttcttgaaaggaaaccaaaatagcttacaacacaaggattcaggctcttcagctgcttgtccttctttaatgcctttgctacaactctcctactctgatgagcaacagttgtgacagtggcaccaaaggtcatttgtggttgtttttgtttgtttgtttcttaaatcctactatctcctggcctggacctcagaaggagctttttgcttatctataatttttcactgccaatttttgatatcctctctcctagagttactgttaaaaggttggttcgtaaagtccacaccccgatgctcagaagtgtcttgccagcaacattcctgctagcatacaggagtgatttcctaaaccagtttcattctagtctgaatagggacaaacaaatcttgaggaagcccaagtgcgtacctttatttttgcccccaccaccctctttctgtacttcaatttttgtttgttttttgtttttttgtccctgtcataaaatattttggtgcttcaaaacttgtaccttcattgtacatccttttcttttctccccttgggtcttattataaaagaagacaatgtacgttgtaattaccaaaaagaatagggaaaaacaagaatttcatgactctacctgtggtctatctttaatttcatttcttttgttaaaaataaaacaatgagtatgtttggatact

SEQ ID NO: 150210 - DNA, 880 bp, Homo sapiens
  Payload ID: 9658
  Gene Symbol: KDM5D
  Gene Name: lysine (K)-specific demethylase 5D
  ENST ID: ENST00000415360
  CDS Start-End: 1-880
ctgcctaacatccaggctctcaaagaagctctgactaaggcacaagcttggattgctgatgtggatgagatccaaaatggtgaccactacccctgtctagatgacttggagggcctggtggctgtgggccgggacctgcctgtggggctggaagagctgagacagctagagctgcaggtgctttgcccgtgtgcagacgctggctcagacagcaccaagcgtagccggtggatggagaaggcgctggggttgtaccagtgtgacacagagctgctggggctgtctgcacaggacctcagagacccaggctctgtgattgtggccttcaaggaaggggaacagaaggagaaggagggtatcctgcagctgcgtcgcaccaactcagccaagcccagtccactggcaccatccctcatggcctcttctccgacttctatctgtgtgtgtgggcaggtgccagctggggtgggagttctgcagtgtgacctgtgtcaggactggttccatgggcagtgtgtgtcagtgccccatctcctcacctctccaaagcccagtctcacttcatctccactgctagcctggtgggaatgggacacaaaattcctgtgtccactgtgtatgcgctcacgacggccacgcctagagacaatcctagccttgctggttgccctgcagaggctgcccgtgcggctgcctgagggtgaggcccttcagtgtctcacagagagggccattggctggcaagaccgtgccagaaaggctctggcctctgaagatgtgactgctctgttgcgacagctggctgagcttcgccaacagctacaggccaaacccagaccagaggaggcctcagtctacacttcagccactgcctgtgacc

SEQ ID NO: 150211 - DNA, 4701 bp, Homo sapiens
  Payload ID: 9658
  Gene Symbol: KDM5D
  Gene Name: lysine (K)-specific demethylase 5D
  ENST ID: ENST00000440077
  CDS Start-End: 273-4701
cggccatactatttttatcttgctttttcgttctgtcgcagtactgtttaatatgagtccagcgacggctctgtgactgttttcctctggtaaaatcgctcttgcgtcctcagcgtttatctcaggtgcggaaggtctcacaggtttggaaatagcgccggaaaaatcgatccgcggagtgagacggctcgtaccacactgcagggcccggaggtcaagatggtggctgtaaaactaggatccctgacgattgcttagcattaaggcccgacatggaaccggggtgtgacgagttcctgccgccaccggagtgcccggtttttgagcctagctgggctgaattccaagacccgcttggctacattgcgaaaataaggcccatagcagagaagtctggcatctgcaaaatccgcccacccgcggattggcagcctccttttgcagtagaagttgacaatttcagatttactcctcgcgtccaaaggctaaatgaactggagattgtgattgaggaaggtggctatgaagccatctgcaaggatcgtcggtgggctcgagttgcccagcgtctccactacccaccaggcaaaaacattggctccctgctacgatcacattacgaacgcattatttacccctatgaaatgtttcagtctggagccaaccatgtgcaatgtaacacacacccgtttgacaatgaggtaaaagataaggaatacaagccccacagcatcccccttagacagtctgtgcagccttcaaagttcagcagctacagtcgacgggcaaaaaggctacagcctgatccagagcctacagaggaggacattgagaagcatccagagctaaagaagttacagatatatgggccaggtcccaaaatgatgggcttgggccttatggctaaggataaggataagactgtgcataagaaagtcacatgccccccaactgttacggtgaaggatgagcaaagtggaggtgggaacgtgtcatcaacattgctcaagcagcacttgagcctagagccctgcactaagacaaccatgcaacttcgaaagaatcacagcagtgcccagtttattgactcatatatttgccaagtatgctcccgtggggatgaagatgataagcttcttttctgtgatggctgtgatgacaattaccacatcttctgcttgttaccaccccttcctgaaatccccagaggcatctggaggtgcccaaaatgtatcttggcggagtgtaaacagcctcctgaagcttttggatttgaacaggctacccaggagtacagtttgcagagttttggtgaaatggctgattccttcaagtccgactacttcaacatgcctgtacatatggtgcctacagaacttgtagagaaggaattctggaggctggtgagcagcattgaggaagacgtgacagttgaatatggagctgatattcattccaaagaatttggcagtggctttcctgtcagcaatagcaaacaaaacttatctcctgaggagaaggagtatgcgaccagtggttggaacctgaatgtgatgccagtgctagatcagtctgttctctgtcacatcaatgcagacatctcaggcatgaaggtgccctggctgtacgtgggcatggttttctcagcattttgttggcatattgaggatcactggagttactctattaactatctgcattggggtgagccgaagacctggtatggtgtaccctccctggcagcagagcatttggaggaggtgatgaagatgctgacacctgagctgtttgatagccagcctgatctcctacaccagcttgtcactctcatgaatcccaacactttgatgtcccatggtgtgccagttgtccgcacaaaccagtgtgcaggggagtttgtcatcacttttcctcgtgcttaccacagtggttttaaccaaggctacaattttgctgaagctgtcaacttttgtactgctgactggctacctgctggacgccagtgcattgaacactaccgccggctccggcgctattgtgtcttctcccacgaggagctcatctgcaagatggctgccttcccagagacgttggatctcaatctagcagtagctgtgcacaaggagatgttcattatggttcaggaggagcgacgtctacgaaaggcccttttggagaagggcgtcacggaggctgagcgagaggcttttgagctgctcccagatgatgaacgccagtgcatcaagtgcaagaccacgtgcttcttgtcagccctggcctgctacgactgcccagatggccttgtatgcctttcccacatcaatgacctctgcaagtgctctagtagccgacagtacctccggtatcggtacaccttggatgagctccccaccatgctgcataaactgaagattcgggctgagtcttttgacacctgggccaacaaagtgcgagtggccttggaggtggaggatggccgtaaacgcagctttgaagagctaagggcactggagtctgaggctcgtgagaggaggtttcctaatagtgagctgcttcagcgactgaagaactgcctgagtgaggtggaggcttgtattgctcaagtcctggggctggtcagtggtcaggtggccaggatggacactccacagctgaccttgactgaactccgggtccttcttgagcagatgggcagcctgccctgtgccatgcatcagattggggatgtcaaggatgtcctggaacaggtggaggcctatcaagctgaggctcgtgaggctctggccacactgccctctagtccagggctattgcggtccctgttggagagggggcagcagctgggtgtagaggtgcctgaagcccatcagcttcagcagcaggtggagcaggcgcaatggctagatgaagtgaagcaggccctggccccttctgctcacaggggctctctggtcatcatgcaggggcttttggttatgggtgccaagatagcctccagcccttctgtggacaaggcccgggctgagctgcaagaactactgaccattgcagagcgctgggaagaaaaggctcatttctgcctggaggccaggcagaagcatccaccagccacattggaagccataattcgtgagacagaaaacatccctgttcacctgcctaacatccaggctctcaaagaagctctgactaaggcacaagcttggattgctgatgtggatgagatccaaaatggtgaccactacccctgtctagatgacttggagggcctggtggctgtgggccgggacctgcctgtggggctggaagagctgagacagctagagctgcaggtattgacagcacattcctggagagagaaggcctccaagacctttctcaagaagaattcttgctacacactgcttgaggtgctttgcccgtgtgcagacgctggctcagacagcaccaagcgtagccggtggatggagaaggcgctggggttgtaccagtgtgacacagagctgctggggctgtctgcacaggacctcagagacccaggctctgtgattgtggccttcaaggaaggggaacagaaggagaaggagggtatcctgcagctgcgtcgcaccaactcagccaagcccagtccactggcaccatccctcatggcctcttctccgacttctatctgtgtgtgtgggcaggtgccagctggggtgggagttctgcagtgtgacctgtgtcaggactggttccatgggcagtgtgtgtcagtgccccatctcctcacctctccaaagcccagtctcacttcatctccactgctagcctggtgggaatgggacacaaaattcctgtgtccactgtgtatgcgctcacgacggccacgcctagagacaatcctagccttgctggttgccctgcagaggctgcccgtgcggctgcctgagggtgaggcccttcagtgtctcacagagagggccattggctggcaagaccgtgccagaaaggctctggcctctgaagatgtgactgctctgttgcgacagctggctgagcttcgccaacagctacaggccaaacccagaccagaggaggcctcagtctacacttcagccactgcctgtgaccctatcagagaaggcagtggcaacaatatttctaaggtccaagggctgctggagaatggagacagtgtgaccagtcctgagaacatggctccaggaaagggctctgacctggagctactgtcctcactgttgccgcagttgactggccctgtgttggagctgcctgaggcaatccgggctcccctggaggagctcatgatggaaggggacctgcttgaggtgaccctggatgagaaccacagcatctggcagctgctgcaggctggacagcctccagacctggacagaattcgcacacttctggagctggaaaaatttgaacatcaagggagtcggacaaggagccgggctctggagaggcgacggcggcggcagaaggtggatcagggtagaaacgttgagaatcttgttcaacaggagcttcagtcaaaaagggctcggagctcagggattatgtctcaggtgggccgagaagaagaacattatcaggagaaagcagaccgtgaaaatatgttcctgacaccttccacagaccacagccctttcttgaaaggaaaccaaaatagcttacaacacaaggattcaggct

SEQ ID NO: 150212 - DNA, 1336 bp, Homo sapiens
  Payload ID: 9658
  Gene Symbol: KDM5D
  Gene Name: lysine (K)-specific demethylase 5D
  ENST ID: ENST00000447300
  CDS Start-End: 61-1336
ggtcaagatggtggctgtaaaactaggatccctgacgattgcttagcattaaggcccgacatggaaccggggtgtgacgagttcctgccgccaccggagtgcccggtttttgagcctagctgggctgaattccaagacccgcttggctacattgcgaaaataaggcccatagcagagaagtctggcatctgcaaaatccgcccacccgcggattggcagcctccttttgcagtagaagttgacaatttcagatttactcctcgcgtccaaaggctaaatgaactggaggcccaaactagagtgaaattgaactatttggatcagattgcaaaattctgggaaattcaaggctcctctttaaagattcccaatgtggagcggaagatcttggacctctacagccttagtaagattgtgattgaggaaggtggctatgaagccatctgcaaggatcgtcggtgggctcgagttgcccagcgtctccactacccaccaggcaaaaacattggctccctgctacgatcacattacgaacgcattatttacccctatgaaatgtttcagtctggagccaaccatgtgccagagcctacagaggaggacattgagaagcatccagagctaaagaagttacagatatatgggccaggtcccaaaatgatgggcttgggccttatggctaaggataaggataagactgtgcataagaaagtcacatgccccccaactgttacggtgaaggatgagcaaagtggaggtgggaacgtgtcatcaacattgctcaagcagcacttgagcctagagccctgcactaagacaaccatgcaacttcgaaagaatcacagcagtgcccagtttattgactcatatatttgccaagtatgctcccgtggggatgaagatgataagcttcttttctgtgatggctgtgatgacaattaccacatcttctgcttgttaccaccccttcctgaaatccccagaggcatctggaggtgcccaaaatgtatcttggcggagtgtaaacagcctcctgaagcttttggatttgaacaggctacccaggagtacagtttgcagagttttggtgaaatggctgattccttcaagtccgactacttcaacatgcctgtacatatggtgcctacagaacttgtagagaaggaattctggaggctggtgagcagcattgaggaagacgtgacagttgaatatggagctgatattcattccaaagaatttggcagtggctttcctgtcagcaatagcaaacaaaacttatctcctgaggagaaggagtatgcgaccagtggttggaacctgaatgtgatgccag

SEQ ID NO: 150213 - DNA, 5579 bp, Homo sapiens
  Payload ID: 9658
  Gene Symbol: KDM5D
  Gene Name: lysine (K)-specific demethylase 5D
  Uniprot ID: Q9BY66
  ENST ID: ENST00000541639
  CDS Start-End: 289-5001
cattttaaaaaagatccggccatactatttttatcttgctttttcgttctgtcgcagtactgtttaatatgagtccagcgacggctctgtgactgttttcctctggtaaaatcgctcttgcgtcctcagcgtttatctcaggtgcggaaggtctcacaggtttggaaatagcgccggaaaaatcgatccgcggagtgagacggctcgtaccacactgcagggcccggaggtcaagatggtggctgtaaaactaggatccctgacgattgcttagcattaaggcccgacatggaaccggggtgtgacgagttcctgccgccaccggagtgcccggtttttgagcctagctgggctgaattccaagacccgcttggctacattgcgaaaataaggcccatagcagagaagtctggcatctgcaaaatccgcccacccgcggattggcagcctccttttgcagtagaagttgacaatttcagatttactcctcgcgtccaaaggctaaatgaactggaggcccaaactagagtgaaattgaactatttggatcagattgcaaaattctgggaaattcaaggctcctctttaaagattcccaatgtggagcggaagatcttggacctctacagccttagtaagattgtgattgaggaaggtggctatgaagccatctgcaaggatcgtcggtgggctcgagttgcccagcgtctccactacccaccaggcaaaaacattggctccctgctacgatcacattacgaacgcattatttacccctatgaaatgtttcagtctggagccaaccatgtgcaatgtaacacacacccgtttgacaatgaggtaaaagataaggaatacaagccccacagcatcccccttagacagtctgtgcagccttcaaagttcagcagctacagtcgacgggcaaaaaggctacagcctgatccagagcctacagaggaggacattgagaagcatccagagctaaagaagttacagatatatgggccaggtcccaaaatgatgggcttgggccttatggctaaggataaggataagactgtgcataagaaagtcacatgccccccaactgttacggtgaaggatgagcaaagtggaggtgggaacgtgtcatcaacattgctcaagcagcacttgagcctagagccctgcactaagacaaccatgcaacttcgaaagaatcacagcagtgcccagtttattgactcatatatttgccaagtatgctcccgtggggatgaagatgataagcttcttttctgtgatggctgtgatgacaattaccacatcttctgcttgttaccaccccttcctgaaatccccagaggcatctggaggtgcccaaaatgtatcttggcggagtgtaaacagcctcctgaagcttttggatttgaacaggctacccaggagtacagtttgcagagttttggtgaaatggctgattccttcaagtccgactacttcaacatgcctgtacatatggtgcctacagaacttgtagagaaggaattctggaggctggtgagcagcattgaggaagacgtgacagttgaatatggagctgatattcattccaaagaatttggcagtggctttcctgtcagcaatagcaaacaaaacttatctcctgaggagaagagacaaagtctcactgtgttgaccaggctgatctcaagcttctgggctcaagcagtcctcccaccttggcctcccaaagtgttgggattacaggagtatgcgaccagtggttggaacctgaatgtgatgccagtgctagatcagtctgttctctgtcacatcaatgcagacatctcaggcatgaaggtgccctggctgtacgtgggcatggttttctcagcattttgttggcatattgaggatcactggagttactctattaactatctgcattggggtgagccgaagacctggtatggtgtaccctccctggcagcagagcatttggaggaggtgatgaagatgctgacacctgagctgtttgatagccagcctgatctcctacaccagcttgtcactctcatgaatcccaacactttgatgtcccatggtgtgccagttgtccgcacaaaccagtgtgcaggggagtttgtcatcacttttcctcgtgcttaccacagtggttttaaccaaggctacaattttgctgaagctgtcaacttttgtactgctgactggctacctgctggacgccagtgcattgaacactaccgccggctccggcgctattgtgtcttctcccacgaggagctcatctgcaagatggctgccttcccagagacgttggatctcaatctagcagtagctgtgcacaaggagatgttcattatggttcaggaggagcgacgtctacgaaaggcccttttggagaagggcgtcacggaggctgagcgagaggcttttgagctgctcccagatgatgaacgccagtgcatcaagtgcaagaccacgtgcttcttgtcagccctggcctgctacgactgcccagatggccttgtatgcctttcccacatcaatgacctctgcaagtgctctagtagccgacagtacctccggtatcggtacaccttggatgagctccccaccatgctgcataaactgaagattcgggctgagtcttttgacacctgggccaacaaagtgcgagtggccttggaggtggaggatggccgtaaacgcagctttgaagagctaagggcactggagtctgaggctcgtgagaggaggtttcctaatagtgagctgcttcagcgactgaagaactgcctgagtgaggtggaggcttgtattgctcaagtcctggggctggtcagtggtcaggtggccaggatggacactccacagctgaccttgactgaactccgggtccttcttgagcagatgggcagcctgccctgtgccatgcatcagattggggatgtcaaggatgtcctggaacaggtggaggcctatcaagctgaggctcgtgaggctctggccacactgccctctagtccagggctattgcggtccctgttggagagggggcagcagctgggtgtagaggtgcctgaagcccatcagcttcagcagcaggtggagcaggcgcaatggctagatgaagtgaagcaggccctggccccttctgctcacaggggctctctggtcatcatgcaggggcttttggttatgggtgccaagatagcctccagcccttctgtggacaaggcccgggctgagctgcaagaactactgaccattgcagagcgctgggaagaaaaggctcatttctgcctggaggccaggcagaagcatccaccagccacattggaagccataattcgtgagacagaaaacatccctgttcacctgcctaacatccaggctctcaaagaagctctgactaaggcacaagcttggattgctgatgtggatgagatccaaaatggtgaccactacccctgtctagatgacttggagggcctggtggctgtgggccgggacctgcctgtggggctggaagagctgagacagctagagctgcaggtattgacagcacattcctggagagagaaggcctccaagacctttctcaagaagaattcttgctacacactgcttgaggtgctttgcccgtgtgcagacgctggctcagacagcaccaagcgtagccggtggatggagaaggcgctggggttgtaccagtgtgacacagagctgctggggctgtctgcacaggacctcagagacccaggctctgtgattgtggccttcaaggaaggggaacagaaggagaaggagggtatcctgcagctgcgtcgcaccaactcagccaagcccagtccactggcaccatccctcatggcctcttctccgacttctatctgtgtgtgtgggcaggtgccagctggggtgggagttctgcagtgtgacctgtgtcaggactggttccatgggcagtgtgtgtcagtgccccatctcctcacctctccaaagcccagtctcacttcatctccactgctagcctggtgggaatgggacacaaaattcctgtgtccactgtgtatgcgctcacgacggccacgcctagagacaatcctagccttgctggttgccctgcagaggctgcccgtgcggctgcctgagggtgaggcccttcagtgtctcacagagagggccattggctggcaagaccgtgccagaaaggctctggcctctgaagatgtgactgctctgttgcgacagctggctgagcttcgccaacagctacaggccaaacccagaccagaggaggcctcagtctacacttcagccactgcctgtgaccctatcagagaaggcagtggcaacaatatttctaaggtccaagggctgctggagaatggagacagtgtgaccagtcctgagaacatggctccaggaaagggctctgacctggagctactgtcctcactgttgccgcagttgactggccctgtgttggagctgcctgaggcaatccgggctcccctggaggagctcatgatggaaggggacctgcttgaggtgaccctggatgagaaccacagcatctggcagctgctgcaggctggacagcctccagacctggacagaattcgcacacttctggagctggaaaaatttgaacatcaagggagtcggacaaggagccgggctctggagaggcgacggcggcggcagaaggtggatcagggtagaaacgttgagaatcttgttcaacaggagcttcagtcaaaaagggctcggagctcagggattatgtctcaggtgggccgagaagaagaacattatcaggagaaagcagaccgtgaaaatatgttcctgacaccttccacagaccacagccctttcttgaaaggaaaccaaaatagcttacaacacaaggattcaggctcttcagctgcttgtccttctttaatgcctttgctacaactctcctactctgatgagcaacagttgtgacagtggcaccaaaggtcatttgtggttgtttttgtttgtttgtttcttaaatcctactatctcctggcctggacctcagaaggagctttttgcttatctataatttttcactgccaatttttgatatcctctctcctagagttactgttaaaaggttggttcgtaaagtccacaccccgatgctcagaagtgtcttgccagcaacattcctgctagcatacaggagtgatttcctaaaccagtttcattctagtctgaatagggacaaacaaatcttgaggaagcccaagtgcgtacctttatttttgcccccaccaccctctttctgtacttcaatttttgtttgttttttgtttttttgtccctgtcataaaatattttggtgcttcaaaacttgtaccttcattgtacatccttttcttttctccccttgggtcttattataaaagaagacaatgtacgttgtaattaccaaaaagaatagggaaaaacaagaatttcatgactctacctgtggtctatctttaatttcatttcttttgttaaaaataaaacaatgagtatgtttggatactatg

SEQ ID NO: 150214 - DNA, 5438 bp, Homo sapiens
  Payload ID: 9659
  Gene Symbol: KDM6A
  Gene Name: lysine (K)-specific demethylase 6A
  Uniprot ID: O15550
  ENST ID: ENST00000377967
  CDS Start-End: 42-4247
ggggggtgtcggcgttggagttgtgaattcgctgcgtttccatgaaatcctgcggagtgtcgctcgctaccgccgccgctgccgccgccgctttcggtgatgaggaaaagaaaatggcggcgggaaaagcgagcggcgagagcgaggaggcgtcccccagcctgacagccgaggagagggaggcgctcggcggactggacagccgcctctttgggttcgtgagatttcatgaagatggcgccaggacgaaggccctactgggcaaggctgttcgctgctatgaatctctaatcttaaaagctgaaggaaaagtggagtctgatttcttttgtcaattaggtcacttcaacctcttattggaagattatccaaaagcattatctgcataccagaggtactacagtttacagtctgactactggaagaatgctgcctttttatatggtcttggtttggtctacttccattataatgcatttcagtgggcaattaaagcatttcaggaggtgctttatgttgatcccagcttttgtcgagccaaggaaattcatttacgacttgggcttatgttcaaagtgaacacagactatgagtctagtttaaagcattttcagttagctttggttgactgtaatccctgcactttgtccaatgctgaaattcaatttcacattgcccacttatatgaaacccagaggaaatatcattctgcaaaagaagcttatgaacaacttttgcagacagagaatctttctgcacaagtaaaagcaactgtcttacaacagttaggttggatgcatcacactgtagatctcctgggagataaagccaccaaggaaagctatgctattcagtatctccaaaagtccttggaagcagatcctaattctggccagtcctggtatttcctcggaaggtgctattcaagtattgggaaagttcaggatgcctttatatcttacaggcagtctattgataaatcagaagcaagtgcagatacatggtgttcaataggtgtgctatatcagcagcaaaatcagcccatggatgctttacaggcctatatttgtgctgtacaattggaccatggccatgctgcagcctggatggacctaggcactctctatgaatcctgcaaccagcctcaggatgccattaaatgctacttaaatgcaactagaagcaaaagttgtagtaatacctctgcacttgcagcacgaattaagtatttacaggctcagttgtgtaaccttccacaaggtagtctacagaataaaactaaattacttcctagtattgaggaggcgtggagcctaccaattcccgcagagcttacctccaggcagggtgccatgaacacagcacagcagaatacttctgacaattggagtggtggacatgctgtgtcacatcctccagtacagcaacaagctcattcatggtgtttgacaccacagaaattacagcatttggaacagctccgcgcaaatagaaataatttaaatccagcacagaaactgatgctggaacagctggaaagtcagtttgtcttaatgcaacaacaccaaatgagaccaacaggagttgcacaggtacgatctactggaattcctaatgggccaacagctgactcatcactgcctacaaactcagtctctggccagcagccacagcttgctctgaccagagtgcctagcgtctctcagcctggagtccgtcctgcctgccctgggcagcctttggccaatggacccttttctgcaggccatgttccctgtagcacatcaagaacgctgggaagtacagacactattttgataggcaataatcatataacaggaagtggaagtaatggaaacgtgccttacctgcagcgaaacgcactcactctacctcataaccgcacaaacctgaccagcagcgcagaggagccgtggaaaaaccaactatctaactccactcaggggcttcacaaaggtcagagttcacattcggcaggtcctaatggtgaacgacctctctcttccactgggccttcccagcatctccaggcagctggctctggtattcagaatcagaacggacatcccaccctgcctagcaattcagtaacacagggggctgctctcaatcacctctcctctcacactgctacctcaggtggacaacaaggcattaccttaaccaaagagagcaagccttcaggaaacatattgacggtgcctgaaacaagcaggcacactggagagacacctaacagcactgccagtgtcgagggacttcctaatcatgtccatcagatgacggcagatgctgtttgcagtcctagccatggagattctaagtcaccaggtttactaagttcagacaatcctcagctctctgccttgttgatgggaaaagccaataacaatgtgggtactggaacctgtgacaaagtcaataacatccacccagctgttcatacaaagactgataactctgttgcctcttcaccatcttcagccatttcaacagcaacaccttctccaaaatccactgagcagacaaccacaaacagtgttaccagccttaacagccctcacagtgggctacacacaattaatggagaagggatggaagaatctcagagccccatgaaaacagatctgcttctggttaaccacaaacctagtccacagatcataccatcaatgtctgtgtccatataccccagctcagcagaagttctgaaggcatgcaggaatctaggtaaaaatggcttatctaacagtagcattttgttggataaatgtccacctccaagaccaccatcttcaccataccctcccttgccaaaggacaagttgaatccacctacacctagtatttacttggaaaataaacgtgatgctttctttcctccattacatcaattttgtacaaatccgaacaaccctgttacagtaatacgtggccttgctggagctcttaagttagacctgggacttttctctactaaaactttggtggaagctaacaatgaacatatggtagaagtgaggacacagttgttgcagccagcagatgaaaactgggatcccactggaacaaagaaaatctggcattgtgaaagtaatagatctcatactacaattgctaaatatgcacagtaccaggcctcctcattccaggaatcattgagagaagaaaatgaaaaaagaagtcatcataaagaccactcagatagtgaatctacatcgtcagataattctgggaggaggaggaaaggaccctttaaaaccataaagtttgggaccaatattgacctatctgatgacaaaaagtggaagttgcagctacatgagctgactaaacttcctgcttttgtgcgtgtcgtatcagcaggaaatcttctaagccatgttggtcataccatattgggcatgaacacagttcaactatacatgaaagttccagggagcagaacaccaggtcatcaggaaaataacaacttctgttcagttaacataaatattggcccaggtgactgtgaatggtttgttgttcctgaaggttactggggtgttctgaatgacttctgtgaaaaaaataatttgaatttcctaatgggttcttggtggcccaatcttgaagatctttatgaagcaaatgttccagtgtataggtttattcagcgacctggagatttggtctggataaatgcaggcactgttcattgggttcaggctattggctggtgcaacaacattgcttggaatgttggtccacttacagcctgccagtataaattggcagtggaacggtacgaatggaacaaattgcaaagtgtgaagtcaatagtacccatggttcatctttcctggaatatggcacgaaatatcaaggtctcagatccaaagctttttgaaatgattaagtattgtcttctaagaactctgaagcaatgtcagacattgagggaagctctcattgctgcaggaaaagagattatatggcatgggcggacaaaagaagaaccagctcattactgtagcatttgtgaagtggaggtttttgatctgctttttgtcactaatgagagtaattcacgaaagacctacatagtacattgccaagattgtgcacgaaaaacaagcggaaacttggaaaactttgtggtgctagaacagtacaaaatggaggacctgatgcaagtctatgaccaatttacattagctcctccattaccatccgcctcatcttgatattgttccatggacattaaatgagaccttttctgctattcaggaaataacccagttctgcaccactggtttttgtagctatctcgtaaggctgctggctgaaaactgtgtctatgcaaccttccaagtgcggagtgtcaaccaactggacgggagagagtactgctcctactccaggactctcacaaagctgatgagctgtacttcagaaaaaaataataatttccatgttttgtatatatctgacaaaactggcaacatcttacagactactgacttgaagacaacctcttttatatttctctatttctgggctgatgaatttgttttcatctgtcttttcccccttcagaattttccttggaaaaaaaatactagcctagctggtcatttctttgtaaggtagttagcaattttaagtctttctttggtcaacttttttttaatgtgaaaagttaggtaagacacttttttactgcttttatgtttttctgtcttgttttgagaccatgatggttacacttttggttcctaaataaaatttaaaaaattaacagccaagtcacaaaggtaatggattgcacatagactaaggaataaacttcagatttgtgatttttgtttctaatcttgatgtaaatttacactatttataaatacatatttattgcttgaaaatatttgtgaatggaatgctgttattttttccagatttacctgccattgaaattttaaggagttctgtaatttcaaacactactcctattacattttctatgtgtaaataaaactgcttagcattgtacagaaacttttattaaaattgtttaatgtttaaagagttttctattgtttgagttttaaaaaagactttatgtacagtgcccagtttttgttcatttttgaaatctgattatatatattttatatatacttatgtatgtatatataatatatatagaaatctggatatatatgtataaatctttagaacttaaatttttctcgttttaagtttcacatctatggtagatttttgaggtgtctactgtaaagtattgcttacaaaaagtatgattatttttaaagaaatatatatggtatgtatcctcaagacctaaaatgtcagactggtttattgttaagttgcaattactgcaatgacagaccaataaacaattgctgccaaaa

SEQ ID NO: 150215 - DNA, 5789 bp, Homo sapiens
  Payload ID: 9659
  Gene Symbol: KDM6A
  Gene Name: lysine (K)-specific demethylase 6A
  ENST ID: ENST00000382899
  CDS Start-End: 448-4602
gtgacacaattacaacaactttgtgctggtgccggggaagtttgtgtctccaacgaatcccctcagtgctccccagccccgcgcgctccggccgttcccgccgtccccgcctgtggctgccccctgcccaaccccgcgatgtgaccctacagccgaaagccgccgctgccgacccgggggctccgcagcccctgccgccgccgccgccgccttcaccgccgccgcgttgggatttttcgtcgccgccgcccgcggcggaggaggaggcggcgataaagttggtgtgctggtcccgcgcgcagattgggggcgtcactgcgggccccggtccgagggggggtgtcggcgttggagttgtgaattcgctgcgtttccatgaaatcctgcggagtgtcgctcgctaccgccgccgctgccgccgccgctttcggtgatgaggaaaagaaaatggcggcgggaaaagcgagcggcgagagcgaggaggcgtcccccagcctgacagccgaggagagggaggcgctcggcggactggacagccgcctctttgggttcgtgagatttcatgaagatggcgccaggacgaaggccctactgggcaaggctgttcgctgctatgaatctctaatcttaaaagctgaaggaaaagtggagtctgatttcttttgtcaattaggtcacttcaacctcttattggaagattatccaaaagcattatctgcataccagaggtactacagtttacagtctgactactggaagaatgctgcctttttatatggtcttggtttggtctacttccattataatgcatttcagtgggcaattaaagcatttcaggaggtgctttatgttgatcccagcttttgtcgagccaaggaaattcatttacgacttgggcttatgttcaaagtgaacacagactatgagtctagtttaaagcattttcagttagctttggttgactgtaatccctgcactttgtccaatgctgaaattcaatttcacattgcccacttatatgaaacccagaggaaatatcattctgcaaaagaagcttatgaacaacttttgcagacagagaatctttctgcacaagtaaaagcaactgtcttacaacagttaggttggatgcatcacactgtagatctcctgggagataaagccaccaaggaaagctatgctattcagtatctccaaaagtccttggaagcagatcctaattctggccagtcctggtatttcctcggaaggtgctattcaagtattgggaaagttcaggatgcctttatatcttacaggcagtctattgataaatcagaagcaagtgcagatacatggtgttcaataggtgtgctatatcagcagcaaaatcagcccatggatgctttacaggcctatatttgtgctgtacaattggaccatggccatgctgcagcctggatggacctaggcactctctatgaatcctgcaaccagcctcaggatgccattaaatgctacttaaatgcaactagaagcaaaagttgtagtaatacctctgcacttgcagcacgaattaagtatttacaggcatgtaaacctcatcatccaaatactgaacctgtattaggcctcagtcaaacaccaatttcacagcaatccttgccactacacatgattccttctagccaagtagatgacctgtccagtcctgccaagaggaaaagaacatctagtccaacaaagaatacttctgacaattggagtggtggacatgctgtgtcacatcctccagtacagcaacaagctcattcatggtgtttgacaccacagaaattacagcatttggaacagctccgcgcaaatagaaataatttaaatccagcacagaaactgatgctggaacagctggaaagtcagtttgtcttaatgcaacaacaccaaatgagaccaacaggagttgcacaggtacgatctactggaattcctaatgggccaacagctgactcatcactgcctacaaactcagtctctggccagcagccacagcttgctctgaccagagtgcctagcgtctctcagcctggagtccgtcctgcctgccctgggcagcctttggccaatggacccttttctgcaggccatgttccctgtagcacatcaagaacgctgggaagtacagacactattttgataggcaataatcatataacaggaagtggaagtaatggaaacgtgccttacctgcagcgaaacgcactcactctacctcataaccgcacaaacctgaccagcagcgcagaggagccgtggaaaaaccaactatctaactccactcaggggcttcacaaaggtcagagttcacattcggcaggtcctaatggtgaacgacctctctcttccactgggccttcccagcatctccaggcagctggctctggtattcagaatcagaacggacatcccaccctgcctagcaattcagtaacacagggggctgctctcaatcacctctcctctcacactgctacctcaggtggacaacaaggcattaccttaaccaaagagagcaagccttcaggaaacatattgacggtgcctgaaacaagcaggcacactggagagacacctaacagcactgccagtgtcgagggacttcctaatcatgtccatcagatgacggcagatgctgtttgcagtcctagccatggagattctaagtcaccaggtttactaagttcagacaatcctcagctctctgccttgttgatgggaaaagccaataacaatgtgggtactggaacctgtgacaaagtcaataacatccacccagctgttcatacaaagactgataactctgttgcctcttcaccatcttcagccatttcaacagcaacaccttctccaaaatccactgagcagacaaccacaaacagtgttaccagccttaacagccctcacagtgggctacacacaattaatggagaagggatggaagaatctcagagccccatgaaaacagatctgcttctggttaaccacaaacctagtccacagatcataccatcaatgtctgtgtccatataccccagctcagcagaagttctgaaggcatgcaggaatctaggtaaaaatggcttatctaacagtagcattttgttggataaatgtccacctccaagaccaccatcttcaccataccctcccttgccaaaggacaagttgaatccacctacacctagtatttacttggaaaataaacgtgatgctttctttcctccattacatcaattttgtacaaatccgaacaaccctgttacagtaatacgtggccttgctggagctcttaagttagacctgggacttttctctactaaaactttggtggaagctaacaatgaacatatggtagaagtgaggacacagttgttgcagccagcagatgaaaactgggatcccactggaacaaagaaaatctggcattgtgaaagtaatagatctcatactacaattgctaaatatgcacagtaccaggcctcctcattccaggaatcattgagagaagaaaatgaaaaaagaagtcatcataaagaccactcagatagtgaatctacatcgtcagataattctgggaggaggaggaaaggaccctttaaaaccataaagtttgggaccaatattgacctatctgatgacaaaaagtggaagttgcagctacatgagctgactaaacttcctgcttttgtgcgtgtcgtatcagcaggaaatcttctaagccatgttggtcataccatattgggcatgaacacagttcaactatacatgaaagttccagggagcagaacaccaggtcatcaggaaaataacaacttctgttcagttaacataaatattggcccaggtgactgtgaatggtttgttgttcctgaaggttactggggtgttctgaatgacttctgtgaaaaaaataatttgaatttcctaatgggttcttggtggcccaatcttgaagatctttatgaagcaaatgttccagtgtataggtttattcagcgacctggagatttggtctggataaatgcaggcactgttcattgggttcaggctattggctggtgcaacaacattgcttggaatgttggtccacttacagcctgccagtataaattggcagtggaacggtacgaatggaacaaattgcaaagtgtgaagtcaatagtacccatggttcatctttcctggaatatggcacgaaatatcaaggtctcagatccaaagctttttgaaatgattaagtattgtcttctaagaactctgaagcaatgtcagacattgagggaagctctcattgctgcaggaaaagagattatatggcatgggcggacaaaagaagaaccagctcattactgtagcatttgtgaagtggaggtttttgatctgctttttgtcactaatgagagtaattcacgaaagacctacatagtacattgccaagattgtgcacgaaaaacaagcggaaacttggaaaactttgtggtgctagaacagtacaaaatggaggacctgatgcaagtctatgaccaatttacattagctcctccattaccatccgcctcatcttgatattgttccatggacattaaatgagaccttttctgctattcaggaaataacccagttctgcaccactggtttttgtagctatctcgtaaggctgctggctgaaaactgtgtctatgcaaccttccaagtgcggagtgtcaaccaactggacgggagagagtactgctcctactccaggactctcacaaagctgatgagctgtacttcagaaaaaaataataatttccatgttttgtatatatctgacaaaactggcaacatcttacagactactgacttgaagacaacctcttttatatttctctatttctgggctgatgaatttgttttcatctgtcttttcccccttcagaattttccttggaaaaaaaatactagcctagctggtcatttctttgtaaggtagttagcaattttaagtctttctttggtcaacttttttttaatgtgaaaagttaggtaagacacttttttactgcttttatgtttttctgtcttgttttgagaccatgatggttacacttttggttcctaaataaaatttaaaaaattaacagccaagtcacaaaggtaatggattgcacatagactaaggaataaacttcagatttgtgatttttgtttctaatcttgatgtaaatttacactatttataaatacatatttattgcttgaaaatatttgtgaatggaatgctgttattttttccagatttacctgccattgaaattttaaggagttctgtaatttcaaacactactcctattacattttctatgtgtaaataaaactgcttagcattgtacagaaacttttattaaaattgtttaatgtttaaagagttttctattgtttgagttttaaaaaagactttatgtacagtgcccagtttttgttcatttttgaaatctgattatatatattttatatatacttatgtatgtatatataatatatatagaaatctggatatatatgtataaatctttagaacttaaatttttctcgttttaagtttcacatctatggtagatttttgaggtgtctactgtaaagtattgcttacaaaaagtatgattatttttaaagaaatatatatggtatgtatcctcaagacctaaaatgtcagactggtttattgttaagttgcaattactgcaatgacagaccaataaacaattgctgcc

SEQ ID NO: 150216 - DNA, 4324 bp, Homo sapiens
  Payload ID: 9659
  Gene Symbol: KDM6A
  Gene Name: lysine (K)-specific demethylase 6A
  ENST ID: ENST00000433797
  CDS Start-End: 1-3133
gaataaaactaaattacttcctagtattgaggaggcgtggagcctaccaattcccgcagagcttacctccaggcagggtgccatgaacacagcacagcaggcatgtaaacctcatcatccaaatactgaacctgtattaggcctcagtcaaacaccaatttcacagcaatccttgccactacacatgattccttctagccaagtagatgacctgtccagtcctgccaagaggaaaagaacatctagtccaacaaagaatacttctgacaattggagtggtggacatgctgtgtcacatcctccagtacagcaacaagctcattcatggtgtttgacaccacagaaattacagcatttggaacagctccgcgcaaatagaaataatttaaatccagcacagaaactgatgctggaacagctggaaagtcagtttgtcttaatgcaacaacaccaaatgagaccaacaggagttgcacaggtacgatctactggaattcctaatgggccaacagctgactcatcactgcctacaaactcagtctctggccagcagccacagcttgctctgaccagagtgcctagcgtctctcagcctggagtccgtcctgcctgccctgggcagcctttggccaatggacccttttctgcaggccatgttccctgtagcacatcaagaacgctgggaagtacagacactattttgataggcaataatcatataacaggaagtggaagtaatggaaacgtgccttacctgcagcgaaacgcactcactctacctcataaccgcacaaacctgaccagcagcgcagaggagccgtggaaaaaccaactatctaactccactcaggggcttcacaaaggtcagagttcacattcggcaggtcctaatggtgaacgacctctctcttccactgggccttcccagcatctccaggcagctggctctggtattcagaatcagaacggacatcccaccctgcctagcaattcagtaacacagggggctgctctcaatcacctctcctctcacactgctacctcaggtggacaacaaggcattaccttaaccaaagagagcaagccttcaggaaacatattgacggtgcctgaaacaagcaggcacactggagagacacctaacagcactgccagtgtcgagggacttcctaatcatgtccatcagatgacggcagatgctgtttgcagtcctagccatggagattctaagtcaccaggtttactaagttcagacaatcctcagctctctgccttgttgatgggaaaagccaataacaatgtgggtactggaacctgtgacaaagtcaataacatccacccagctgttcatacaaagactgataactctgttgcctcttcaccatcttcagccatttcaacagcaacaccttctccaaaatccactgagcagacaaccacaaacagtgttaccagccttaacagccctcacagtgggctacacacaattaatggagaagggatggaagaatctcagagccccatgaaaacagatctgcttctggttaaccacaaacctagtccacagatcataccatcaatgtctgtgtccatataccccagctcagcagaagttctgaaggcatgcaggaatctaggtaaaaatggcttatctaacagtagcattttgttggataaatgtccacctccaagaccaccatcttcaccataccctcccttgccaaaggacaagttgaatccacctacacctagtatttacttggaaaataaacgtgatgctttctttcctccattacatcaattttgtacaaatccgaacaaccctgttacagtaatacgtggccttgctggagctcttaagttagacctgggacttttctctactaaaactttggtggaagctaacaatgaacatatggtagaagtgaggacacagttgttgcagccagcagatgaaaactgggatcccactggaacaaagaaaatctggcattgtgaaagtaatagatctcatactacaattgctaaatatgcacagtaccaggcctcctcattccaggaatcattgagagaagaaaatgaaaaaagaagtcatcataaagaccactcagatagtgaatctacatcgtcagataattctgggaggaggaggaaaggaccctttaaaaccataaagtttgggaccaatattgacctatctgatgacaaaaagtggaagttgcagctacatgagctgactaaacttcctgcttttgtgcgtgtcgtatcagcaggaaatcttctaagccatgttggtcataccatattgggcatgaacacagttcaactatacatgaaagttccagggagcagaacaccaggtcatcaggaaaataacaacttctgttcagttaacataaatattggcccaggtgactgtgaatggtttgttgttcctgaaggttactggggtgttctgaatgacttctgtgaaaaaaataatttgaatttcctaatgggttcttggtggcccaatcttgaagatctttatgaagcaaatgttccagtgtataggtttattcagcgacctggagatttggtctggataaatgcaggcactgttcattgggttcaggctattggctggtgcaacaacattgcttggaatgttggtccacttacagcctgccagtataaattggcagtggaacggtacgaatggaacaaattgcaaagtgtgaagtcaatagtacccatggttcatctttcctggaatatggcacgaaatatcaaggtctcagatccaaagctttttgaaatgattaagtattgtcttctaagaactctgaagcaatgtcagacattgagggaagctctcattgctgcaggaaaagagattatatggcatgggcggacaaaagaagaaccagctcattactgtagcatttgtgaagtggaggtttttgatctgctttttgtcactaatgagagtaattcacgaaagacctacatagtacattgccaagattgtgcacgaaaaacaagcggaaacttggaaaactttgtggtgctagaacagtacaaaatggaggacctgatgcaagtctatgaccaatttacattagctcctccattaccatccgcctcatcttgatattgttccatggacattaaatgagaccttttctgctattcaggaaataacccagttctgcaccactggtttttgtagctatctcgtaaggctgctggctgaaaactgtgtctatgcaaccttccaagtgcggagtgtcaaccaactggacgggagagagtactgctcctactccaggactctcacaaagctgatgagctgtacttcagaaaaaaataataatttccatgttttgtatatatctgacaaaactggcaacatcttacagactactgacttgaagacaacctcttttatatttctctatttctgggctgatgaatttgttttcatctgtcttttcccccttcagaattttccttggaaaaaaaatactagcctagctggtcatttctttgtaaggtagttagcaattttaagtctttctttggtcaacttttttttaatgtgaaaagttaggtaagacacttttttactgcttttatgtttttctgtcttgttttgagaccatgatggttacacttttggttcctaaataaaatttaaaaaattaacagccaagtcacaaaggtaatggattgcacatagactaaggaataaacttcagatttgtgatttttgtttctaatcttgatgtaaatttacactatttataaatacatatttattgcttgaaaatatttgtgaatggaatgctgttattttttccagatttacctgccattgaaattttaaggagttctgtaatttcaaacactactcctattacattttctatgtgtaaataaaactgcttagcattgtacagaaacttttattaaaattgtttaatgtttaaagagttttctattgtttgagttttaaaaaagactttatgtacagtgcccagtttttgttcatttttgaaatctgattatatatattttatatatacttatgtatgtatatataatatatatagaaatctggatatatatgtataaatctttagaacttaaatttttctcgttttaagtttcacatctatggtagatttttgaggtgtctactgtaaagtattgcttacaaaaagtatgattatttttaaagaaatatatatggtatgtatcctcaagacctaaaatgtcagactggtttattgttaagttgcaattactgcaatgacagaccaataaacaattgctgccaaaa

SEQ ID NO: 150217 - DNA, 671 bp, Homo sapiens
  Payload ID: 9659
  Gene Symbol: KDM6A
  Gene Name: lysine (K)-specific demethylase 6A
  ENST ID: ENST00000451692
  CDS Start-End: 1-671
ctttacaggcctatatttgtgctgtacaattggaccatggccatgctgcagcctggatggacctaggcactctctatgaatcctgcaaccagcctcaggatgccattaaatgctacttaaatgcaactagaagcaaaagttgtagtaatacctctgcacttgcagcacgaattaagtatttacaggctcagttgtgtaaccttccacaaggtagtctacagaataaaactaaattacttcctagtattgaggaggcgtggagcctaccaattcccgcagagcttacctccaggcagggtgccatgaacacagcacagcagaatacttctgacaattggagtggtggacatgctgtgtcacatcctccagtacagcaacaagctcattcatggtgtttgacaccacagaaattacagatgagaccaacaggagttgcacaggtacgatctactggaattcctaatgggccaacagctgactcatcactgcctacaaactcagtctctggccagcagccacagcttgctctgaccagagtgcctagcgtctctcagcctggagtccgtcctgcctgccctgggcagcctttggccaatggacccttttctgcaggccatgttccctgtagcacatcaagaacgctgggaagtacagacactattttgataggc

SEQ ID NO: 150218 - DNA, 4189 bp, Homo sapiens
  Payload ID: 9659
  Gene Symbol: KDM6A
  Gene Name: lysine (K)-specific demethylase 6A
  ENST ID: ENST00000414389
  CDS Start-End: 1-2998
aggcactctctatgaatcctgcaaccagcctcaggatgccattaaatgctacttaaatgcaactagaagcaaaagttgtagtaatacctctgcacttgcagcacgaattaagtatttacagaatacttctgacaattggagtggtggacatgctgtgtcacatcctccagtacagcaacaagctcattcatggtgtttgacaccacagaaattacagcatttggaacagctccgcgcaaatagaaataatttaaatccagcacagaaactgatgctggaacagctggaaagtcagtttgtcttaatgcaacaacaccaaatgagaccaacaggagttgcacaggtacgatctactggaattcctaatgggccaacagctgactcatcactgcctacaaactcagtctctggccagcagccacagcttgctctgaccagagtgcctagcgtctctcagcctggagtccgtcctgcctgccctgggcagcctttggccaatggacccttttctgcaggccatgttccctgtagcacatcaagaacgctgggaagtacagacactattttgataggcaataatcatataacaggaagtggaagtaatggaaacgtgccttacctgcagcgaaacgcactcactctacctcataaccgcacaaacctgaccagcagcgcagaggagccgtggaaaaaccaactatctaactccactcaggggcttcacaaaggtcagagttcacattcggcaggtcctaatggtgaacgacctctctcttccactgggccttcccagcatctccaggcagctggctctggtattcagaatcagaacggacatcccaccctgcctagcaattcagtaacacagggggctgctctcaatcacctctcctctcacactgctacctcaggtggacaacaaggcattaccttaaccaaagagagcaagccttcaggaaacatattgacggtgcctgaaacaagcaggcacactggagagacacctaacagcactgccagtgtcgagggacttcctaatcatgtccatcagatgacggcagatgctgtttgcagtcctagccatggagattctaagtcaccaggtttactaagttcagacaatcctcagctctctgccttgttgatgggaaaagccaataacaatgtgggtactggaacctgtgacaaagtcaataacatccacccagctgttcatacaaagactgataactctgttgcctcttcaccatcttcagccatttcaacagcaacaccttctccaaaatccactgagcagacaaccacaaacagtgttaccagccttaacagccctcacagtgggctacacacaattaatggagaagggatggaagaatctcagagccccatgaaaacagatctgcttctggttaaccacaaacctagtccacagatcataccatcaatgtctgtgtccatataccccagctcagcagaagttctgaaggcatgcaggaatctaggtaaaaatggcttatctaacagtagcattttgttggataaatgtccacctccaagaccaccatcttcaccataccctcccttgccaaaggacaagttgaatccacctacacctagtatttacttggaaaataaacgtgatgctttctttcctccattacatcaattttgtacaaatccgaacaaccctgttacagtaatacgtggccttgctggagctcttaagttagacctgggacttttctctactaaaactttggtggaagctaacaatgaacatatggtagaagtgaggacacagttgttgcagccagcagatgaaaactgggatcccactggaacaaagaaaatctggcattgtgaaagtaatagatctcatactacaattgctaaatatgcacagtaccaggcctcctcattccaggaatcattgagagaagaaaatgaaaaaagaagtcatcataaagaccactcagatagtgaatctacatcgtcagataattctgggaggaggaggaaaggaccctttaaaaccataaagtttgggaccaatattgacctatctgatgacaaaaagtggaagttgcagctacatgagctgactaaacttcctgcttttgtgcgtgtcgtatcagcaggaaatcttctaagccatgttggtcataccatattgggcatgaacacagttcaactatacatgaaagttccagggagcagaacaccaggtcatcaggaaaataacaacttctgttcagttaacataaatattggcccaggtgactgtgaatggtttgttgttcctgaaggttactggggtgttctgaatgacttctgtgaaaaaaataatttgaatttcctaatgggttcttggtggcccaatcttgaagatctttatgaagcaaatgttccagtgtataggtttattcagcgacctggagatttggtctggataaatgcaggcactgttcattgggttcaggctattggctggtgcaacaacattgcttggaatgttggtccacttacagcctgccagtataaattggcagtggaacggtacgaatggaacaaattgcaaagtgtgaagtcaatagtacccatggttcatctttcctggaatatggcacgaaatatcaaggtctcagatccaaagctttttgaaatgattaagtattgtcttctaagaactctgaagcaatgtcagacattgagggaagctctcattgctgcaggaaaagagattatatggcatgggcggacaaaagaagaaccagctcattactgtagcatttgtgaagtggaggtttttgatctgctttttgtcactaatgagagtaattcacgaaagacctacatagtacattgccaagattgtgcacgaaaaacaagcggaaacttggaaaactttgtggtgctagaacagtacaaaatggaggacctgatgcaagtctatgaccaatttacattagctcctccattaccatccgcctcatcttgatattgttccatggacattaaatgagaccttttctgctattcaggaaataacccagttctgcaccactggtttttgtagctatctcgtaaggctgctggctgaaaactgtgtctatgcaaccttccaagtgcggagtgtcaaccaactggacgggagagagtactgctcctactccaggactctcacaaagctgatgagctgtacttcagaaaaaaataataatttccatgttttgtatatatctgacaaaactggcaacatcttacagactactgacttgaagacaacctcttttatatttctctatttctgggctgatgaatttgttttcatctgtcttttcccccttcagaattttccttggaaaaaaaatactagcctagctggtcatttctttgtaaggtagttagcaattttaagtctttctttggtcaacttttttttaatgtgaaaagttaggtaagacacttttttactgcttttatgtttttctgtcttgttttgagaccatgatggttacacttttggttcctaaataaaatttaaaaaattaacagccaagtcacaaaggtaatggattgcacatagactaaggaataaacttcagatttgtgatttttgtttctaatcttgatgtaaatttacactatttataaatacatatttattgcttgaaaatatttgtgaatggaatgctgttattttttccagatttacctgccattgaaattttaaggagttctgtaatttcaaacactactcctattacattttctatgtgtaaataaaactgcttagcattgtacagaaacttttattaaaattgtttaatgtttaaagagttttctattgtttgagttttaaaaaagactttatgtacagtgcccagtttttgttcatttttgaaatctgattatatatattttatatatacttatgtatgtatatataatatatatagaaatctggatatatatgtataaatctttagaacttaaatttttctcgttttaagtttcacatctatggtagatttttgaggtgtctactgtaaagtattgcttacaaaaagtatgattatttttaaagaaatatatatggtatgtatcctcaagacctaaaatgtcagactggtttattgttaagttgcaattactgcaatgacagaccaataaacaattgctgccaaaa

SEQ ID NO: 150219 - DNA, 735 bp, Homo sapiens
  Payload ID: 9659
  Gene Symbol: KDM6A
  Gene Name: lysine (K)-specific demethylase 6A
  ENST ID: ENST00000431196
  CDS Start-End: 1-484
ggcacgaaatatcaaggtctcagatccaaagctttttgaaatgattaagatattttcattgtctccgaattttagagctgaaaagtgccttagagatcatctagttcaacctctccgttcaaatggagaacctgagccactaagattcacaggagagtattgtcttctaagaactctgaagcaatgtcagacattgagggaagctctcattgctgcaggaaaagagattatatggcatgggcggacaaaagaagaaccagctcattactgtagcatttgtgaagtggaggtttttgatctgctttttgtcactaatgagagtaattcacgaaagacctacatagtacattgccaagattgtgcacgaaaaacaagcggaaacttggaaaactttgtggtgctagaacagtacaaaatggaggacctgatgcaagtctatgaccaatttacattagctcctccattaccatccgcctcatcttgatattgttccatggacattaaatgagaccttttctgctattcaggaaataacccagttctgcaccactggtttttgtagctatctcgtaaggctgctggctgaaaactgtgtctatgcaaccttccaagtgcggagtgtcaaccaactggacgggagagagtactgctcctactccaggactctcacaaagctgatgagctgtacttcagaaaaaaataataatttccatgttttgtatatatctgacaaaa

SEQ ID NO: 150220 - DNA, 5633 bp, Homo sapiens
  Payload ID: 9659
  Gene Symbol: KDM6A
  Gene Name: lysine (K)-specific demethylase 6A
  ENST ID: ENST00000536777
  CDS Start-End: 448-4446
gtgacacaattacaacaactttgtgctggtgccggggaagtttgtgtctccaacgaatcccctcagtgctccccagccccgcgcgctccggccgttcccgccgtccccgcctgtggctgccccctgcccaaccccgcgatgtgaccctacagccgaaagccgccgctgccgacccgggggctccgcagcccctgccgccgccgccgccgccttcaccgccgccgcgttgggatttttcgtcgccgccgcccgcggcggaggaggaggcggcgataaagttggtgtgctggtcccgcgcgcagattgggggcgtcactgcgggccccggtccgagggggggtgtcggcgttggagttgtgaattcgctgcgtttccatgaaatcctgcggagtgtcgctcgctaccgccgccgctgccgccgccgctttcggtgatgaggaaaagaaaatggcggcgggaaaagcgagcggcgagagcgaggaggcgtcccccagcctgacagccgaggagagggaggcgctcggcggactggacagccgcctctttgggttcgtgagatttcatgaagatggcgccaggacgaaggccctactgggcaaggctgttcgctgctatgaatctctaatcttaaaagctgaaggaaaagtggagtctgatttcttttgtcaattaggtcacttcaacctcttattggaagattatccaaaagcattatctgcataccagaggtactacagtttacagtctgactactggaagaatgctgcctttttatatggtcttggtttggtctacttccattataatgcatttcagtgggcaattaaagcatttcaggaggtgctttatgttgatcccagcttttgtcgagccaaggaaattcatttacgacttgggcttatgttcaaagtgaacacagactatgagtctagtttaaagcattttcagttagctttggttgactgtaatccctgcactttgtccaatgctgaaattcaatttcacattgcccacttatatgaaacccagaggaaatatcattctgcaaaagaagcttatgaacaacttttgcagacagagaatctttctgcacaagtaaaagcaactgtcttacaacagttaggttggatgcatcacactgtagatctcctgggagataaagccaccaaggaaagctatgctattcagtatctccaaaagtccttggaagcagatcctaattctggccagtcctggtatttcctcggaaggtgctattcaagtattgggaaagttcaggatgcctttatatcttacaggcagtctattgataaatcagaagcaagtgcagatacatggtgttcaataggtgtgctatatcagcagcaaaatcagcccatggatgctttacaggcctatatttgtgctgtacaattggaccatggccatgctgcagcctggatggacctaggcactctctatgaatcctgcaaccagcctcaggatgccattaaatgctacttaaatgcaactagaagcaaaagttgtagtaatacctctgcacttgcagcacgaattaagtatttacagaatacttctgacaattggagtggtggacatgctgtgtcacatcctccagtacagcaacaagctcattcatggtgtttgacaccacagaaattacagcatttggaacagctccgcgcaaatagaaataatttaaatccagcacagaaactgatgctggaacagctggaaagtcagtttgtcttaatgcaacaacaccaaatgagaccaacaggagttgcacaggtacgatctactggaattcctaatgggccaacagctgactcatcactgcctacaaactcagtctctggccagcagccacagcttgctctgaccagagtgcctagcgtctctcagcctggagtccgtcctgcctgccctgggcagcctttggccaatggacccttttctgcaggccatgttccctgtagcacatcaagaacgctgggaagtacagacactattttgataggcaataatcatataacaggaagtggaagtaatggaaacgtgccttacctgcagcgaaacgcactcactctacctcataaccgcacaaacctgaccagcagcgcagaggagccgtggaaaaaccaactatctaactccactcaggggcttcacaaaggtcagagttcacattcggcaggtcctaatggtgaacgacctctctcttccactgggccttcccagcatctccaggcagctggctctggtattcagaatcagaacggacatcccaccctgcctagcaattcagtaacacagggggctgctctcaatcacctctcctctcacactgctacctcaggtggacaacaaggcattaccttaaccaaagagagcaagccttcaggaaacatattgacggtgcctgaaacaagcaggcacactggagagacacctaacagcactgccagtgtcgagggacttcctaatcatgtccatcagatgacggcagatgctgtttgcagtcctagccatggagattctaagtcaccaggtttactaagttcagacaatcctcagctctctgccttgttgatgggaaaagccaataacaatgtgggtactggaacctgtgacaaagtcaataacatccacccagctgttcatacaaagactgataactctgttgcctcttcaccatcttcagccatttcaacagcaacaccttctccaaaatccactgagcagacaaccacaaacagtgttaccagccttaacagccctcacagtgggctacacacaattaatggagaagggatggaagaatctcagagccccatgaaaacagatctgcttctggttaaccacaaacctagtccacagatcataccatcaatgtctgtgtccatataccccagctcagcagaagttctgaaggcatgcaggaatctaggtaaaaatggcttatctaacagtagcattttgttggataaatgtccacctccaagaccaccatcttcaccataccctcccttgccaaaggacaagttgaatccacctacacctagtatttacttggaaaataaacgtgatgctttctttcctccattacatcaattttgtacaaatccgaacaaccctgttacagtaatacgtggccttgctggagctcttaagttagacctgggacttttctctactaaaactttggtggaagctaacaatgaacatatggtagaagtgaggacacagttgttgcagccagcagatgaaaactgggatcccactggaacaaagaaaatctggcattgtgaaagtaatagatctcatactacaattgctaaatatgcacagtaccaggcctcctcattccaggaatcattgagagaagaaaatgaaaaaagaagtcatcataaagaccactcagatagtgaatctacatcgtcagataattctgggaggaggaggaaaggaccctttaaaaccataaagtttgggaccaatattgacctatctgatgacaaaaagtggaagttgcagctacatgagctgactaaacttcctgcttttgtgcgtgtcgtatcagcaggaaatcttctaagccatgttggtcataccatattgggcatgaacacagttcaactatacatgaaagttccagggagcagaacaccaggtcatcaggaaaataacaacttctgttcagttaacataaatattggcccaggtgactgtgaatggtttgttgttcctgaaggttactggggtgttctgaatgacttctgtgaaaaaaataatttgaatttcctaatgggttcttggtggcccaatcttgaagatctttatgaagcaaatgttccagtgtataggtttattcagcgacctggagatttggtctggataaatgcaggcactgttcattgggttcaggctattggctggtgcaacaacattgcttggaatgttggtccacttacagcctgccagtataaattggcagtggaacggtacgaatggaacaaattgcaaagtgtgaagtcaatagtacccatggttcatctttcctggaatatggcacgaaatatcaaggtctcagatccaaagctttttgaaatgattaagtattgtcttctaagaactctgaagcaatgtcagacattgagggaagctctcattgctgcaggaaaagagattatatggcatgggcggacaaaagaagaaccagctcattactgtagcatttgtgaagtggaggtttttgatctgctttttgtcactaatgagagtaattcacgaaagacctacatagtacattgccaagattgtgcacgaaaaacaagcggaaacttggaaaactttgtggtgctagaacagtacaaaatggaggacctgatgcaagtctatgaccaatttacattagctcctccattaccatccgcctcatcttgatattgttccatggacattaaatgagaccttttctgctattcaggaaataacccagttctgcaccactggtttttgtagctatctcgtaaggctgctggctgaaaactgtgtctatgcaaccttccaagtgcggagtgtcaaccaactggacgggagagagtactgctcctactccaggactctcacaaagctgatgagctgtacttcagaaaaaaataataatttccatgttttgtatatatctgacaaaactggcaacatcttacagactactgacttgaagacaacctcttttatatttctctatttctgggctgatgaatttgttttcatctgtcttttcccccttcagaattttccttggaaaaaaaatactagcctagctggtcatttctttgtaaggtagttagcaattttaagtctttctttggtcaacttttttttaatgtgaaaagttaggtaagacacttttttactgcttttatgtttttctgtcttgttttgagaccatgatggttacacttttggttcctaaataaaatttaaaaaattaacagccaagtcacaaaggtaatggattgcacatagactaaggaataaacttcagatttgtgatttttgtttctaatcttgatgtaaatttacactatttataaatacatatttattgcttgaaaatatttgtgaatggaatgctgttattttttccagatttacctgccattgaaattttaaggagttctgtaatttcaaacactactcctattacattttctatgtgtaaataaaactgcttagcattgtacagaaacttttattaaaattgtttaatgtttaaagagttttctattgtttgagttttaaaaaagactttatgtacagtgcccagtttttgttcatttttgaaatctgattatatatattttatatatacttatgtatgtatatataatatatatagaaatctggatatatatgtataaatctttagaacttaaatttttctcgttttaagtttcacatctatggtagatttttgaggtgtctactgtaaagtattgcttacaaaaagtatgattatttttaaagaaatatatatggtatgtatcctcaagacctaaaatgtcagactggtttattgttaagttgcaattactgcaatgacagaccaataaacaattgctgcc

SEQ ID NO: 150221 - DNA, 5655 bp, Homo sapiens
  Payload ID: 9659
  Gene Symbol: KDM6A
  Gene Name: lysine (K)-specific demethylase 6A
  ENST ID: ENST00000543216
  CDS Start-End: 448-4257
gtgacacaattacaacaactttgtgctggtgccggggaagtttgtgtctccaacgaatcccctcagtgctccccagccccgcgcgctccggccgttcccgccgtccccgcctgtggctgccccctgcccaaccccgcgatgtgaccctacagccgaaagccgccgctgccgacccgggggctccgcagcccctgccgccgccgccgccgccttcaccgccgccgcgttgggatttttcgtcgccgccgcccgcggcggaggaggaggcggcgataaagttggtgtgctggtcccgcgcgcagattgggggcgtcactgcgggccccggtccgagggggggtgtcggcgttggagttgtgaattcgctgcgtttccatgaaatcctgcggagtgtcgctcgctaccgccgccgctgccgccgccgctttcggtgatgaggaaaagaaaatggcggcgggaaaagcgagcggcgagagcgaggaggcgtcccccagcctgacagccgaggagagggaggcgctcggcggactggacagccgcctctttgggttcgtgagatttcatgaagatggcgccaggacgaaggccctactgggcaaggctgttcgctgctatgaatctctaatcttaaaagctgaaggaaaagtggagtctgatttcttttgtcaattaggtcacttcaacctcttattggaagattatccaaaagcattatctgcataccagaggtactacagtttacagtctgactactggaagaatgctgcctttttatatggtcttggtttggtctacttccattataatgcatttcagtgggcaattaaagcatttcaggaggtgctttatgttgatcccagcttttgtcgagccaaggaaattcatttacgacttgggcttatgttcaaagtgaacacagactatgagtctagtttaaagcattttcagttagctttggttgactgtaatccctgcactttgtccaatgctgaaattcaatttcacattgcccacttatatgaaacccagaggaaatatcattctgcaaaagaagcttatgaacaacttttgcagacagagaatctttctgcacaagtaaaagcaactgtcttacaacagttaggttggatgcatcacactgtagatctcctgggagataaagccaccaaggaaagctatgctattcagtatctccaaaagtccttggaagcagatcctaattctggccagtcctggtatttcctcggaaggtgctattcaagtattgggaaagttcaggatgcctttatatcttacaggcagtctattgataaatcagaagcaagtgcagatacatggtgttcaataggtgtgctatatcagcagcaaaatcagcccatggatgctttacaggcctatatttgtgctgtacaattggaccatggccatgctgcagcctggatggacctaggcactctctatgaatcctgcaaccagcctcaggatgccattaaatgctacttaaatgcaactagaagcaaaagttgtagtaatacctctgcacttgcagcacgaattaagtatttacaggcatgtaaacctcatcatccaaatactgaacctgtattaggcctcagtcaaacaccaatttcacagcaatccttgccactacacatgattccttctagccaagtagatgacctgtccagtcctgccaagaggaaaagaacatctagtccaacaaagaatacttctgacaattggagtggtggacatgctgtgtcacatcctccagtacagcaacaagctcattcatggtgtttgacaccacagaaattacagatgagaccaacaggagttgcacaggtacgatctactggaattcctaatgggccaacagctgactcatcactgcctacaaactcagtctctggccagcagccacagcttgctctgaccagagtgcctagcgtctctcagcctggagtccgtcctgcctgccctgggcagcctttggccaatggacccttttctgcaggccatgttccctgtagcacatcaagaacgctgggaagtacagacactattttgataggcaataatcatataacaggaagtggaagtaatggaaacgtgccttacctgcagcgaaacgcactcactctacctcataaccgcacaaacctgaccagcagcgcagaggagccgtggaaaaaccaactatctaactccactcaggggcttcacaaaggtcagagttcacattcggcaggtcctaatggtgaacgacctctctcttccactgggccttcccagcatctccaggcagctggctctggtattcagaatcagaacggacatcccaccctgcctagcaattcagtaacacagggggctgctctcaatcacctctcctctcacactgctacctcaggtggacaacaaggcattaccttaaccaaagagagcaagccttcaggaaacatattgacggtgcctgaaacaagcaggcacactggagagacacctaacagcactgccagtgtcgagggacttcctaatcatgtccatcagatgacggcagatgctgtttgcagtcctagccatggagattctaagtcaccaggtttactaagttcagacaatcctcagctctctgccttgttgatgggaaaagccaataacaatgtgggtactggaacctgtgacaaagtcaataacatccacccagctgttcatacaaagactgataactctgttgcctcttcaccatcttcagccatttcaacagcaacaccttctccaaaatccactgagcagacaaccacaaacagtgttaccagccttaacagccctcacagtgggctacacacaattaatggagaagggatggaagaatctcagagccccatgaaaacagatctgcttctggttaaccacaaacctagtccacagatcataccatcaatgtctgtgtccatataccccagctcagcagaagttctgaaggcatgcaggaatctaggtaaaaatggcttatctaacagtagcattttgttggataaatgtccacctccaagaccaccatcttcaccataccctcccttgccaaaggacaagttgaatccacctacacctagtatttacttggaaaataaacgtgatgctttctttcctccattacatcaattttgtacaaatccgaacaaccctgttacagtaatacgtggccttgctggagctcttaagttagacctgggacttttctctactaaaactttggtggaagctaacaatgaacatatggtagaagtgaggacacagttgttgcagccagcagatgaaaactgggatcccactggaacaaagaaaatctggcattgtgaaagtaatagatctcatactacaattgctaaatatgcacagtaccaggcctcctcattccaggaatcattgagagaagaaaatgaaaaaagaagtcatcataaagaccactcagatagtgaatctacatcgtcagataattctgggaggaggaggaaaggaccctttaaaaccataaagtttgggaccaatattgacctatctgatgacaaaaagtggaagttgcagctacatgagctgactaaacttcctgcttttgtgcgtgtcgtatcagcaggaaatcttctaagccatgttggtcataccatattgggcatgaacacagttcaactatacatgaaagttccagggagcagaacaccaggtcatcaggaaaataacaacttctgttcagttaacataaatattggcccaggtgactgtgaatggtttgttgttcctgaaggttactggggtgttctgaatgacttctgtgaaaaaaataatttgaatttcctaatgggttcttggtggcccaatcttgaagatctttatgaagcaaatgttccagtgtataggtttattcagcgacctggagatttggtctggataaatgcaggcactgttcattgggttcaggctattggctggtgcaacaacattgcttggaatgttggtccacttacagcctgccagtataaattggcagtggaacggtacgaatggaacaaattgcaaagtgtgaagtcaatagtacccatggttcatctttcctggaatatggcacgaaatatcaaggtattgtcttctaagaactctgaagcaatgtcagacattgagggaagctctcattgctgcaggaaaagagattatatggcatgggcggacaaaagaagaaccagctcattactgtagcatttgtgaagtggaggtttttgatctgctttttgtcactaatgagagtaattcacgaaagacctacatagtacattgccaagattgtgcacgaaaaacaagcggaaacttggaaaactttgtggtgctagaacagtacaaaatggaggacctgatgcaagtctatgaccaatttacattagctcctccattaccatccgcctcatcttgatattgttccatggacattaaatgagaccttttctgctattcaggaaataacccagttctgcaccactggtttttgtagctatctcgtaaggctgctggctgaaaactgtgtctatgcaaccttccaagtgcggagtgtcaaccaactggacgggagagagtactgctcctactccaggactctcacaaagctgatgagctgtacttcagaaaaaaataataatttccatgttttgtatatatctgacaaaactggcaacatcttacagactactgacttgaagacaacctcttttatatttctctatttctgggctgatgaatttgttttcatctgtcttttcccccttcagaattttccttggaaaaaaaatactagcctagctggtcatttctttgtaaggtagttagcaattttaagtctttctttggtcaacttttttttaatgtgaaaagttaggtaagacacttttttactgcttttatgtttttctgtcttgttttgagaccatgatggttacacttttggttcctaaataaaatttaaaaaattaacagccaagtcacaaaggtaatggattgcacatagactaaggaataaacttcagatttgtgatttttgtttctaatcttgatgtaaatttacactatttataaatacatatttattgcttgaaaatatttgtgaatggaatgctgttattttttccagatttacctgccattgaaattttaaggagttctgtaatttcaaacactactcctattacattttctatgtgtaaataaaactgcttagcattgtacagaaacttttattaaaattgtttaatgtttaaagagttttctattgtttgagttttaaaaaagactttatgtacagtgcccagtttttgttcatttttgaaatctgattatatatattttatatatacttatgtatgtatatataatatatatagaaatctggatatatatgtataaatctttagaacttaaatttttctcgttttaagtttcacatctatggtagatttttgaggtgtctactgtaaagtattgcttacaaaaagtatgattatttttaaagaaatatatatggtatgtatcctcaagacctaaaatgtcagactggtttattgttaagttgcaattactgcaatgacagaccaataaacaattgctgcc

SEQ ID NO: 150222 - DNA, 2876 bp, Homo sapiens
  Payload ID: 9659
  Gene Symbol: KDM6A
  Gene Name: lysine (K)-specific demethylase 6A
  ENST ID: ENST00000621147
  CDS Start-End: 1-675
atgaaatcctgcggagtgtcgctcgctaccgccgccgctgccgccgccgctttcggtgatgaggaaaagaaaatggcggcgggaaaagcgagcggcgagagcgaggaggcgtcccccagcctgacagccgaggagagggaggcgctcggcggactggacagccgcctctttgggttcgtgagatttcatgaagatggcgccaggacgaaggccctactgggcaaggctgttcgctgctatgaatctctaatcttaaaagctgaaggaaaagtggagtctgatttcttttgtcaattaggtcacttcaacctcttattggaagattatccaaaagcattatctgcataccagaggtactacagtttacagtctgactactggaagaatgctgcctttttatatggtcttggtttggtctacttccattataatgcatttcagtgggcaattaaagcatttcaggaggtgctttatgttgatcccagcttttgtcgagccaaggaaattcatttacgacttgggcttatgttcaaagtgaacacagactatgagtctagtttaaagcattttcagttagctttggttgactgtaatccctgcactttgtccaatgctgaaattcaatttcacattgcccacttatatgaaacccaggttggatgcatcacactgtagatctcctgggagataaagccaccaaggaaagctatgctattcagtatctccaaaagtccttggaagcagatcctaattctggccagtcctggtatttcctcggaaggtgctattcaagtattgggaaagttcaggatgcctttatatcttacaggcagtctattgataaatcagaagcaagtgcagatacatggtgttcaataggtgtgctatatcagcagcaaaatcagcccatggatgctttacaggcctatatttgtgctgtacaattggaccatggccatgctgcagcctggatggacctaggcactctctatgaatcctgcaaccagcctcaggatgccattaaatgctacttaaatgcaactagaagcaaaagttgtagtaatacctctgcacttgcagcacgaattaagtatttacagaatacttctgacaattggagtggtggacatgctgtgtcacatcctccagtacagcaacaagctcattcatggtgtttgacaccacagaaattacagatgagaccaacaggagttgcacaggtacgatctactggaattcctaatgggccaacagctgactcatcactgcctacaaactcagtctctggccagcagccacagcttgctctgaccagagtgcctagcgtctctcagcctggagtccgtcctgcctgccctgggcagcctttggccaatggacccttttctgcaggccatgttccctgtagcacatcaagaacgctgggaagtacagacactattttgataggcaataatcatataacaggaagtggaagtaatggaaacgtgccttacctgcagcgaaacgcactcactctacctcataaccgcacaaacctgaccagcagcgcagaggagccgtggaaaaaccaactatctaactccactcaggggcttcacaaaggtcagagttcacattcggcaggtcctaatggtgaacgacctctctcttccactgggccttcccagcatctccaggcagctggctctggtattcagaatcagaacggacatcccaccctgcctagcaattcagtaacacagggggctgctctcaatcacctctcctctcacactgctacctcaggtggacaacaaggcattaccttaaccaaagagagcaagccttcaggaaacatattgacggtgcctgaaacaagcaggcacactggagagacacctaacagcactgccagtgtcgagggacttcctaatcatgtccatcagatgacggcagatgctgtttgcagtcctagccatggagattctaagtcaccaggtttactaagttcagacaatcctcagctctctgccttgttgatgggaaaagccaataacaatgtgggtactggaacctgtgacaaagtcaataacatccacccagctgttcatacaaagactgataactctgttgcctcttcaccatcttcagccatttcaacagcaacaccttctccaaaatccactgagcagacaaccacaaacagtgttaccagccttaacagccctcacagtgggctacacacaattaatggagaagggatggaagaatctcagagccccatgaaaacagatctgcttctggttaaccacaaacctagtccacagatcataccatcaatgtctgtgtccatataccccagctcagcagaagttctgaaggcatgcaggaatctaggtaaaaatggcttatctaacagtagcattttgttggataaatgtccacctccaagaccaccatcttcaccataccctcccttgccaaaggacaagttgaatccacctacacctagtatttacttggaaaataaacgtgatgctttctttcctccattacatcaattttgtacaaatccgaacaaccctgttacagtaatacgtggccttgctggagctctcattgctgcaggaaaagagattatatggcatgggcggacaaaagaagaaccagctcattactgtagcatttgtgaagtggaggtttttgatctgctttttgtcactaatgagagtaattcacgaaagacctacatagtacattgccaagattgtgcacgaaaaacaagcggaaacttggaaaactttgtggtgctagaacagtacaaaatggaggacctgatgcaagtctatgaccaatttacattagctcctccattaccatccgcctcatcttga

SEQ ID NO: 150223 - DNA, 5924 bp, Homo sapiens
  Payload ID: 9659
  Gene Symbol: KDM6A
  Gene Name: lysine (K)-specific demethylase 6A
  ENST ID: ENST00000611820
  CDS Start-End: 448-4737
gtgacacaattacaacaactttgtgctggtgccggggaagtttgtgtctccaacgaatcccctcagtgctccccagccccgcgcgctccggccgttcccgccgtccccgcctgtggctgccccctgcccaaccccgcgatgtgaccctacagccgaaagccgccgctgccgacccgggggctccgcagcccctgccgccgccgccgccgccttcaccgccgccgcgttgggatttttcgtcgccgccgcccgcggcggaggaggaggcggcgataaagttggtgtgctggtcccgcgcgcagattgggggcgtcactgcgggccccggtccgagggggggtgtcggcgttggagttgtgaattcgctgcgtttccatgaaatcctgcggagtgtcgctcgctaccgccgccgctgccgccgccgctttcggtgatgaggaaaagaaaatggcggcgggaaaagcgagcggcgagagcgaggaggcgtcccccagcctgacagccgaggagagggaggcgctcggcggactggacagccgcctctttgggttcgtgagatttcatgaagatggcgccaggacgaaggccctactgggcaaggctgttcgctgctatgaatctctaatcttaaaagctgaaggaaaagtggagtctgatttcttttgtcaattaggtcacttcaacctcttattggaagattatccaaaagcattatctgcataccagaggtactacagtttacagtctgactactggaagaatgctgcctttttatatggtcttggtttggtctacttccattataatgcatttcagtgggcaattaaagcatttcaggaggtgctttatgttgatcccagcttttgtcgagccaaggaaattcatttacgacttgggcttatgttcaaagtgaacacagactatgagtctagtttaaagcattttcagttagctttggttgactgtaatccctgcactttgtccaatgctgaaattcaatttcacattgcccacttatatgaaacccagaggaaatatcattctgcaaaagaagcttatgaacaacttttgcagacagagaatctttctgcacaagtaaaagcaactgtcttacaacagttaggttggatgcatcacactgtagatctcctgggagataaagccaccaaggaaagctatgctattcagtatctccaaaagtccttggaagcagatcctaattctggccagtcctggtatttcctcggaaggtgctattcaagtattgggaaagttcaggatgcctttatatcttacaggcagtctattgataaatcagaagcaagtgcagatacatggtgttcaataggtgtgctatatcagcagcaaaatcagcccatggatgctttacaggcctatatttgtgctgtacaattggaccatggccatgctgcagcctggatggacctaggcactctctatgaatcctgcaaccagcctcaggatgccattaaatgctacttaaatgcaactagaagcaaaagttgtagtaatacctctgcacttgcagcacgaattaagtatttacaggctcagttgtgtaaccttccacaaggtagtctacagaataaaactaaattacttcctagtattgaggaggcgtggagcctaccaattcccgcagagcttacctccaggcagggtgccatgaacacagcacagcaggcatgtaaacctcatcatccaaatactgaacctgtattaggcctcagtcaaacaccaatttcacagcaatccttgccactacacatgattccttctagccaagtagatgacctgtccagtcctgccaagaggaaaagaacatctagtccaacaaagaatacttctgacaattggagtggtggacatgctgtgtcacatcctccagtacagcaacaagctcattcatggtgtttgacaccacagaaattacagcatttggaacagctccgcgcaaatagaaataatttaaatccagcacagaaactgatgctggaacagctggaaagtcagtttgtcttaatgcaacaacaccaaatgagaccaacaggagttgcacaggtacgatctactggaattcctaatgggccaacagctgactcatcactgcctacaaactcagtctctggccagcagccacagcttgctctgaccagagtgcctagcgtctctcagcctggagtccgtcctgcctgccctgggcagcctttggccaatggacccttttctgcaggccatgttccctgtagcacatcaagaacgctgggaagtacagacactattttgataggcaataatcatataacaggaagtggaagtaatggaaacgtgccttacctgcagcgaaacgcactcactctacctcataaccgcacaaacctgaccagcagcgcagaggagccgtggaaaaaccaactatctaactccactcaggggcttcacaaaggtcagagttcacattcggcaggtcctaatggtgaacgacctctctcttccactgggccttcccagcatctccaggcagctggctctggtattcagaatcagaacggacatcccaccctgcctagcaattcagtaacacagggggctgctctcaatcacctctcctctcacactgctacctcaggtggacaacaaggcattaccttaaccaaagagagcaagccttcaggaaacatattgacggtgcctgaaacaagcaggcacactggagagacacctaacagcactgccagtgtcgagggacttcctaatcatgtccatcagatgacggcagatgctgtttgcagtcctagccatggagattctaagtcaccaggtttactaagttcagacaatcctcagctctctgccttgttgatgggaaaagccaataacaatgtgggtactggaacctgtgacaaagtcaataacatccacccagctgttcatacaaagactgataactctgttgcctcttcaccatcttcagccatttcaacagcaacaccttctccaaaatccactgagcagacaaccacaaacagtgttaccagccttaacagccctcacagtgggctacacacaattaatggagaagggatggaagaatctcagagccccatgaaaacagatctgcttctggttaaccacaaacctagtccacagatcataccatcaatgtctgtgtccatataccccagctcagcagaagttctgaaggcatgcaggaatctaggtaaaaatggcttatctaacagtagcattttgttggataaatgtccacctccaagaccaccatcttcaccataccctcccttgccaaaggacaagttgaatccacctacacctagtatttacttggaaaataaacgtgatgctttctttcctccattacatcaattttgtacaaatccgaacaaccctgttacagtaatacgtggccttgctggagctcttaagttagacctgggacttttctctactaaaactttggtggaagctaacaatgaacatatggtagaagtgaggacacagttgttgcagccagcagatgaaaactgggatcccactggaacaaagaaaatctggcattgtgaaagtaatagatctcatactacaattgctaaatatgcacagtaccaggcctcctcattccaggaatcattgagagaagaaaatgaaaaaagaagtcatcataaagaccactcagatagtgaatctacatcgtcagataattctgggaggaggaggaaaggaccctttaaaaccataaagtttgggaccaatattgacctatctgatgacaaaaagtggaagttgcagctacatgagctgactaaacttcctgcttttgtgcgtgtcgtatcagcaggaaatcttctaagccatgttggtcataccatattgggcatgaacacagttcaactatacatgaaagttccagggagcagaacaccaggtcatcaggaaaataacaacttctgttcagttaacataaatattggcccaggtgactgtgaatggtttgttgttcctgaaggttactggggtgttctgaatgacttctgtgaaaaaaataatttgaatttcctaatgggttcttggtggcccaatcttgaagatctttatgaagcaaatgttccagtgtataggtttattcagcgacctggagatttggtctggataaatgcaggcactgttcattgggttcaggctattggctggtgcaacaacattgcttggaatgttggtccacttacagcctgccagtataaattggcagtggaacggtacgaatggaacaaattgcaaagtgtgaagtcaatagtacccatggttcatctttcctggaatatggcacgaaatatcaaggtctcagatccaaagctttttgaaatgattaagtattgtcttctaagaactctgaagcaatgtcagacattgagggaagctctcattgctgcaggaaaagagattatatggcatgggcggacaaaagaagaaccagctcattactgtagcatttgtgaagtggaggtttttgatctgctttttgtcactaatgagagtaattcacgaaagacctacatagtacattgccaagattgtgcacgaaaaacaagcggaaacttggaaaactttgtggtgctagaacagtacaaaatggaggacctgatgcaagtctatgaccaatttacattagctcctccattaccatccgcctcatcttgatattgttccatggacattaaatgagaccttttctgctattcaggaaataacccagttctgcaccactggtttttgtagctatctcgtaaggctgctggctgaaaactgtgtctatgcaaccttccaagtgcggagtgtcaaccaactggacgggagagagtactgctcctactccaggactctcacaaagctgatgagctgtacttcagaaaaaaataataatttccatgttttgtatatatctgacaaaactggcaacatcttacagactactgacttgaagacaacctcttttatatttctctatttctgggctgatgaatttgttttcatctgtcttttcccccttcagaattttccttggaaaaaaaatactagcctagctggtcatttctttgtaaggtagttagcaattttaagtctttctttggtcaacttttttttaatgtgaaaagttaggtaagacacttttttactgcttttatgtttttctgtcttgttttgagaccatgatggttacacttttggttcctaaataaaatttaaaaaattaacagccaagtcacaaaggtaatggattgcacatagactaaggaataaacttcagatttgtgatttttgtttctaatcttgatgtaaatttacactatttataaatacatatttattgcttgaaaatatttgtgaatggaatgctgttattttttccagatttacctgccattgaaattttaaggagttctgtaatttcaaacactactcctattacattttctatgtgtaaataaaactgcttagcattgtacagaaacttttattaaaattgtttaatgtttaaagagttttctattgtttgagttttaaaaaagactttatgtacagtgcccagtttttgttcatttttgaaatctgattatatatattttatatatacttatgtatgtatatataatatatatagaaatctggatatatatgtataaatctttagaacttaaatttttctcgttttaagtttcacatctatggtagatttttgaggtgtctactgtaaagtattgcttacaaaaagtatgattatttttaaagaaatatatatggtatgtatcctcaagacctaaaatgtcagactggtttattgttaagttgcaattactgcaatgacagaccaataaacaattgctgcc

SEQ ID NO: 150224 - DNA, 6713 bp, Homo sapiens
  Payload ID: 9660
  Gene Symbol: KDM6B
  Gene Name: lysine (K)-specific demethylase 6B
  Uniprot ID: O15054
  ENST ID: ENST00000254846
  CDS Start-End: 390-5438
aggttccccccagggcaacatgccagccccgtagcactgcccaccccacccactgtggtctgttgtaccccactgctggggtggtggttccaatgagacagggcacaccaaactccatctggctgttactgaggcggagacacgggtgatgattggctttctggggagagaggaagtcctgtgattggccagatctctggagcttgccgacgcggtgtgaggacgctcccacggaggccggaattggctgtgaaaggactgaggcagccatctgggggtagcgggcactcttatcagagcggctggagccggaccatcgtcccagagagctggggcagggggccgtgcccaatctccagggctcctggggccactgctgacctggctggatgcatcgggcagtggaccctccaggggcccgcgctgcacgggaagcctttgcccttgggggcctgagctgtgctggggcctggagctcctgcccgcctcatccccctcctcgtagcgcatggctgcctggaggcagatgctcagccagcattgggcagcccccgcttcctgctcccctacccccttcacatggcagtagttctgggcaccccagcaaaccatattatgctccaggggcgcccactccaagacccctccatgggaagctggaatccctgcatggctgtgtgcaggcattgctccgggagccagcccagccagggctttgggaacagcttgggcaactgtacgagtcagagcacgatagtgaggaggccacacgctgctaccacagcgcccttcgatacggaggaagcttcgctgagctggggccccgcattggccgactgcagcaggcccagctctggaactttcatactggctcctgccagcaccgagccaaggtcctgcccccactggagcaagtgtggaacttgctacaccttgagcacaaacggaactatggagccaagcggggaggtcccccggtgaagcgagctgctgaacccccagtggtgcagcctgtgcctcctgcagcactctcaggcccctcaggggaggagggcctcagccctggaggcaagcgaaggagaggctgcaactctgaacagactggccttcccccagggctgccactgcctccaccaccattaccaccaccaccaccaccaccaccaccaccaccaccacccctgcctggcctggctaccagccccccatttcagctaaccaagccagggctgtggagtaccctgcatggagatgcctggggcccagagcgcaagggttcagcacccccagagcgccaggagcagcggcactcgctgcctcacccatatccatacccagctccagcgtacaccgcgcacccccctggccaccggctggtcccggctgctcccccaggcccaggcccccgccccccaggagcagagagccatggctgcctgcctgccacccgtccccccggaagtgaccttagagagagcagagttcagaggtcgcggatggactccagcgtttcaccagcagcaaccaccgcctgcgtgccttacgccccttcccggccccctggcctccccggcaccaccaccagcagcagcagtagcagcagcagcaacactggtctccggggcgtggagccgaacccaggcattcccggcgctgaccattaccaaactcccgcgctggaggtctctcaccatggccgcctggggccctcggcacacagcagtcggaaaccgttcttgggggctcccgctgccactccccacctatccctgccacctggaccttcctcaccccctccacccccctgtccccgcctcttacgccccccaccaccccctgcctggttgaagggtccggcctgccgggcagcccgagaggatggagagatcttagaagagctcttctttgggactgagggacccccccgccctgccccaccacccctcccccatcgcgagggcttcttggggcctccggcctcccgcttttctgtgggcactcaggattctcacacccctcccactcccccaaccccaaccaccagcagtagcaacagcaacagtggcagccacagcagcagccctgctgggcctgtgtcctttcccccaccaccctatctggccagaagtatagacccccttccccggcctcccagcccagcacagaacccccaggacccacctcttgtacccctgactcttgccctgcctccagcccctccttcctcctgccaccaaaatacctcaggaagcttcaggcgcccggagagcccccggcccagggtctccttcccaaagacccccgaggtggggccggggccacccccaggccccctgagtaaagccccccagcctgtgccgcccggggttggggagctgcctgcccgaggccctcgactctttgattttccccccactccgctggaggaccagtttgaggagccagccgaattcaagatcctacctgatgggctggccaacatcatgaagatgctggacgaatccattcgcaaggaagaggaacagcaacaacacgaagcaggcgtggccccccaacccccgctgaaggagccctttgcatctctgcagtctcctttccccaccgacacagcccccaccactactgctcctgctgtcgccgtcaccaccaccaccaccaccaccaccaccaccacggccacccaggaagaggagaagaagccaccaccagccctaccaccaccaccgcctctagccaagttccctccaccctctcagccacagccaccaccacccccaccccccagcccggccagcctgctcaaatccttggcctccgtgctggagggacaaaagtactgttatcgggggactggagcagctgtttccacccggcctgggcccttgcccaccactcagtattcccctggccccccatcaggtgctaccgccctgccgcccacctcagcggcccctagcgcccagggctccccacagccctctgcttcctcgtcatctcagttctctacctcaggcgggccctgggcccgggagcgcagggcgggcgaagagccagtcccgggccccatgacccccacccaaccgcccccacccctatctctgccccctgctcgctctgagtctgaggtgctagaagagatcagccgggcttgcgagacccttgtggagcgggtgggccggagtgccactgacccagccgacccagtggacacagcagagccagcggacagtgggactgagcgactgctgccccccgcacaggccaaggaggaggctggcggggtggcggcagtgtcaggcagctgtaagcggcgacagaaggagcatcagaaggagcatcggcggcacaggcgggcctgtaaggacagtgtgggtcgtcggccccgtgagggcagggcaaaggccaaggccaaggtccccaaagaaaagagccgccgggtgctggggaacctggacctgcagagcgaggagatccagggtcgtgagaagtcccggcccgatcttggcggggcctccaaggccaagccacccacagctccagcccctccatcagctcctgcaccttctgcccagcccacacccccgtcagcctctgtccctggaaagaaggctcgggaggaagccccagggccaccgggtgtcagccgggccgacatgctgaagctgcgctcacttagtgaggggccccccaaggagctgaagatccggctcatcaaggtagagagtggtgacaaggagacctttatcgcctctgaggtggaagagcggcggctgcgcatggcagacctcaccatcagccactgtgctgctgacgtcgtgcgcgccagcaggaatgccaaggtgaaagggaagtttcgagagtcctacctttcccctgcccagtctgtgaaaccgaagatcaacactgaggagaagctgccccgggaaaaactcaacccccctacacccagcatctatctggagagcaaacgggatgccttctcacctgtcctgctgcagttctgtacagaccctcgaaatcccatcacagtgatccggggcctggcgggctccctgcggctcaacttgggcctcttctccaccaagaccctggtggaagcgagtggcgaacacaccgtggaagttcgcacccaggtgcagcagccctcagatgagaactgggatctgacaggcactcggcagatctggccttgtgagagctcccgttcccacaccaccattgccaagtacgcacagtaccaggcctcatccttccaggagtctctgcaggaggagaaggagagtgaggatgaggagtcagaggagccagacagcaccactggaacccctcctagcagcgcaccagacccgaagaaccatcacatcatcaagtttggcaccaacatcgacttgtctgatgctaagcggtggaagccccagctgcaggagctgctgaagctgcccgccttcatgcgggtaacatccacgggcaacatgctgagccacgtgggccacaccatcctgggcatgaacacggtgcagctgtacatgaaggtgcccggcagccgaacgccaggccaccaggagaataacaacttctgctccgtcaacatcaacattggcccaggcgactgcgagtggttcgcggtgcacgagcactactgggagaccatcagcgctttctgtgatcggcacggcgtggactacttgacgggttcctggtggccaatcctggatgatctctatgcatccaatattcctgtgtaccgcttcgtgcagcgacccggagacctcgtgtggattaatgcggggactgtgcactgggtgcaggccaccggctggtgcaacaacattgcctggaacgtggggcccctcaccgcctatcagtaccagctggccctggaacgatacgagtggaatgaggtgaagaacgtcaaatccatcgtgcccatgattcacgtgtcatggaacgtggctcgcacggtcaaaatcagcgaccccgacttgttcaagatgatcaagttctgcctgctgcagtccatgaagcactgccaggtgcaacgcgagagcctggtgcgggcagggaagaaaatcgcttaccagggccgtgtcaaggacgagccagcctactactgcaacgagtgcgatgtggaggtgtttaacatcctgttcgtgacaagtgagaatggcagccgcaacacgtacctggtacactgcgagggctgtgcccggcgccgcagcgcaggcctgcagggcgtggtggtgctggagcagtaccgcactgaggagctggctcaggcctacgacgccttcacgctggtgagggcccggcgggcgcgcgggcagcggaggagggcactggggcaggctgcagggacgggcttcgggagcccggccgcgcctttccctgagcccccgccggctttctccccccaggccccagccagcacgtcgcgatgaggccggacgccccgcccgcctgcctgcccgcgcaaggcgccgcggggccaccagcacatgcctgggctggacctaggtcccgcctgtggccgagaagggggtcgggcccagcccttccaccccattggcagctcccctcacttaatttattaagaaaaactttttttttttttttagcaaatatgaggaaaaaaggaaaaaaaatgggagacgggggagggggctggcagcccctcgcccaccagcgcctcccctcaccgactttggcctttttagcaacagacacaaggaccaggctccggcggcggcgggggtcacatacgggttccctcaccctgccagccgcccgcccgcccggcgcagatgcacgcggctcgtgtatgtacatagacgttacggcagccgaggtttttaatgagattctttctatgggctttacccctcccccggaacctccttttttacttccaatgctagctgtgacccctgtacatgtctctttattcacttggttatgatttgtattttttgttcttttcttgtttttttgtttttaatttataacagtcccactcacctctatttattcatttttgggaaaacccgacctcccacacccccaagccatcctgcccgcccctccagggaccgcccgtcgccgggctctccccgcgccccagtgtgtgtccgggcccggcccgaccgtctccacccgtccgcccgcggctccagccgggttctcatggtgctcaaacccgctcccctcccctacgtcctgcactttctcggaccagtccccccactcccgacccgaccccagccccacctgagggtgagcaactcctgtactgtaggggaagaagtgggaactgaaatggtattttgtaaaaaaaataaataaaataaaaaaattaaaggttttaaagaaagaactatgaggaaaaggaaccccgtccttcccagccccggccaactttaaaaaacacagaccttcacccccacccccttttctttttaagtgtgaaacaacccagggccagggcctcactggggcagggacaccccggggtgagtttctctggggctttattttcgttttgttggttgttttttctccacgctggggctgcggaggggtggggggtttacagtcccgcaccctcgcactgcactgtctctctgccccaggggcagaggggtcttcccaaccctacccctattttcggtgatttttgtgtgagaatattaatattaaaaataaacggagaaaaaaaa

SEQ ID NO: 150225 - DNA, 5422 bp, Homo sapiens
  Payload ID: 9660
  Gene Symbol: KDM6B
  Gene Name: lysine (K)-specific demethylase 6B
  Uniprot ID: O15054
  ENST ID: ENST00000448097
  CDS Start-End: 332-5263
tctgttgtaccccactgctggggtggtggttccaatgagacagggcacaccaaactccatctggctgttactgaggcggagacacgggtgatgattggctttctggggagagaggaagtcctgtgattggccagatctctggagcttgccgacgcggtgtgaggacgctcccacggaggccggaattggctgtgaaaggactgaggcagccatctgggggtagcgggcactcttatcagagcggctggagccggaccatcgtcccagagagctggggcagggggccgtgcccaatctccagggctcctggggccactgctgacctggctggatgcatcgggcagtggaccctccaggggcccgcgctgcacgggaagcctttgcccttgggggcctgagctgtgctggggcctggagctcctgcccgcctcatccccctcctcgtagcgcatggctgcctggaggcagatgctcagccagcattgggcagcccccgcttcctgctcccctacccccttcacatggcagtagttctgggcaccccagcaaaccatattatgctccaggggcgcccactccaagacccctccatgggaagctggaatccctgcatggctgtgtgcaggcattgctccgggagccagcccagccagggctttgggaacagcttgggcaactgtacgagtcagagcacgatagtgaggaggccacacgctgctaccacagcgcccttcgatacggaggaagcttcgctgagctggggccccgcattggccgactgcagcaggcccagctctggaactttcatactggctcctgccagcaccgagccaaggtcctgcccccactggagcaagtgtggaacttgctacaccttgagcacaaacggaactatggagccaagcggggaggtcccccggtgaagcgagctgctgaacccccagtggtgcagcctgtgcctcctgcagcactctcaggcccctcaggggaggagggcctcagccctggaggcaagcgaaggagaggctgcaactctgaacagactggccttcccccagggctgccactgcctccaccaccattaccaccaccaccaccaccaccaccaccaccaccaccacccctgcctggcctggctaccagccccccatttcagctaaccaagccagggctgtggagtaccctgcatggagatgcctggggcccagagcgcaagggttcagcacccccagagcgccaggagcagcggcactcgctgcctcacccatatccatacccagctccagcgtacaccgcgcacccccctggccaccggctggtcccggctgctcccccaggcccaggcccccgccccccaggagcagagagccatggctgcctgcctgccacccgtccccccggaagtgaccttagagagagcagagttcagaggtcgcggatggactccagcgtttcaccagcagcaaccaccgcctgcgtgccttacgccccttcccggccccctggcctccccggcaccaccaccagcagcagcagtagcagcagcagcaacactggtctccggggcgtggagccgaacccaggcattcccggcgctgaccattaccaaactcccgcgctggaggtctctcaccatggccgcctggggccctcggcacacagcagtcggaaaccgttcttgggggctcccgctgccactccccacctatccctgccacctggaccttcctcaccccctccacccccctgtccccgcctcttacgccccccaccaccccctgcctggttgaagggtccggcctgccgggcagcccgagaggatggagagatcttagaagagctcttctttgggactgagggacccccccgccctgccccaccacccctcccccatcgcgagggcttcttggggcctccggcctcccgcttttctgtgggcactcaggattctcacacccctcccactcccccaaccccaaccaccagcagtagcaacagcaacagtggcagccacagcagcagccctgctgggcctgtgtcctttcccccaccaccctatctggccagaagtatagacccccttccccggcctcccagcccagcacagaacccccaggacccacctcttgtacccctgactcttgccctgcctccagcccctccttcctcctgccaccaaaatacctcaggaagcttcaggcgcccggagagcccccggcccagggtctccttcccaaagacccccgaggtggggccggggccacccccaggccccctgagtaaagccccccagcctgtgccgcccggggttggggagctgcctgcccgaggccctcgactctttgattttccccccactccgctggaggaccagtttgaggagccagccgaattcaagatcctacctgatgggctggccaacatcatgaagatgctggacgaatccattcgcaaggaagaggaacagcaacaacacgaagcaggcgtggccccccaacccccgctgaaggagccctttgcatctctgcagtctcctttccccaccgacacagcccccaccactactgctcctgctgtcgccgtcaccaccaccaccaccaccaccaccaccaccacggccacccaggaagaggagaagaagccaccaccagccctaccaccaccaccgcctctagccaagttccctccaccctctcagccacagccaccaccacccccaccccccagcccggccagcctgctcaaatccttggcctccgtgctggagggacaaaagtactgttatcgggggactggagcagctgtttccacccggcctgggcccttgcccaccactcagtattcccctggccccccatcaggtgctaccgccctgccgcccacctcagcggcccctagcgcccagggctccccacagccctctgcttcctcgtcatctcagttctctacctcaggcgggccctgggcccgggagcgcagggcgggcgaagagccagtcccgggccccatgacccccacccaaccgcccccacccctatctctgccccctgctcgctctgagtctgaggtgctagaagagatcagccgggcttgcgagacccttgtggagcgggtgggccggagtgccactgacccagccgacccagtggacacagcagagccagcggacagtgggactgagcgactgctgccccccgcacaggccaaggaggaggctggcggggtggcggcagtgtcaggcagctgtaagcggcgacagaaggagcatcagaaggagcatcggcggcacaggcgggcctgtaaggacagtgtgggtcgtcggccccgtgagggcagggcaaaggccaaggccaaggtccccaaagaaaagagccgccgggtgctggggaacctggacctgcagagcgaggagatccagggtcgtgagaagtcccggcccgatcttggcggggcctccaaggccaagccacccacagctccagcccctccatcagctcctgcaccttctgcccagcccacacccccgtcagcctctgtccctggaaagaaggctcgggaggaagccccagggccaccgggtgtcagccgggccgacatgctgaagctgcgctcacttagtgaggggccccccaaggagctgaagatccggctcatcaaggtagagagtggtgacaaggagacctttatcgcctctgaggtggaagagcggcggctgcgcatggcagacctcaccatcagccactgtgctgctgacgtcgtgcgcgccagcaggaatgccaaggtgaaagggaagtttcgagagtcctacctttcccctgcccagtctgtgaaaccgaagatcaacactgaggagaagctgccccgggaaaaactcaacccccctacacccagcatctatctggagagcaaacgggatgccttctcacctgtcctgctgcagttctgtacagaccctcgaaatcccatcacagtgatccggggcctggcgggctccctgcggctcaacttgggcctcttctccaccaagaccctggtggaagcgagtggcgaacacaccgtggaagttcgcacccaggtgcagcagccctcagatgagaactgggatctgacaggcactcggcagatctggccttgtgagagctcccgttcccacaccaccattgccaagtacgcacagtaccaggcctcatccttccaggagtctctgcaggaggagaaggagagtgaggatgaggagtcagaggagccagacagcaccactggaacccctcctagcagcgcaccagacccgaagaaccatcacatcatcaagtttggcaccaacatcgacttgtctgatgctaagcggtggaagccccagctgcaggagctgctgaagctgcccgccttcatgcgggtaacatccacgggcaacatgctgagccacgtgggccacaccatcctgggcatgaacacggtgcagctgtacatgaaggtgcccggcagccgaacgccaggccaccaggagaataacaacttctgctccgtcaacatcaacattggcccaggcgactgcgagtggttcgcggtgcacgagcactactgggagaccatcagcgctttctgtgatcggcacggcgtggactacttgacgggttcctggtggccaatcctggatgatctctatgcatccaatattcctgtgtaccgcttcgtgcagcgacccggagacctcgtgtggattaatgcggggactgtgcactgggtgcaggccaccggctggtgcaacaacattgcctggaacgtggggcccctcaccgcctatcagtaccagctggccctggaacgatacgagtggaatgaggtgaagaacgtcaaatccatcgtgcccatgattcacgtgtcatggaacgtggctcgcacggtcaaaatcagcgaccccgacttgttcaagatgatcaagttctgcctgctgcagtccatgaagcactgccaggtgcaacgcgagagcctggtgcgggcagggaagaaaatcgcttaccagggccgtgtcaaggacgagccagcctactactgcaacgagtgcgatgtggaggtgtttaacatcctgttcgtgacaagtgagaatggcagccgcaacacgtacctggtacactgcgagggctgtgcccggcgccgcagcgcaggcctgcagggcgtggtggtgctggagcagtaccgcactgaggagctggctcaggcctacgacgccttcacgctggccccagccagcacgtcgcgatgaggccggacgccccgcccgcctgcctgcccgcgcaaggcgccgcggggccaccagcacatgcctgggctggacctaggtcccgcctgtggccgagaagggggtcgggcccagcccttccaccccattggcagctcccctcacttaatttattaagaaaaa

SEQ ID NO: 150226 - DNA, 1339 bp, Homo sapiens
  Payload ID: 9660
  Gene Symbol: KDM6B
  Gene Name: lysine (K)-specific demethylase 6B
  ENST ID: ENST00000570632
  CDS Start-End: 255-1339
ggagacacgggtgatgattggctttctggggagagaggaagtcctgtgattggccagatctctggagcttgccgacgcggtgtgaggacgctcccacggaggccggaattggctgtgaaaggactgaggcagccatctgggggtagcgggcactcttatcagagcggctggagccggaccatcgtcccagagagctggggcagggggccgtgcccaatctccagggctcctggggccactgctgacctggctggatgcatcgggcagtggaccctccaggggcccgcgctgcacgggaagcctttgcccttgggggcctgagctgtgctggggcctggagctcctgcccgcctcatccccctcctcgtagcgcatggctgcctggaggcagatgctcagccagcattgggcagcccccgcttcctgctcccctacccccttcacatggcagtagttctgggcaccccagcaaaccatattatgctccaggggcgcccactccaagacccctccatgggaagctggaatccctgcatggctgtgtgcaggcattgctccgggagccagcccagccagggctttgggaacagcttgggcaactgtacgagtcagagcacgatagtgaggaggccacacgctgctaccacagcgcccttcgatacggaggaagcttcgctgagctggggccccgcattggccgactgcagcaggcccagctctggaactttcatactggctcctgccagcaccgagccaaggtcctgcccccactggagcaagtgtggaacttgctacaccttgagcacaaacggaactatggagccaagcggggaggtcccccggtgaagcgagctgctgaacccccagtggtgcagcctgtgcctcctgcagcactctcaggcccctcaggggaggagggcctcagccctggaggcaagcgaaggagaggctgcaactctgaacaggagcagcggcactcgctgcctcacccatatccatacccagctccagcgtacaccgcgcacccccctggccaccggctggtcccggctgctcccccaggcccaggcccccgccccccaggagcagagagccatggctgcctgcctgccacccgtccccccggaagtgaccttagagagagcagagttcagaggtcgcggatggactccagcgtttcaccagcagcaaccaccgcctgcgtgccttacgccccttcccggccccctggcctccccggcaccaccaccagcagcagcagtagcagcagcagcaacactggtctccggggcgtggagccgaacccaggcattcccggcgctgaccattaccaaactcc

SEQ ID NO: 150227 - DNA, 9272 bp, Homo sapiens
  Payload ID: 9661
  Gene Symbol: KDM7A
  Gene Name: lysine (K)-specific demethylase 7A
  Uniprot ID: Q6ZMT4
  ENST ID: ENST00000397560
  CDS Start-End: 99-2924
gccgccgcggctgctgcaggaggcggcgctggctggcggctgcgctcgctccagtcggcgagcggagtagcgagcgagcgtgtgtgtgttttttaaagatggccggagcggcggcggcggtggccgcgggagcagcagctggagccgccgcggcagccgtgtcggtggcggctcccggccgggcctcggcgcctccgccgcccccgcccgtgtactgtgtgtgccggcagccgtacgacgtgaaccgcttcatgatcgagtgcgatatctgcaaggactggttccacggcagctgtgttggagtagaagaacatcatgctgttgacattgacctgtatcactgtcccaactgtgcagttttacatggttcctccttgatgaaaaaaaggaggaactggcacagacatgactacacagaaattgatgatggttccaaaccagtgcaagctggaactagaactttcattaaggaattacgctctcgagtcttcccaagtgccgatgaaataattataaagatgcatggcagccagctgacacaaagatatctggagaaacatggatttgatgtccctattatggtcccaaaattagatgatctaggactcaggctcccttcacctacattttctgtgatggatgtggaacgttatgtaggtggtgacaaagtgatagatgtcattgatgtggcgaggcaggcagacagcaaaatgacacttcacaattatgttaaatacttcatgaatcctaacagaccaaaagtgttaaatgtgatcagccttgaattttcagatacaaagatgtctgaattggtggaggtccctgatatagccaaaaaactttcctgggtggaaaattattggccagatgattcagtctttcccaagccatttgttcagaaatattgcttaatgggagttcaagacagctatacagatttccacattgacttcggtggaacttcagtctggtaccatgtcctctggggtgagaagattttttatttaataaagccaacagatgaaaatttggcacgttatgaatcttggagttcatctgtgacccagagtgaggtgttctttggagataaggtggataaatgctacaaatgtgtggtaaagcagggacataccttatttgttcctacagggtggatccatgctgtgctcacttctcaggactgtatggcttttggggggaacttcctgcacaaccttaacattggcatgcagctcaggtgttatgagatggagaaaaggctaaaaacaccagatcttttcaaattccctttctttgaagccatatgttggtttgtagccaaaaacttgctggaaaccctgaaagaactgagagaagatggtttccagcctcaaacttacctagtacagggagtgaaagcactgcatactgctttaaaattatggatgaaaaaagaacttgtatctgaacatgcctttgaaattccagacaatgttagacctggacaccttattaaagaactttctaaagtaattcgagcaatagaggaggaaaacggcaaaccagttaaatctcagggaattcctattgtgtgtccagtttcacgatcctcaaatgaagcaacttccccataccattcccgaagaaagatgaggaaacttcgagatcataatgtccgaactccttctaacctagacatcctagagctccacacaagggaggtcctcaaaagattagagatgtgtccatgggaagaggacatcttgagctctaaactgaatggaaaattcaacaaacatctccaaccatcctccacagtacctgaatggagagcgaaagataatgatctacgattactgctgacaaatggaagaataattaaagatgaaaggcagccctttgcagatcaaagtctttatacagcagatagtgaaaatgaagaggataaaagaaggacaaaaaaggcaaaaatgaagatagaagagagttcaggagtagagggagtggaacatgaagaatctcaaaaaccactgaatgggttttttacacgtgtgaaatcagaactcaggagtagatcatcaggatattctgatatttctgagtcagaagactccggacccgagtgcactgcactgaaaagtatctttaccactgaagagtctgaaagttcaggtgatgaaaagaaacaagaaataacatccaactttaaggaggaatctaatgtgatgaggaacttccttcaaaagagccagaagccatctagaagtgaaattccaattaaaagggaatgtcctacctcgacgagcacagaggaagaagctattcagggcatgctgtctatggcagggttgcactattccacgtgtttacaaaggcaaatacaaagcacagactgcagtggtgaaagaaactctctccaggatcccagcagctgccatggcagtaaccatgaggttaggcagttgtatcgctatgataaaccagtggaatgtggataccatgtcaagactgaagatccagacttgaggacttcctcctggattaaacagtttgatacttccagatttcatcctcaggatctaagtagaagccagaaatgcatcagaaaggaaggttcatcagaaattagtcagagggtacaaagtaggaattatgtggacagcagcggctcaagccttcagaatggaaagtatatgcagaattcaaacctgacttcgggggcgtgccagataagtaatggcagtctaagcccagaaaggccagttggtgaaacttccttctcggtgccccttcaccccaccaagagaccggcatcaaatccaccacctatcagcaaccaggcaacaaaaggtaaacgtccaaaaaaaggaatggcaacagccaaacaacgtcttgggaagatccttaagttgaacagaaatggccatgcacgtttctttgtgtgacagagctgctgttgcagccattcttccctttggagaccagtctaggggtgcaggagcctggagcttccgctgtccccctgcctggagcagtttgtgtgtatagtaagaacactgcccgaagaacagaatgaacctgatgctgcattttcactgtgccacacccactcagcaataaccattttggacctggtgggggagaggaagaaggagggtagaaccttaaaaagagaccttgaactggaaagggtctcttgtcagggcttgaattttattttgttgttggtagtgtcttgatgtattttcagtggtagggtaaagaattatcaataatttatttaacagatttttttttaaagttaacagcttttaaattctttttttaaagctatttatttggaagatttctggagaaatatctcactaatttagatgtaagaatgtgaaggtttttaaattatttttgatagtgtgtgtgttacatgtggggaagggccacagtaacagtaactagtctggactcttaaatttgatattcaggttaaagtcttaaacagggatttgatgcattaattattttaaattaagatgtatatgaaaatcattttattttatatatttcatgtgttttttataagctattagcttcgcttttgctaacatccaaggtgcatactgttatccaggttgattaccttatatcccaccttccctctgcactccccatcattttgtgatgacccagtaagactcttctctttgcagggaaacactttcgtagccaatgtgtaagaactccatgaaagatccctcatttctcatttcgtttgacattgtgattttcttctcaacattaaaaaaaataggcttttgcattttcatttctgctgatgatatctgggtcccaaagagagcagctttaatatatttttcctacttgtgggaaaagtattataagtttggttaaattgtcatgtttatagtttttccaagtacatttgtaactacagcaggccttcttcgtactgctgctgttggacaacaggactggcacctgctgcagaggttataccttatgatacttttatgctccatacctgatttgttgggaaatgttatttaggatattcaaatctgcatcataagccgtaatataataggattaatactacattaagttgtatagaagcaagcatgttggaatagatcttttgtgtgtatttactttttttatttcttaattttctaaagaattacttaagatatggatttggagtaaaatgggtgcttttggcagtttcttccatctatcctaacctgaccagtacatattgaggttaagtatctggttaaactttaaggtattcatttatctcctttatgtatgatttttactaaatgccagttttcatttgcttatagtagcttctattttcccttttttccatccatggcataaaaataagtgatttctgggggtggggcagaaatgttcccaagtctgacaatagagcattttacaaattcctacaaagaaaatataggcaaatagataaaatttatttttatggagaagaaatatggccatattatggatttgtcttttttttactcagcaagatagcaggacttacccttctctattaagtatcacttgaattgctaagaagaaaaaagtctgtaccatcatctttcatggttgcattcaaatgtatattttcaaagagaaatacttcttgtgtccccattccaaaatgtcatgggataaatatgaaatagtttatgaagtagcctttctggttcagagtgactggaccaaagtctgaatcttatctgggtatcaggaaaaagaatttttatggaaatccttagtgtctataaacaacccgtgtaaaccctgtctacactatgccaaaaccagtggaaagatgggtagagtcatcttatctcaggatgtcaaaaatctgggtttgactgattcccctaccttcccacacagtatattcttgtgatttttgcttttctgtagatcctgagtcggtgttacaatagtcatgtttttattttgggttaagaaatacgaggtgtaagagctataatttccttttcgtgttatatcatgatctgggttttcttttttcctttacgtttttcacagctcttgagtattttctatttttttctttagtcacaaaaattaaaattaaactttatttttatgaattaaaatgaaatttaatttatttttatgaattaaaattgtggccagtatccactgtgtccttaggctgagaagtactaatttggagtagcccgtgtgtggaattctaaagtgaaggtactgtggattcatttttagtagttttagccccttaataagtggctaagttagaaaactttcagcgaggtaatagaaccacttgaatagaatccatgtgtctttttctgaattggtgaaaattcggccactgatccagtgactcctggtcaaacgtcttataacattactggccataatgcatccctttatctcatggaaatggctgaactttgtggtagctgctgcgagtacctgggcttaacagtaatagagaacctcatttataccatacagacacagcaacttaggaagacagcactgatagcatttagctagttgtaaccaaatacaaatatgtaaaattgagaattatgattaacatatgcaactttagtaataggaatagatgataattttcctgtattgtttcaaataagtgactgttcagctgggatccattggattataatttacaatgtcacataatattatgcttttcaatattgatgagtgatgtaaacaatataaagttggcagtttgtagtagttcagtatcctagaaatacattgaacttcataagtatcagttcatttttaagcatacagaattgaagattctgactgaaatcataaactcagaggaaacaagcccatctttatcactaattacttagcttgaatacttttctatttttaaataatcctaattattgccttttcaattatagtctactgtatttatttatatgggatcaacaggtatttatcaaacatctactgtgtgcccagcactacctagtactgttggggaacatcaatttgcagttgtggtctctgcccttgaaggtatcttctccaggaaattagcagtattattttcacttctaagcaaacatgagcaaaagaggacctgttcattaaaaaacatgctgacttttttagtttcaactgagatatgccactgtagaagtgaaagtaatttcacaattaaagaaatgcttcaacttggtaattaatatggtcatacagggacttggtgtagcatgcaaggaagcagaagacctgggcttttgtcgaagttctgccatttaggtatcagctgtgtaaccttgaataagtcacttaactctttctcttagttttctcatttgtaaatttggattaaagtgtttattatgataatcaattaagaaaatctcttaacacttcatacatacagagaacttatcattaagttaaaactggcaattaatgcacctttatatatatttttaaatgaaaactaatactattcatgatgtttattttatatcaaatatatgcccagggcatgctactttaaaaatccgaggaatctccaacaaggtgctggattaaaatcagatttcgtgcttgaagtggaagaaaaatgaagttgtttatggataagagagtgagaatgtgtatcctcaagtacgttaagatgatttaactgaaagatggctttaggtttttcttgaagaattaggaaagtaccatccccacagattcagcatactcttcaggtactagataaaggtgaaggaagtcatggaattaaaatgacttagcaactccccagggaacttgtggggagaatgaggtggttagaaaggtgagaatgcacaaagacagctctgggttgggtaccaacagtttgcttggtagaaagaaaccagtgtaggaaaggagacgccaccagacatcttcaacagacaagattctttctgcctttttcaaaagatgctctctgcagcagtaagactatagatagagttgattggaatatcatgtgacccagtatgctactgctaggcataattatcaaaaattcatttttctcattaaatattgttaattgctcgccacataaagagaagctagagctcaccagtcttggtggtgtcctagaccttcctctaaagcagtcttgggaagctggatcatcagatctttagcctagacagagtgtcgctggtaaataaaggagacacaggtaacccagagtggacagtgatttgcgtggggagacacagtggatctggggcctctgatactttgcttcctaaaacagcccccagttttcggcttgccctatgagatgatgttcatgtgcttccttgaaaccaggtggaaagaaaggggaagaattaattttctcattctgttgctgttgaacgtaatgtaatcttaatactgtagccttcctagaagcccttccctctttttcatgctgtaaagtcaaatatttgatatccttaacataaattttaaaaattaaggtcattaggaagcaaatgtctatttccaaagcaatgagcttgttgtgactgtgattttattcttctatagtatttttttcctcattttaactgagaggagaaaataatactcttttgcaatatccttaggttctccccttccccctggtgccccttctagtgtcttaagactttgtcttaacaagtataacattacattttgttgttaaaacctttcgaaactgtattcagtgattcttccaagtttatctgctctgcactatttcactaataaaccctggctaccacgtagcccttgatctccaagtagtttacctatgcaagacctgtgacactctgaattcacttctctttctttcagaaagtagtcataaatggagcttaattataaaggtaaaacttgtctccaaccagtttcattttggccatttctttttcaaaatgtcagctgttttcctccaagatttttcaccaaaacaatgatcataagtgctggaatatataatactttgcaggcataaaataacccagacatactctcatatttctttggtgtattttggttggtaaaacttaccagcattaaatgtaaaatataatgaggagttaattccttacctagaactatttcttccttttaagattcataagtaaccttttatttttacagagctacgtataacttccacattacagtcagggacctgaggtgtaacttactaagtgaaccccaaggttattttatcttgcaaaagaaacctaaaccaaactaagggccttacagtttatggttagactgaatcaaaagctataacctcaatttttccaaaaacagcttctgactgcaaaagcaagtcatacagttgttaggtatgaaatagcactgatcaggaaatgcatcttcgcagatggtatttccttcagaaaagacttttctacttttaatataaattaagccataacagtttcatgctgtggaaagagggtgaaaaggttcattttaagagattatataatatgaactttcacatttactgtgaaatgtctaactttgccagtgcttcagcaagtttttttggggggtgatggggaggggtagtattggttttagaggtttcaaatctgtgaactttggagaggggacagttgttggctctggtatttactagttttgtagtaacgttttgctagcctgactgacttttcttactggtttttatgcccacggtccgaggggactgttcttcttgttgggggtgtctgcggaatagcgtctcgtcttgtttgtataggcagtcaatgtgtgtgacatgtgtgtcctttcagtccggaagcccactgtgtgacaatggcgtggggtgtggctgggaggtggggtgctgaagcttgaagagcatttctttgctgattcataacagtatttcccatcttttgcctgcaggcagggaaagtgtacagtatttattttgtttctgttttactttaaatttgtaagtctttaagtagcttacattgattattataggggaggacaagtgacttgtttaaagttgtatttagtattctttccaatttctgtattttaaaatattgaaattaaaattgtattacttctgttttgatttttttagcacttagtgtattttttgctcattttgtttgaaagtataaatgttgaaaattgtataaaatgcgtccttgaaagaaaaagaatctgaattctatatccaa

SEQ ID NO: 150228 - DNA, 7943 bp, Homo sapiens
  Payload ID: 9661
  Gene Symbol: KDM7A
  Gene Name: lysine (K)-specific demethylase 7A
  ENST ID: ENST00000472616
  CDS Start-End: 1-1214
tagccaaaaacttgctggaaaccctgaaagaactgagagaagatggtttccagcctcaaacttacctagtacagggagtgaaagcactgcatactgctttaaaattatggatgaaaaaagaacttgtatctgaacatgcctttgaaattccagacaatgttagacctggacaccttattaaagaactttctaaagtaattcgagcaatagaggaggaaaacggcaaaccagttaaatctcagggaattcctattgtgtgtccagtttcacgatcctcaaatgaagcaacttccccataccattcccgaagaaagatgaggaaacttcgagatcataatgtccgaactccttctaacctagacatcctagagctccacacaagggaggtcctcaaaagattagagatgtgtccatgggaagaggacatcttgagctctaaactgaatggaaaattcaacaaacatctccaaccatcctccacagtacctgaatggagagcgaaagataatgatctacgattactgctgacaaatggaagaataattaaagatgaaaggcagccctttgcagatcaaagtctttatacagcagatagtgaaaatgaagaggataaaagaaggacaaaaaaggcaaaaatgaagatagaagagagttcaggagtagagggagtggaacatgaagaatctcaaaaaccactgaatgggttttttacacgtgtgaaatcagaactcaggagtagatcatcaggatattctgatatttctgagtcagaagactccggacccgagtgcactgcactgaaaagtatctttaccactgaagagtctgaaagttcaggtgatgaaaagaaacaagaaataacatccaactttaaggaggaatctaatgtgatgaggaacttccttcaaaagagccagaagccatctagaagtgaaattccaattaaaagggaatgtcctacctcgacgagcacagaggaagaagctattcagggcatgctgtctatggcagggttgcactattccacgtgtttacaaaggcaaatacaaagcacagactgcagtggtgaaagaaactctctccaggatcccagcagctgccatggcagtaaccatgaggttaggcagttgtatcgctatgataaaccagtggaatgtgagacgaggtctcacctatgttgcccagactggtctccaactcctgagctcaagtgatcctcctgcctctgcttcccaaagtgctgagattacaggataccatgtcaagactgaagatccagacttgaggacttcctcctggattaaacagtttgatacttccagatttcatcctcaggatctaagtagaagccagaaatgcatcagaaaggaaggttcatcagaaattagtcagagggtacaaagtaggaattatgtggacagcagcggctcaagccttcagaatggaaagtatatgcagaattcaaacctgacttcgggggcgtgccagataagtaatggcagtctaagcccagaaaggccagttggtgaaacttccttctcggtgccccttcaccccaccaagagaccggcatcaaatccaccacctatcagcaaccaggcaacaaaaggtaaacgtccaaaaaaaggaatggcaacagccaaacaacgtcttgggaagatccttaagttgaacagaaatggccatgcacgtttctttgtgtgacagagctgctgttgcagccattcttccctttggagaccagtctaggggtgcaggagcctggagcttccgctgtccccctgcctggagcagtttgtgtgtatagtaagaacactgcccgaagaacagaatgaacctgatgctgcattttcactgtgccacacccactcagcaataaccattttggacctggtgggggagaggaagaaggagggtagaaccttaaaaagagaccttgaactggaaagggtctcttgtcagggcttgaattttattttgttgttggtagtgtcttgatgtattttcagtggtagggtaaagaattatcaataatttatttaacagatttttttttaaagttaacagcttttaaattctttttttaaagctatttatttggaagatttctggagaaatatctcactaatttagatgtaagaatgtgaaggtttttaaattatttttgatagtgtgtgtgttacatgtggggaagggccacagtaacagtaactagtctggactcttaaatttgatattcaggttaaagtcttaaacagggatttgatgcattaattattttaaattaagatgtatatgaaaatcattttattttatatatttcatgtgttttttataagctattagcttcgcttttgctaacatccaaggtgcatactgttatccaggttgattaccttatatcccaccttccctctgcactccccatcattttgtgatgacccagtaagactcttctctttgcagggaaacactttcgtagccaatgtgtaagaactccatgaaagatccctcatttctcatttcgtttgacattgtgattttcttctcaacattaaaaaaaataggcttttgcattttcatttctgctgatgatatctgggtcccaaagagagcagctttaatatatttttcctacttgtgggaaaagtattataagtttggttaaattgtcatgtttatagtttttccaagtacatttgtaactacagcaggccttcttcgtactgctgctgttggacaacaggactggcacctgctgcagaggttataccttatgatacttttatgctccatacctgatttgttgggaaatgttatttaggatattcaaatctgcatcataagccgtaatataataggattaatactacattaagttgtatagaagcaagcatgttggaatagatcttttgtgtgtatttactttttttatttcttaattttctaaagaattacttaagatatggatttggagtaaaatgggtgcttttggcagtttcttccatctatcctaacctgaccagtacatattgaggttaagtatctggttaaactttaaggtattcatttatctcctttatgtatgatttttactaaatgccagttttcatttgcttatagtagcttctattttcccttttttccatccatggcataaaaataagtgatttctgggggtggggcagaaatgttcccaagtctgacaatagagcattttacaaattcctacaaagaaaatataggcaaatagataaaatttatttttatggagaagaaatatggccatattatggatttgtcttttttttactcagcaagatagcaggacttacccttctctattaagtatcacttgaattgctaagaagaaaaaagtctgtaccatcatctttcatggttgcattcaaatgtatattttcaaagagaaatacttcttgtgtccccattccaaaatgtcatgggataaatatgaaatagtttatgaagtagcctttctggttcagagtgactggaccaaagtctgaatcttatctgggtatcaggaaaaagaatttttatggaaatccttagtgtctataaacaacccgtgtaaaccctgtctacactatgccaaaaccagtggaaagatgggtagagtcatcttatctcaggatgtcaaaaatctgggtttgactgattcccctaccttcccacacagtatattcttgtgatttttgcttttctgtagatcctgagtcggtgttacaatagtcatgtttttattttgggttaagaaatacgaggtgtaagagctataatttccttttcgtgttatatcatgatctgggttttcttttttcctttacgtttttcacagctcttgagtattttctatttttttctttagtcacaaaaattaaaattaaactttatttttatgaattaaaatgaaatttaatttatttttatgaattaaaattgtggccagtatccactgtgtccttaggctgagaagtactaatttggagtagcccgtgtgtggaattctaaagtgaaggtactgtggattcatttttagtagttttagccccttaataagtggctaagttagaaaactttcagcgaggtaatagaaccacttgaatagaatccatgtgtctttttctgaattggtgaaaattcggccactgatccagtgactcctggtcaaacgtcttataacattactggccataatgcatccctttatctcatggaaatggctgaactttgtggtagctgctgcgagtacctgggcttaacagtaatagagaacctcatttataccatacagacacagcaacttaggaagacagcactgatagcatttagctagttgtaaccaaatacaaatatgtaaaattgagaattatgattaacatatgcaactttagtaataggaatagatgataattttcctgtattgtttcaaataagtgactgttcagctgggatccattggattataatttacaatgtcacataatattatgcttttcaatattgatgagtgatgtaaacaatataaagttggcagtttgtagtagttcagtatcctagaaatacattgaacttcataagtatcagttcatttttaagcatacagaattgaagattctgactgaaatcataaactcagaggaaacaagcccatctttatcactaattacttagcttgaatacttttctatttttaaataatcctaattattgccttttcaattatagtctactgtatttatttatatgggatcaacaggtatttatcaaacatctactgtgtgcccagcactacctagtactgttggggaacatcaatttgcagttgtggtctctgcccttgaaggtatcttctccaggaaattagcagtattattttcacttctaagcaaacatgagcaaaagaggacctgttcattaaaaaacatgctgacttttttagtttcaactgagatatgccactgtagaagtgaaagtaatttcacaattaaagaaatgcttcaacttggtaattaatatggtcatacagggacttggtgtagcatgcaaggaagcagaagacctgggcttttgtcgaagttctgccatttaggtatcagctgtgtaaccttgaataagtcacttaactctttctcttagttttctcatttgtaaatttggattaaagtgtttattatgataatcaattaagaaaatctcttaacacttcatacatacagagaacttatcattaagttaaaactggcaattaatgcacctttatatatatttttaaatgaaaactaatactattcatgatgtttattttatatcaaatatatgcccagggcatgctactttaaaaatccgaggaatctccaacaaggtgctggattaaaatcagatttcgtgcttgaagtggaagaaaaatgaagttgtttatggataagagagtgagaatgtgtatcctcaagtacgttaagatgatttaactgaaagatggctttaggtttttcttgaagaattaggaaagtaccatccccacagattcagcatactcttcaggtactagataaaggtgaaggaagtcatggaattaaaatgacttagcaactccccagggaacttgtggggagaatgaggtggttagaaaggtgagaatgcacaaagacagctctgggttgggtaccaacagtttgcttggtagaaagaaaccagtgtaggaaaggagacgccaccagacatcttcaacagacaagattctttctgcctttttcaaaagatgctctctgcagcagtaagactatagatagagttgattggaatatcatgtgacccagtatgctactgctaggcataattatcaaaaattcatttttctcattaaatattgttaattgctcgccacataaagagaagctagagctcaccagtcttggtggtgtcctagaccttcctctaaagcagtcttgggaagctggatcatcagatctttagcctagacagagtgtcgctggtaaataaaggagacacaggtaacccagagtggacagtgatttgcgtggggagacacagtggatctggggcctctgatactttgcttcctaaaacagcccccagttttcggcttgccctatgagatgatgttcatgtgcttccttgaaaccaggtggaaagaaaggggaagaattaattttctcattctgttgctgttgaacgtaatgtaatcttaatactgtagccttcctagaagcccttccctctttttcatgctgtaaagtcaaatatttgatatccttaacataaattttaaaaattaaggtcattaggaagcaaatgtctatttccaaagcaatgagcttgttgtgactgtgattttattcttctatagtatttttttcctcattttaactgagaggagaaaataatactcttttgcaatatccttaggttctccccttccccctggtgccccttctagtgtcttaagactttgtcttaacaagtataacattacattttgttgttaaaacctttcgaaactgtattcagtgattcttccaagtttatctgctctgcactatttcactaataaaccctggctaccacgtagcccttgatctccaagtagtttacctatgcaagacctgtgacactctgaattcacttctctttctttcagaaagtagtcataaatggagcttaattataaaggtaaaacttgtctccaaccagtttcattttggccatttctttttcaaaatgtcagctgttttcctccaagatttttcaccaaaacaatgatcataagtgctggaatatataatactttgcaggcataaaataacccagacatactctcatatttctttggtgtattttggttggtaaaacttaccagcattaaatgtaaaatataatgaggagttaattccttacctagaactatttcttccttttaagattcataagtaaccttttatttttacagagctacgtataacttccacattacagtcagggacctgaggtgtaacttactaagtgaaccccaaggttattttatcttgcaaaagaaacctaaaccaaactaagggccttacagtttatggttagactgaatcaaaagctataacctcaatttttccaaaaacagcttctgactgcaaaagcaagtcatacagttgttaggtatgaaatagcactgatcaggaaatgcatcttcgcagatggtatttccttcagaaaagacttttctacttttaatataaattaagccataacagtttcatgctgtggaaagagggtgaaaaggttcattttaagagattatataatatgaactttcacatttactgtgaaatgtctaactttgccagtgcttcagcaagtttttttggggggtgatggggaggggtagtattggttttagaggtttcaaatctgtgaactttggagaggggacagttgttggctctggtatttactagttttgtagtaacgttttgctagcctgactgacttttcttactggtttttatgcccacggtccgaggggactgttcttcttgttgggggtgtctgcggaatagcgtctcgtcttgtttgtataggcagtcaatgtgtgtgacatgtgtgtcctttcagtccggaagcccactgtgtgacaatggcgtggggtgtggctgggaggtggggtgctgaagcttgaagagcatttctttgctgattcataacagtatttcccatcttttgcctgcaggcagggaaagtgtacagtatttattttgtttctgttttactttaaatttgtaagtctttaagtagcttacattgattattataggggaggacaagtgacttgtttaaagttgtatttagtattctttccaatttctgtattttaaaatattgaaattaaaattgtattacttctgttttga

SEQ ID NO: 150229 - DNA, 2462 bp, Homo sapiens
  Payload ID: 9662
  Gene Symbol: KDM8
  Gene Name: lysine (K)-specific demethylase 8
  Uniprot ID: Q8N371
  ENST ID: ENST00000286096
  CDS Start-End: 174-1424
gtcgtgatcagacgagcggtgagcgatcgatactcctatgctagcctctggctcctcaggggacacagccgagtggtcggaccaaacgcaacgagtcttcgccagcccaaaggcgactcgacaccgtcccagctgaagagaggcacgggactgaaccagctggtggtggcccgatggctggagacacccactgccccgcagagcccctggccagagaaggcactttatgggaggccctcagggcgctcctgccgcacagtaaagaagacctgaagttggacctcggggagaaagtggagaggagcgtggtgacattgttgcagcgagccactgagctcttctacgagggcaggagggacgagtgtctgcagagcagcgaggtgatcctggactactcctgggagaagctcaacacgggcacatggcaggacgtagacaaagactggcgccgggtctacgccatcggctgcctcctgaaagccctgtgtctgtgccaggcacctgaggatgccaacactgtggccgcagccctgcgggtctgtgacatgggcctgctgatgggggcagccatcctgggggacatccttcttaaagtcgctgccatcctccagacacacctccctggaaagaggcctgcccgtggctccctcccagagcaaccctgcacaaagaaagcaagggcggaccatggtttgattccagatgtgaagttagaaaaaacagtcccccggctgcaccgtccgtccctccagcatttcagggagcagtttttggttccagggaggcccgtgatcctgaaaggcgtggctgaccactggccgtgcatgcagaagtggagtttggagtatatccaggagatcgctggctgccgaactgtcccagtggaagttggttcgaggtacacagatgaggaatggtcccagaccctcatgacggtcaacgagttcatcagcaaatacatcgtgaatgagccaagggacgtcgggtaccttgctcagcaccagctctttgaccagatcccggagttgaagcaggacatcagcatccccgactactgcagcctgggcgatggggaggaggaggaaatcaccatcaatgcctggtttggtccccagggaaccatctccccactacatcaggatccccagcaaaacttcctagtgcaggtgatggggaggaagtacatccggctgtattccccgcaggagtcaggggctctgtaccctcatgacacgcaccttctccataacacgagccaggttgacgtggagaatcccgacctggaaaagttccccaagtttgccaaggccccattcctgtcctgcatcctgtctcctggagagatcctgttcatcccggtgaaatactggcattacgtgcgggctctggatttgagcttctcggtcagcttctggtggtcgtagccaggataggagctgaaagggcctgacatgcagacagcattcatctgttcactaatttcctgggtcctggaatctatagagacaagcaggactgaacctgtgtcctgaagagccttcactgcccagtggcagccctggggggctgagctccagcactggacaggcacagagcaggggctgcccaggaaggagcacactccaggccaggggtgcatggcagaggaaggtggggagagcccagaaggacattgcagacagacagcctgcatggggactctggcatcagaaagccgaatgtttttgggaaacgggtgggtcacacaggcaggggtgaaacatgggctctgaggttggctacctgattcaaacccggccgcgctgtgcacctgctgggtgacttggccaggatcccccacttcgctgtgcccatatggaaaagagggcaaggccagtcctcactgccgagggccgagaaggcggtgccgagcccctgctgctgcatgaaccttagccgctgtcactgatcccaattactctgatccttttgcccttccttcccataacggcctgctggacgccacagcctgaatactggagagagctgggcattgcccaggtcacaggagagagtccgtagagacctgcgcaggagccgggacccctgctgagcagtgggagctttctgtcatccccatggctcaaggataacctacctgcctgcagagaagtgcgaaggtcttgctggatgacttttcacccgcactcacccaggagcaggctcccaagtgaagaaaccaccgaaccatcaccagctcctagaagcctccctcctaccaccttctagtcaccatcccccagaagtaatgactctcaaacctgggggatttgaggccagggggagagccaggctctatgctttctgtaattgtgtctcgtttgtgtgcacgcaggtttgttttatgttttggccattaagattttccccagccctctgttttttgttttttaaactaaatagagatgggatcttgctatgtt

SEQ ID NO: 150230 - DNA, 1612 bp, Homo sapiens
  Payload ID: 9662
  Gene Symbol: KDM8
  Gene Name: lysine (K)-specific demethylase 8
  Uniprot ID: Q8N371
  ENST ID: ENST00000441782
  CDS Start-End: 119-1483
agtgcgcctgcgcgggttttatactctgctatatgtgtgtccgctgcttttaggcaaccagccgctgcccctgggccgcaaggcaggctggaaacgattccgccgtcaggtcccaaatatgagccgcgagaaatgcagccccggggaaggcgctgaggagggaagggggtctgaggcctcggggctcaaggccagtgcggggcacgggactgaaccagctggtggtggcccgatggctggagacacccactgccccgcagagcccctggccagagaaggcactttatgggaggccctcagggcgctcctgccgcacagtaaagaagacctgaagttggacctcggggagaaagtggagaggagcgtggtgacattgttgcagcgagccactgagctcttctacgagggcaggagggacgagtgtctgcagagcagcgaggtgatcctggactactcctgggagaagctcaacacgggcacatggcaggacgtagacaaagactggcgccgggtctacgccatcggctgcctcctgaaagccctgtgtctgtgccaggcacctgaggatgccaacactgtggccgcagccctgcgggtctgtgacatgggcctgctgatgggggcagccatcctgggggacatccttcttaaagtcgctgccatcctccagacacacctccctggaaagaggcctgcccgtggctccctcccagagcaaccctgcacaaagaaagcaagggcggaccatggtttgattccagatgtgaagttagaaaaaacagtcccccggctgcaccgtccgtccctccagcatttcagggagcagtttttggttccagggaggcccgtgatcctgaaaggcgtggctgaccactggccgtgcatgcagaagtggagtttggagtatatccaggagatcgctggctgccgaactgtcccagtggaagttggttcgaggtacacagatgaggaatggtcccagaccctcatgacggtcaacgagttcatcagcaaatacatcgtgaatgagccaagggacgtcgggtaccttgctcagcaccagctctttgaccagatcccggagttgaagcaggacatcagcatccccgactactgcagcctgggcgatggggaggaggaggaaatcaccatcaatgcctggtttggtccccagggaaccatctccccactacatcaggatccccagcaaaacttcctagtgcaggtgatggggaggaagtacatccggctgtattccccgcaggagtcaggggctctgtaccctcatgacacgcaccttctccataacacgagccaggttgacgtggagaatcccgacctggaaaagttccccaagtttgccaaggccccattcctgtcctgcatcctgtctcctggagagatcctgttcatcccggtgaaatactggcattacgtgcgggctctggatttgagcttctcggtcagcttctggtggtcgtagccaggataggagctgaaagggcctgacatgcagacagcattcatctgttcactaatttcctgggtcctggaatctatagagacaagcaggactgaacctgtgtcctgaagagccttcactgcccagtgg

SEQ ID NO: 150231 - DNA, 560 bp, Homo sapiens
  Payload ID: 9662
  Gene Symbol: KDM8
  Gene Name: lysine (K)-specific demethylase 8
  ENST ID: ENST00000562733
  CDS Start-End: 201-560
tactctgctatatgtgtgtccgctgcttttaggcaaccagccgctgcccctgggccgcaaggcaggctggaaacgattccgccgtcaggtcccaaatatgagccgcgagaaatgcagccccggggaaggcgctgaggagggaagggggtctgaggcctcggggctcaaggcacgggactgaaccagctggtggtggcccgatggctggagacacccactgccccgcagagcccctggccagagaaggcactttatgggaggccctcagggcgctcctgccgcacagtaaagaagacctgaagttggacctcggggagaaagtggagaggagcgtggtgacattgttgcagcgagccactgagctcttctacgagggcaggagggacgagtgtctgcagagcagcgaggtgatcctggactactcctgggagaagctcaacacgggcacatggcaggacgtagacaaagactggcgccgggtctacgccatcggctgcctcctgaaagccctgtgtctgtgccaggcacctgaggatgccaacactgtggccgcagccctg

SEQ ID NO: 150232 - DNA, 798 bp, Homo sapiens
  Payload ID: 9662
  Gene Symbol: KDM8
  Gene Name: lysine (K)-specific demethylase 8
  ENST ID: ENST00000567735
  CDS Start-End: 1-272
cggtcaacgagttcatcagcaaatacatcgtgaatgagccaagggacgtcgggtaccttgctcagcaccagctctttgaccagatcccggagttgaagcaggacatcagcatccccgactactgcagcctgggcgatggggaggaggaggaaatcaccatcaatgcctggttgacgtggagaatcccgacctggaaaagttccccaagtttgccaaggccccattcctgtcctgcatcctgtctcctggagagatcctgttcatcccggtgaaatactggcattacgtgcgggctctggatttgagcttctcggtcagcttctggtggtcgtagccaggataggagctgaaagggcctgacatgcagacagcattcatctgttcactaatttcctgggtcctggaatctatagagacaagcaggactgaacctgtgtcctgaagagccttcactgcccagtggcagccctggggggctgagctccagcactggacaggcacagagcaggggctgcccaggaaggagcacactccaggccaggggtgcatggcagaggaaggtggggagagcccagaaggacattgcagacagacagcctgcatggggactctggcatcagaaagccgaatgtttttgggaaacgggtgggtcacacaggcaggggtgaaacatgggctctgaggttggctacctgattcaaacccggccgcgctgtgcacctgctgggtgacttggccaggatcccccacttcgctgtgcccatatggaaaagagggcaaggccagtcctcactgccg

SEQ ID NO: 150233 - DNA, 583 bp, Homo sapiens
  Payload ID: 9662
  Gene Symbol: KDM8
  Gene Name: lysine (K)-specific demethylase 8
  ENST ID: ENST00000569329
  CDS Start-End: 95-583
gagaatgcaatttagctcgtcgccggcctgccctgcgggaggataaagggaaaggttccgcgcgcacgggactgaaccagctggtggtggcccgatggctggagacacccactgccccgcagagcccctggccagagaaggcactttatgggaggccctcagggcgctcctgccgcacagtaaagaagacctgaagttggacctcggggagaaagtggagaggagcgtggtgacattgttgcagcgagccactgagctcttctacgagggcaggagggacgagtgtctgcagagcagcgaggtgatcctggactactcctgggagaagctcaacacgggcacatggcaggacgtagacaaagactggcgccgggtctacgccatcggctgcctcctgaaagccctgtgtctgtgccaggcacctgaggatgccaacactgtggccgcagccctgcgggtctgtgacatgggcctgctgatgggggcagccatcctgggggacatccttcttaaagtcgctgccatcctccagacacacctccctggaaagaggcctgcccgtggctccctcccagagcaaccc

SEQ ID NO: 150234 - DNA, 1655 bp, Homo sapiens
  Payload ID: 9662
  Gene Symbol: KDM8
  Gene Name: lysine (K)-specific demethylase 8
  Uniprot ID: Q8N371
  ENST ID: ENST00000568965
  CDS Start-End: 1-663
atggctggagacacccactgccccgcagagcccctggccagagaaggcactttatgggaggccctcagggcgctcctgccgcacagtaaagaagacctgaagttggacctcggggagaaagtggagaggagcgtggtgacattgttgcagcgagccactgagctcttctacgagggcaggagggacgagtgtctgcagagcagcgaggtgatcctggactactcctgggagaagctcaacacgggcacatggcaggacgtagacaaagactggcgccgggtctacgccatcggctgcctcctgaaagccctgtgtctgtgccaggcacctgaggatgccaacactgtggccgcagccctgcgggtctgtgacatgggcctgctgatgggggcagccatcctgggggacatccttcttaaagtcgctgccatcctccagacacacctccctggaaagaggcctgcccgtggctccctcccagagcaaccctgcacaaaggttgacgtggagaatcccgacctggaaaagttccccaagtttgccaaggccccattcctgtcctgcatcctgtctcctggagagatcctgttcatcccggtgaaatactggcattacgtgcgggctctggatttgagcttctcggtcagcttctggtggtcgtagccaggataggagctgaaagggcctgacatgcagacagcattcatctgttcactaatttcctgggtcctggaatctatagagacaagcaggactgaacctgtgtcctgaagagccttcactgcccagtggcagccctggggggctgagctccagcactggacaggcacagagcaggggctgcccaggaaggagcacactccaggccaggggtgcatggcagaggaaggtggggagagcccagaaggacattgcagacagacagcctgcatggggactctggcatcagaaagccgaatgtttttgggaaacgggtgggtcacacaggcaggggtgaaacatgggctctgaggttggctacctgattcaaacccggccgcgctgtgcacctgctgggtgacttggccaggatcccccacttcgctgtgcccatatggaaaagagggcaaggccagtcctcactgccgagggccgagaaggcggtgccgagcccctgctgctgcatgaaccttagccgctgtcactgatcccaattactctgatccttttgcccttccttcccataacggcctgctggacgccacagcctgaatactggagagagctgggcattgcccaggtcacaggagagagtccgtagagacctgcgcaggagccgggacccctgctgagcagtgggagctttctgtcatccccatggctcaaggataacctacctgcctgcagagaagtgcgaaggtcttgctggatgacttttcacccgcactcacccaggagcaggctcccaagtgaagaaaccaccgaaccatcaccagctcctagaagcctccctcctaccaccttctagtcaccatcccccagaagtaatgactctcaaacctgggggatttgaggccagggggagagccaggctctatgctttctgtaattgtgtctcgtttgtgtgcacgcaggtttgttttatgttttggccattaagattttccccagccctc

SEQ ID NO: 150235 - DNA, 13655 bp, Homo sapiens
  Payload ID: 9663
  Gene Symbol: KMT2A
  Gene Name: lysine (K)-specific methyltransferase 2A
  Uniprot ID: Q03164
  ENST ID: ENST00000389506
  CDS Start-End: 1-11910
atggcgcacagctgtcggtggcgcttccccgcccgacccgggaccaccgggggcggcggcggcggggggcgccggggcctagggggcgccccgcggcaacgcgtcccggccctgctgcttccccccgggcccccggtcggcggtggcggccccggggcgcccccctcccccccggctgtggcggccgcggcggcggcggcgggaagcagcggggctggggttccagggggagcggccgccgcctcagcagcctcctcgtcgtccgcctcgtcttcgtcttcgtcatcgtcctcagcctcttcagggccggccctgctccgggtgggcccgggcttcgacgcggcgctgcaggtctcggccgccatcggcaccaacctgcgccggttccgggccgtgtttggggagagcggcgggggaggcggcagcggagaggatgagcaattcttaggttttggctcagatgaagaagtcagagtgcgaagtcccacaaggtctccttcagttaaaactagtcctcgaaaacctcgtgggagacctagaagtggctctgaccgaaattcagctatcctctcagatccatctgtgttttcccctctaaataaatcagagaccaaatctggagataagatcaagaagaaagattctaaaagtatagaaaagaagagaggaagacctcccaccttccctggagtaaaaatcaaaataacacatggaaaggacatttcagagttaccaaagggaaacaaagaagatagcctgaaaaaaattaaaaggacaccttctgctacgtttcagcaagccacaaagattaaaaaattaagagcaggtaaactctctcctctcaagtctaagtttaagacagggaagcttcaaataggaaggaagggggtacaaattgtacgacggagaggaaggcctccatcaacagaaaggataaagaccccttcgggtctcctcattaattctgaactggaaaagccccagaaagtccggaaagacaaggaaggaacacctccacttacaaaagaagataagacagttgtcagacaaagccctcgaaggattaagccagttaggattattccttcttcaaaaaggacagatgcaaccattgctaagcaactcttacagagggcaaaaaagggggctcaaaagaaaattgaaaaagaagcagctcagctgcagggaagaaaggtgaagacacaggtcaaaaatattcgacagttcatcatgcctgttgtcagtgctatctcctcgcggatcattaagacccctcggcggtttatagaggatgaggattatgaccctccaattaaaattgcccgattagagtctacaccgaatagtagattcagtgccccgtcctgtggatcttctgaaaaatcaagtgcagcttctcagcactcctctcaaatgtcttcagactcctctcgatctagtagccccagtgttgatacctccacagactctcaggcttctgaggagattcaggtacttcctgaggagcggagcgatacccctgaagttcatcctccactgcccatttcccagtccccagaaaatgagagtaatgataggagaagcagaaggtattcagtgtcggagagaagttttggatctagaacgacgaaaaaattatcaactctacaaagtgccccccagcagcagacctcctcgtctccacctccacctctgctgactccaccgccaccactgcagccagcctccagtatctctgaccacacaccttggcttatgcctccaacaatccccttagcatcaccatttttgcctgcttccactgctcctatgcaagggaagcgaaaatctattttgcgagaaccgacatttaggtggacttctttaaagcattctaggtcagagccacaatacttttcctcagcaaagtatgccaaagaaggtcttattcgcaaaccaatatttgataatttccgaccccctccactaactcccgaggacgttggctttgcatctggtttttctgcatctggtaccgctgcttcagcccgattgttttcgccactccattctggaacaaggtttgatatgcacaaaaggagccctcttctgagagctccaagatttactccaagtgaggctcactctagaatatttgagtctgtaaccttgcctagtaatcgaacttctgctggaacatcttcttcaggagtatccaatagaaaaaggaaaagaaaagtgtttagtcctattcgatctgaaccaagatctccttctcactccatgaggacaagaagtggaaggcttagtagttctgagctctcacctctcacccccccgtcttctgtctcttcctcgttaagcatttctgttagtcctcttgccactagtgccttaaacccaacttttacttttccttctcattccctgactcagtctggggaatctgcagagaaaaatcagagaccaaggaagcagactagtgctccggcagagccattttcatcaagtagtcctactcctctcttcccttggtttaccccaggctctcagactgaaagagggagaaataaagacaaggcccccgaggagctgtccaaagatcgagatgctgacaagagcgtggagaaggacaagagtagagagagagaccgggagagagaaaaggagaataagcgggagtcaaggaaagagaaaaggaaaaagggatcagaaattcagagtagttctgctttgtatcctgtgggtagggtttccaaagagaaggttgttggtgaagatgttgccacttcatcttctgccaaaaaagcaacagggcggaagaagtcttcatcacatgattctgggactgatattacttctgtgactcttggggatacaacagctgtcaaaaccaaaatacttataaagaaagggagaggaaatctggaaaaaaccaacttggacctcggcccaactgccccatccctggagaaggagaaaaccctctgcctttccactccttcatctagcactgttaaacattccacttcctccataggctccatgttggctcaggcagacaagcttccaatgactgacaagagggttgccagcctcctaaaaaaggccaaagctcagctctgcaagattgagaagagtaagagtcttaaacaaaccgaccagcccaaagcacagggtcaagaaagtgactcatcagagacctctgtgcgaggaccccggattaaacatgtctgcagaagagcagctgttgcccttggccgaaaacgagctgtgtttcctgatgacatgcccaccctgagtgccttaccatgggaagaacgagaaaagattttgtcttccatggggaatgatgacaagtcatcaattgctggctcagaagatgctgaacctcttgctccacccatcaaaccaattaaacctgtcactagaaacaaggcaccccaggaacctccagtaaagaaaggacgtcgatcgaggcggtgtgggcagtgtcccggctgccaggtgcctgaggactgtggtgtttgtactaattgcttagataagcccaagtttggtggtcgcaatataaagaagcagtgctgcaagatgagaaaatgtcagaatctacaatggatgccttccaaagcctacctgcagaagcaagctaaagctgtgaaaaagaaagagaaaaagtctaagaccagtgaaaagaaagacagcaaagagagcagtgttgtgaagaacgtggtggactctagtcagaaacctaccccatcagcaagagaggatcctgccccaaagaaaagcagtagtgagcctcctccacgaaagcccgtcgaggaaaagagtgaagaagggaatgtctcggcccctgggcctgaatccaaacaggccaccactccagcttccaggaagtcaagcaagcaggtctcccagccagcactggtcatcccgcctcagccacctactacaggaccgccaagaaaagaagttcccaaaaccactcctagtgagcccaagaaaaagcagcctccaccaccagaatcaggtccagagcagagcaaacagaaaaaagtggctccccgcccaagtatccctgtaaaacaaaaaccaaaagaaaaggaaaaaccacctccggtcaataagcaggagaatgcaggcactttgaacatcctcagcactctctccaatggcaatagttctaagcaaaaaattccagcagatggagtccacaggatcagagtggactttaaggaggattgtgaagcagaaaatgtgtgggagatgggaggcttaggaatcttgacttctgttcctataacacccagggtggtttgctttctctgtgccagtagtgggcatgtagagtttgtgtattgccaagtctgttgtgagcccttccacaagttttgtttagaggagaacgagcgccctctggaggaccagctggaaaattggtgttgtcgtcgttgcaaattctgtcacgtttgtggaaggcaacatcaggctacaaagcagctgctggagtgtaataagtgccgaaacagctatcaccctgagtgcctgggaccaaactaccccaccaaacccacaaagaagaagaaagtctggatctgtaccaagtgtgttcgctgtaagagctgtggatccacaactccaggcaaagggtgggatgcacagtggtctcatgatttctcactgtgtcatgattgcgccaagctctttgctaaaggaaacttctgccctctctgtgacaaatgttatgatgatgatgactatgagagtaagatgatgcaatgtggaaagtgtgatcgctgggtccattccaaatgtgagaatctttcagatgagatgtatgagattctatctaatctgccagaaagtgtggcctacacttgtgtgaactgtactgagcggcaccctgcagagtggcgactggcccttgaaaaagagctgcagatttctctgaagcaagttctgacagctttgttgaattctcggactaccagccatttgctacgctaccggcaggctgccaagcctccagacttaaatcccgagacagaggagagtataccttcccgcagctcccccgaaggacctgatccaccagttcttactgaggtcagcaaacaggatgatcagcagcctttagatctagaaggagtcaagaggaagatggaccaagggaattacacatctgtgttggagttcagtgatgatattgtgaagatcattcaagcagccattaattcagatggaggacagccagaaattaaaaaagccaacagcatggtcaagtccttcttcattcggcaaatggaacgtgtttttccatggttcagtgtcaaaaagtccaggttttgggagccaaataaagtatcaagcaacagtgggatgttaccaaacgcagtgcttccaccttcacttgaccataattatgctcagtggcaggagcgagaggaaaacagccacactgagcagcctcctttaatgaagaaaatcattccagctcccaaacccaaaggtcctggagaaccagactcaccaactcctctgcatcctcctacaccaccaattttgagtactgataggagtcgagaagacagtccagagctgaacccacccccaggcatagaagacaatagacagtgtgcgttatgtttgacttatggtgatgacagtgctaatgatgctggtcgtttactatatattggccaaaatgagtggacacatgtaaattgtgctttgtggtcagcggaagtgtttgaagatgatgacggatcactaaagaatgtgcatatggctgtgatcaggggcaagcagctgagatgtgaattctgccaaaagccaggagccaccgtgggttgctgtctcacatcctgcaccagcaactatcacttcatgtgttcccgagccaagaactgtgtctttctggatgataaaaaagtatattgccaacgacatcgggatttgatcaaaggcgaagtggttcctgagaatggatttgaagttttcagaagagtgtttgtggactttgaaggaatcagcttgagaaggaagtttctcaatggcttggaaccagaaaatatccacatgatgattgggtctatgacaatcgactgcttaggaattctaaatgatctctccgactgtgaagataagctctttcctattggatatcagtgttccagggtatactggagcaccacagatgctcgcaagcgctgtgtatatacatgcaagatagtggagtgccgtcctccagtcgtagagccggatatcaacagcactgttgaacatgatgaaaacaggaccattgcccatagtccaacatcttttacagaaagttcatcaaaagagagtcaaaacacagctgaaattataagtcctccatcaccagaccgacctcctcattcacaaacctctggctcctgttattatcatgtcatctcaaaggtccccaggattcgaacacccagttattctccaacacagagatcccctggctgtcgaccgttgccttctgcaggaagtcctaccccaaccactcatgaaatagtcacagtaggtgatcctttactctcctctggacttcgaagcattggctccaggcgtcacagtacctcttccttatcaccccagcggtccaaactccggataatgtctccaatgagaactgggaatacttactctaggaataatgtttcctcagtctccaccaccgggaccgctactgatcttgaatcaagtgccaaagtagttgatcatgtcttagggccactgaattcaagtactagtttagggcaaaacacttccacctcttcaaatttgcaaaggacagtggttactgtaggcaataaaaacagtcacttggatggatcttcatcttcagaaatgaagcagtccagtgcttcagacttggtgtccaagagctcctctttaaagggagagaagaccaaagtgctgagttccaagagctcagagggatctgcacataatgtggcttaccctggaattcctaaactggccccacaggttcataacacaacatctagagaactgaatgttagtaaaatcggctcctttgctgaaccctcttcagtgtcgttttcttctaaagaggccctctccttcccacacctccatttgagagggcaaaggaatgatcgagaccaacacacagattctacccaatcagcaaactcctctccagatgaagatactgaagtcaaaaccttgaagctatctggaatgagcaacagatcatccattatcaacgaacatatgggatctagttccagagataggagacagaaagggaaaaaatcctgtaaagaaactttcaaagaaaagcattccagtaaatcttttttggaacctggtcaggtgacaactggtgaggaaggaaacttgaagccagagtttatggatgaggttttgactcctgagtatatgggccaacgaccatgtaacaatgtttcttctgataagattggtgataaaggcctttctatgccaggagtccccaaagctccacccatgcaagtagaaggatctgccaaggaattacaggcaccacggaaacgcacagtcaaagtgacactgacacctctaaaaatggaaaatgagagtcaatccaaaaatgccctgaaagaaagtagtcctgcttcccctttgcaaatagagtcaacatctcccacagaaccaatttcagcctctgaaaatccaggagatggtccagtggcccaaccaagccccaataatacctcatgccaggattctcaaagtaacaactatcagaatcttccagtacaggacagaaacctaatgcttccagatggccccaaacctcaggaggatggctcttttaaaaggaggtatccccgtcgcagtgcccgtgcacgttctaacatgttttttgggcttaccccactctatggagtaagatcctatggtgaagaagacattccattctacagcagctcaactgggaagaagcgaggcaagagatcagctgaaggacaggtggatggggccgatgacttaagcacttcagatgaagacgacttatactattacaacttcactagaacagtgatttcttcaggtggagaggaacgactggcatcccataatttatttcgggaggaggaacagtgtgatcttccaaaaatctcacagttggatggtgttgatgatgggacagagagtgatactagtgtcacagccacaacaaggaaaagcagccagattccaaaaagaaatggtaaagaaaatggaacagagaacttaaagattgatagacctgaagatgctggggagaaagaacatgtcactaagagttctgttggccacaaaaatgagccaaagatggataactgccattctgtaagcagagttaaaacacagggacaagattccttggaagctcagctcagctcattggagtcaagccgcagagtccacacaagtaccccctccgacaaaaatttactggacacctataatactgagctcctgaaatcagattcagacaataacaacagtgatgactgtgggaatatcctgccttcagacattatggactttgtactaaagaatactccatccatgcaggctttgggtgagagcccagagtcatcttcatcagaactcctgaatcttggtgaaggattgggtcttgacagtaatcgtgaaaaagacatgggtctttttgaagtattttctcagcagctgcctacaacagaacctgtggatagtagtgtctcttcctctatctcagcagaggaacagtttgagttgcctctagagctaccatctgatctgtctgtcttgaccacccggagtcccactgtccccagccagaatcccagtagactagctgttatctcagactcaggggagaagagagtaaccatcacagaaaaatctgtagcctcctctgaaagtgacccagcactgctgagcccaggagtagatccaactcctgaaggccacatgactcctgatcattttatccaaggacacatggatgcagaccacatctctagccctccttgtggttcagtagagcaaggtcatggcaacaatcaggatttaactaggaacagtagcacccctggccttcaggtacctgtttccccaactgttcccatccagaaccagaagtatgtgcccaattctactgatagtcctggcccgtctcagatttccaatgcagctgtccagaccactccaccccacctgaagccagccactgagaaactcatagttgttaaccagaacatgcagccactttatgttctccaaactcttccaaatggagtgacccaaaaaatccaattgacctcttctgttagttctacacccagtgtgatggagacaaatacttcagtattgggacccatgggaggtggtctcacccttaccacaggactaaatccaagcttgccaacttctcaatctttgttcccttctgctagcaaaggattgctacccatgtctcatcaccagcacttacattccttccctgcagctactcaaagtagtttcccaccaaacatcagcaatcctccttcaggcctgcttattggggttcagcctcctccggatccccaacttttggtttcagaatccagccagaggacagacctcagtaccacagtagccactccatcctctggactcaagaaaagacccatatctcgtctacagacccgaaagaataaaaaacttgctccctctagtaccccttcaaacattgccccttctgatgtggtttctaatatgacattgattaacttcacaccctcccagcttcctaatcatccaagtctgttagatttggggtcacttaatacttcatctcaccgaactgtccccaacatcataaaaagatctaaatctagcatcatgtattttgaaccggcacccctgttaccacagagtgtgggaggaactgctgccacagcggcaggcacatcaacaataagccaggatactagccacctcacatcagggtctgtgtctggcttggcatccagttcctctgtcttgaatgttgtatccatgcaaactaccacaacccctacaagtagtgcgtcagttccaggacacgtcaccttaaccaacccaaggttgcttggtaccccagatattggctcaataagcaatcttttaatcaaagctagccagcagagcctggggattcaggaccagcctgtggctttaccgccaagttcaggaatgtttccacaactggggacatcacagaccccctctactgctgcaataacagcggcatctagcatctgtgtgctcccctccactcagactacgggcataacagccgcttcaccttctggggaagcagacgaacactatcagcttcagcatgtgaaccagctccttgccagcaaaactgggattcattcttcccagcgtgatcttgattctgcttcagggccccaggtatccaactttacccagacggtagacgctcctaatagcatgggactggagcagaacaaggctttatcctcagctgtgcaagccagccccacctctcctgggggttctccatcctctccatcttctggacagcggtcagcaagcccttcagtgccgggtcccactaaacccaaaccaaaaaccaaacggtttcagctgcctctagacaaagggaatggcaagaagcacaaagtttcccatttgcggaccagttcttctgaagcacacattccagaccaagaaacgacatccctgacctcaggcacagggactccaggagcagaggctgagcagcaggatacagctagcgtggagcagtcctcccagaaggagtgtgggcaacctgcagggcaagtcgctgttcttccggaagttcaggtgacccaaaatccagcaaatgaacaagaaagtgcagaacctaaaacagtggaagaagaggaaagtaatttcagctccccactgatgctttggcttcagcaagaacaaaagcggaaggaaagcattactgagaaaaaacccaagaaaggacttgtttttgaaatttccagtgatgatggctttcagatctgtgcagaaagtattgaagatgcctggaagtcattgacagataaagtccaggaagctcgatcaaatgcccgcctaaagcagctctcatttgcaggtgttaacggtttgaggatgctggggattctccatgatgcagttgtgttcctcattgagcagctgtctggtgccaagcactgtcgaaattacaaattccgtttccacaagccagaggaggccaatgaaccccccttgaaccctcacggctcagccagggctgaagtccacctcaggaagtcagcatttgacatgtttaacttcctggcttctaaacatcgtcagcctcctgaatacaaccccaatgatgaagaagaggaggaggtacagctgaagtcagctcggagggcaactagcatggatctgccaatgcccatgcgcttccggcacttaaaaaagacttctaaggaggcagttggtgtctacaggtctcccatccatggccggggtcttttctgtaagagaaacattgatgcaggtgagatggtgattgagtatgccggcaacgtcatccgctccatccagactgacaagcgggaaaagtattacgacagcaagggcattggttgctatatgttccgaattgatgactcagaggtagtggatgccaccatgcatggaaatgctgcacgcttcatcaatcactcgtgtgagcctaactgctattctcgggtcatcaatattgatgggcagaagcacattgtcatctttgccatgcgtaagatctaccgaggagaggaactcacttacgactataagttccccattgaggatgccagcaacaagctgccctgcaactgtggcgccaagaaatgccggaagttcctaaactaaagctgctcttctcccccagtgttggagtgcaaggaggcggggccatccaaagcaacgctgaaggccttttccagcagctgggagctcccggattgcgtggcacagctgaggggcctctgtgatggctgagctctcttatgtcctatactcacatcagacatgtgatcatagtcccagagacagagttgaggtctcgaagaaaagatccatgatcggctttctcctggggcccctccaattgtttactgttagaaagtgggaatggggtccctagcagacttgcctggaaggagcctattatagagggttggttatgttgggagattgggcctgaatttctccacagaaataagttgccatcctcaggttggccctttcccaagcactgtaagtgagtgggtcaggcaaagccccaaatggagggttggttagattcctgacagtttgccagccaggccccacctacagcgtctgtcgaacaaacagaggtctggtggttttccctactatcctcccactcgagagttcacttctggttgggagacaggattcctagcacctccggtgtcaaaaggctgtcatggggttgtgccaattaattaccaaacattgagcctgcaggctttgagtgggagtgttgcccccaggagccttatctcagccaattacctttcttgacagtaggagcggcttccctctcccattccctcttcactcccttttcttcctttcccctgtcttcatgccactgctttcccatgcttctttcgggttgtaggggagactgactgcctgctcaaggacactccctgctgggcataggatgtgcctgcaaaaagttccctgagcctgtaagcactccaggtggggaagtggacaggagccattggtcataaccagacagaatttggaaacattttcataaagctccatggagagttttaaagaaacatatgtagcatgattttgtaggagaggaaaaagattatttaaataggatttaaatcatgcaacaacgagagtatcacagccaggatgacccttgggtcccattcctaagacatggttactttattttccccttgttaagacataggaagacttaatttttaaacggtcagtgtccagttgaaggcagaacactaatcagatttcaaggcccacaacttggggactagaccaccttatgttgagggaactctgccacctgcgtgcaacccacagctaaagtaaattcaatgacactactgccctgattactccttaggatgtggtcaaaacagcatcaaatgtttcttctcttcctttccccaagacagagtcctgaacctgttaaattaagtcattggattttactctgttctgtttacagtttactatttaaggttttataaatgtaaatatattttgtatatttttctatgagaagcacttcatagggagaagcacttatgacaaggctattttttaaaccgcggtattatcctaatttaaaagaagatcggtttttaataattttttattttcataggatgaagttagagaaaatattcagctgtacacacaaagtctggtttttcctgcccaacttccccctggaaggtgtactttttgttgtttaatgtgtagcttgtttgtgccctgttgacataaatgtttcctgggtttgctctttgacaataaatggagaaggaaggtcacccaactccattgggccactcccctccttcccctattgaagctcc

SEQ ID NO: 150236 - DNA, 1098 bp, Homo sapiens
  Payload ID: 9663
  Gene Symbol: KMT2A
  Gene Name: lysine (K)-specific methyltransferase 2A
  ENST ID: ENST00000392873
  CDS Start-End: 1-1098
gatcctgccccaaagaaaagcagtagtgagcctcctccacgaaagcccgtcgaggaaaagagtgaagaagggaatgtctcggcccctgggcctgaatccaaacaggccaccactccagcttccaggaagtcaagcaagcaggtctcccagccagcactggtcatcccgcctcagccacctactacaggaccgccaagaaaagaagttcccaaaaccactcctagtgagcccaagaaaaagcagcctccaccaccagaatcaggtccagagcagagcaaacagaaaaaagtggctccccgcccaagtatccctgtaaaacaaaaaccaaaagaaaaggaaaaaccacctccggtcaataagcaggagaatgcaggcactttgaacatcctcagcactctctccaatggcaatagttctaagcaaaaaattccagcagatggagtccacaggatcagagtggactttaagtttgtgtattgccaagtctgttgtgagcccttccacaagttttgtttagaggagaacgagcgccctctggaggaccagctggaaaattggtgttgtcgtcgttgcaaattctgtcacgtttgtggaaggcaacatcaggctacaaagcagctgctggagtgtaataagtgccgaaacagctatcaccctgagtgcctgggaccaaactaccccaccaaacccacaaagaagaagaaagtctggatctgtaccaagtgtgttcgctgtaagagctgtggatccacaactccaggcaaagggtgggatgcacagtggtctcatgatttctcactgtgtcatgattgcgccaagctctttgctaaaggaaacttctgccctctctgtgacaaatgttatgatgatgatgactatgagagtaagatgatgcaatgtggaaagtgtgatcgctgggtccattccaaatgtgagaatctttcagatgagatgtatgagattctatctaatctgccagaaagtgtggcctacacttgtgtgaactgtactgagcggcaccctgcagagtggcgactggcccttgaaaaagagctgcagatttctctgaagcaagttctgacagctttgttgaattct

SEQ ID NO: 150237 - DNA, 4320 bp, Homo sapiens
  Payload ID: 9663
  Gene Symbol: KMT2A
  Gene Name: lysine (K)-specific methyltransferase 2A
  ENST ID: ENST00000531904
  CDS Start-End: 4-4320
aacatggcgcacagctgtcggtggcgcttccccgcccgacccgggaccaccgggggcggcggcggcggggggcgccggggcctagggggcgccccgcggcaacgcgtcccggccctgctgcttccccccgggcccccggtcggcggtggcggccccggggcgcccccctcccccccggctgtggcggccgcggcggcggcggcgggaagcagcggggctggggttccagggggagcggccgccgcctcagcagcctcctcgtcgtccgcctcgtcttcgtcttcgtcatcgtcctcagcctcttcagggccggccctgctccgggtgggcccgggcttcgacgcggcgctgcaggtctcggccgccatcggcaccaacctgcgccggttccgggccgtgtttggggagagcggcgggggaggcggcagcggagagctaacaacacagatcccatgtagttggagaaccaaaggccacatacatgacaaaaagactgaaccgttcaggttacttgcatggagttggtgcttaaatgatgagcaattcttaggttttggctcagatgaagaagtcagagtgcgaagtcccacaaggtctccttcagttaaaactagtcctcgaaaacctcgtgggagacctagaagtggctctgaccgaaattcagctatcctctcagatccatctgtgttttcccctctaaataaatcagagaccaaatctggagataagatcaagaagaaagattctaaaagtatagaaaagaagagaggaagacctcccaccttccctggagtaaaaatcaaaataacacatggaaaggacatttcagagttaccaaagggaaacaaagaagatagcctgaaaaaaattaaaaggacaccttctgctacgtttcagcaagccacaaagattaaaaaattaagagcaggtaaactctctcctctcaagtctaagtttaagacagggaagcttcaaataggaaggaagggggtacaaattgtacgacggagaggaaggcctccatcaacagaaaggataaagaccccttcgggtctcctcattaattctgaactggaaaagccccagaaagtccggaaagacaaggaaggaacacctccacttacaaaagaagataagacagttgtcagacaaagccctcgaaggattaagccagttaggattattccttcttcaaaaaggacagatgcaaccattgctaagcaactcttacagagggcaaaaaagggggctcaaaagaaaattgaaaaagaagcagctcagctgcagggaagaaaggtgaagacacaggtcaaaaatattcgacagttcatcatgcctgttgtcagtgctatctcctcgcggatcattaagacccctcggcggtttatagaggatgaggattatgaccctccaattaaaattgcccgattagagtctacaccgaatagtagattcagtgccccgtcctgtggatcttctgaaaaatcaagtgcagcttctcagcactcctctcaaatgtcttcagactcctctcgatctagtagccccagtgttgatacctccacagactctcaggcttctgaggagattcaggtacttcctgaggagcggagcgatacccctgaagttcatcctccactgcccatttcccagtccccagaaaatgagagtaatgataggagaagcagaaggtattcagtgtcggagagaagttttggatctagaacgacgaaaaaattatcaactctacaaagtgccccccagcagcagacctcctcgtctccacctccacctctgctgactccaccgccaccactgcagccagcctccagtatctctgaccacacaccttggcttatgcctccaacaatccccttagcatcaccatttttgcctgcttccactgctcctatgcaagggaagcgaaaatctattttgcgagaaccgacatttaggtggacttctttaaagcattctaggtcagagccacaatacttttcctcagcaaagtatgccaaagaaggtcttattcgcaaaccaatatttgataatttccgaccccctccactaactcccgaggacgttggctttgcatctggtttttctgcatctggtaccgctgcttcagcccgattgttttcgccactccattctggaacaaggtttgatatgcacaaaaggagccctcttctgagagctccaagatttactccaagtgaggctcactctagaatatttgagtctgtaaccttgcctagtaatcgaacttctgctggaacatcttcttcaggagtatccaatagaaaaaggaaaagaaaagtgtttagtcctattcgatctgaaccaagatctccttctcactccatgaggacaagaagtggaaggcttagtagttctgagctctcacctctcacccccccgtcttctgtctcttcctcgttaagcatttctgttagtcctcttgccactagtgccttaaacccaacttttacttttccttctcattccctgactcagtctggggaatctgcagagaaaaatcagagaccaaggaagcagactagtgctccggcagagccattttcatcaagtagtcctactcctctcttcccttggtttaccccaggctctcagactgaaagagggagaaataaagacaaggcccccgaggagctgtccaaagatcgagatgctgacaagagcgtggagaaggacaagagtagagagagagaccgggagagagaaaaggagaataagcgggagtcaaggaaagagaaaaggaaaaagggatcagaaattcagagtagttctgctttgtatcctgtgggtagggtttccaaagagaaggttgttggtgaagatgttgccacttcatcttctgccaaaaaagcaacagggcggaagaagtcttcatcacatgattctgggactgatattacttctgtgactcttggggatacaacagctgtcaaaaccaaaatacttataaagaaagggagaggaaatctggaaaaaaccaacttggacctcggcccaactgccccatccctggagaaggagaaaaccctctgcctttccactccttcatctagcactgttaaacattccacttcctccataggctccatgttggctcaggcagacaagcttccaatgactgacaagagggttgccagcctcctaaaaaaggccaaagctcagctctgcaagattgagaagagtaagagtcttaaacaaaccgaccagcccaaagcacagggtcaagaaagtgactcatcagagacctctgtgcgaggaccccggattaaacatgtctgcagaagagcagctgttgcccttggccgaaaacgagctgtgtttcctgatgacatgcccaccctgagtgccttaccatgggaagaacgagaaaagattttgtcttccatggggaatgatgacaagtcatcaattgctggctcagaagatgctgaacctcttgctccacccatcaaaccaattaaacctgtcactagaaacaaggcaccccaggaacctccagtaaagaaaggacgtcgatcgaggcggtgtgggcagtgtcccggctgccaggtgcctgaggactgtggtgtttgtactaattgcttagataagcccaagtttggtggtcgcaatataaagaagcagtgctgcaagatgagaaaatgtcagaatctacaatggatgccttccaaagcctacctgcagaagcaagctaaagctgtgaaaaagaaagagaaaaagtctaagaccagtgaaaagaaagacagcaaagagagcagtgttgtgaagaacgtggtggactctagtcagaaacctaccccatcagcaagagaggatcctgccccaaagaaaagcagtagtgagcctcctccacgaaagcccgtcgaggaaaagagtgaagaagggaatgtctcggcccctgggcctgaatccaaacaggccaccactccagcttccaggaagtcaagcaagcaggtctcccagccagcactggtcatcccgcctcagccacctactacaggaccgccaagaaaagaagttcccaaaaccactcctagtgagcccaagaaaaagcagcctccaccaccagaatcaggtccagagcagagcaaacagaaaaaagtggctccccgcccaagtatccctgtaaaacaaaaaccaaaagaaaaggaaaaaccacctccggtcaataagcaggagaatgcaggcactttgaacatcctcagcactctctccaatggcaatagttctaagcaaaaaattccagcagatggagtccacaggatcagagtggactttaag

SEQ ID NO: 150238 - DNA, 481 bp, Homo sapiens
  Payload ID: 9663
  Gene Symbol: KMT2A
  Gene Name: lysine (K)-specific methyltransferase 2A
  ENST ID: ENST00000527869
  CDS Start-End: 1-481
gcctcctcgtcgtccgcctcgtcttcgtcttcgtcatcgtcctcagcctcttcagggccggccctgctccgggtgggcccgggcttcgacgcggcgctgcaggtctcggccgccatcggcaccaacctgcgccggttccgggccgtgtttggggagagcggcgggggaggcggcagcggagagctaacaacacagatcccatgtagttggagaaccaaaggccacatacatgacaaaaagactgaaccgttcaggttacttgcatggagttggtgcttaaatgatgagcaattcttaggttttggctcagatgaagaagtcagagtgcgaagtcccacaaggtctccttcaggctccatgttggctcaggcagacaagcttccaatgactgacaagagggttgccagcctcctaaaaaaggccaaagctcagctctgcaagattgagaagagtaagagtcttaaacaaaccgaccagccca

SEQ ID NO: 150239 - DNA, 499 bp, Homo sapiens
  Payload ID: 9663
  Gene Symbol: KMT2A
  Gene Name: lysine (K)-specific methyltransferase 2A
  ENST ID: ENST00000532204
  CDS Start-End: 1-264
gcggccgccgcctcagcagcctcctcgtcgtccgcctcgtcttcgtcttcgtcatcgtcctcagcctcttcagggccggccctgctccgggtgggcccgggcttcgacgcggcgctgcaggtctcggccgccatcggcaccaacctgcgccggttccgggccgtgtttggggagagcggcgggggaggcggcagcggagaggttcctcaacttaaaagggatgaggagaccttggagacggttctgaggagactcaaaagatgattatatgattggaagtcagtcctatgaggaaaggttgagagaatgaaagcccatcttcccagaaggaaagatgtaacctgacttttgcgccagaataagaacaacaaacggaagaaaaaaactgagttttatagtagaagtttgtagttgaatgagcatgtagctcaaaatgaagttaaccacttaaacttgtcatatgggggaccaaaatttcttataataaaaagaactatat

SEQ ID NO: 150240 - DNA, 3323 bp, Homo sapiens
  Payload ID: 9663
  Gene Symbol: KMT2A
  Gene Name: lysine (K)-specific methyltransferase 2A
  ENST ID: ENST00000529852
  CDS Start-End: 1-264
gcggccgccgcctcagcagcctcctcgtcgtccgcctcgtcttcgtcttcgtcatcgtcctcagcctcttcagggccggccctgctccgggtgggcccgggcttcgacgcggcgctgcaggtctcggccgccatcggcaccaacctgcgccggttccgggccgtgtttggggagagcggcgggggaggcggcagcggagaggttcctcaacttaaaagggatgaggagaccttggagacggttctgaggagactcaaaagatgattatatgattggaagtcagtcctatgaggaaaggttgagagaatgaaaggttaagaggcaacttaataactcttcaaaaaacatgaatggatccattattaggaatggtaaccagcggtttcccagctccactgacagcagaataagagaaaataggtttaaaccgaaatcaggagtagttgtgtaaagaacttattggtaatgatggttgtcattacagtcatggtaaaaaggttaccaaaataattttattatcttctctggaagtatattttaaaagtacagtcctgcctacatatgtataaaatgacctcttaagctaccttttccttctgtgaatcagtaaataaattcttattcagctcctcgaagcaataattactttccagtaggaagcttccagagatatttctttaggaagtaatggtttttgtagtggctttataggagaatacaaatttttaagtggagctaagagagaaatcttaaacatcaagagaaaccaaggaaaacagtaggtgtggtatcaatataggaaacaaataagtatttgtagcttttatgtccattttcagttgtcatttaaagaggtatagttcagaatagctcttgttaaggctgtcactgcttgtggatacattgtaacaaatgcttataaatcatttccaaactaatagaagtttgcttcatgttagttagtattataaaagcctctgacccttggcttttgaggctgtgtagagggcttgcatcactcagaatgaaacctttttagatatgttgggttgcagaaagcatttcctgtacagtcagaatgaaaacttgaattgggattattcatatagattaccaaaagtctgggcagagctgatattaccaccagccagttttcctactaactcttaactccaaaaccttcattgggttattgaagctttaggacttttgaatttcctactggaattgtgtatgaattccttctttcaagtgaactgatactagatttatttaagattagttatacatcttaagtattttttaagtggcatataatgaatggtctctacttttaaccagtctcataaaatgcctggggttcataggtgaagctggattgttgcaggaattctgcaattgttggcaaagcgaagggcagtttgactccttaattataaagttggatgtcatttgagaaactctgggaattggaagtagaacaaattcatactttccctataacttttaatttcttgtcatacattcagaaaacaagagatgtaaaattcataaaactgcttgtataaattcagaaaacgggattataaaagcaaagacaaattgtcttacgattctttgttctacttgagagattcaagtgttggagtaataaaaaataccagggactttcttttttttaataggttaatgccacctaatgtgggcttctcagaatgtgatggcaaacttccaaatatgatgtgggagccaaaagagaccaactggttttacaaaatattaagaacacaaaatttcccaactcatatatttgaatattcctaaaaaataataagtcaaaattgtgttggtgggctgggcacagtggctcacaactgtaataccagcactgtgggaggctgaggtgggaggattgcttaaggccaggagttcaagactagcctgggcaacttggtaagacctgatctctacaaaataaaaattttaaatttaaaaaattaaaaaaaaaaaattagccaagcatggtggcctggcgccttgtagtcccagctactcaggaagctgtgatgggaggattgcttgagcccaatgggtcgaggctgcagtgagccatgatcatgacactgcactccagcctgggcaacagagtgagactccatctcaaaaaaaaaaaaaaaaaagagaaaaaaaattgcattggccaacttggaggcttcagtgttattttgccaagaagaatgttcacttttgtcatctaattttacactgctccttcagcaaactgactttatggagagataaccctgtttacctttagaaagaaggaagttgtggattcctcagtcttactcccattactattggtcattcaacagcccatcttcccagaaggaaagatgtaacctgacttttgcgccagaataagaacaacaaacggaagaaaaaaactgagttttatagtagaagtttgtagttgaatgagcatgtagctcaaaatgaagttaaccacttaaacttgtcatatgggggaccaaaatttcttataataaaaagaactatatctgaaaataaagttggtgtttgtttaatttttctagcctattcaaatcaatctggtcatttatggtactttcctattagagaaaaataaaccctgtgattgtgatgcttaacttaattttctacagtgaatcagttaagtgggcttattttttctgctttagcaagtagataaaccagttcagacttggaacctgaggattctggaaatacacctttcttgagtttttggtttttttttttaaagattctgcagaataatttgggacattgccaggaatcagaatagtttactatctgaagtagtgcattcattttgctgttttttgtttttttgtttttaagacagataagctactttatgactacctctttttctgaagcagggtgggtggaggtcacctgtctcatttgctttgctgttttcagcatctttgctgcttattcttgttgacatggagtggggatgaggggtactacctatttctctagttacaaagtgagtagcatttgtgtttcttaggtgacagttgctaggtagaattgaattaaatatttgaaaactggacttcattcttgtgtgggtgaaatttttaccttctgttgttattgaagaacagagaattattgtcttagcgctctttaatcccaagtgacctttttgtgttaacatttctcaatatcaggcagagatcatatttaaacagtttcaatctcttcctatctgttatgcattcaaataatcattgttctcttgatgcacc

SEQ ID NO: 150241 - DNA, 804 bp, Homo sapiens
  Payload ID: 9663
  Gene Symbol: KMT2A
  Gene Name: lysine (K)-specific methyltransferase 2A
  ENST ID: ENST00000533790
  CDS Start-End: 1-804
gcctcctcgtcgtccgcctcgtcttcgtcttcgtcatcgtcctcagcctcttcagggccggccctgctccgggtgggcccgggcttcgacgcggcgctgcaggtctcggccgccatcggcaccaacctgcgccggttccgggccgtgtttggggagagcggcgggggaggcggcagcggagaggatgagcaattcttaggttttggctcagatgaagaagtcagagtgcgaagtcccacaaggtctccttcaggctccatgttggctcaggcagacaagcttccaatgactgacaagagggttgccagcctcctaaaaaaggccaaagctcagctctgcaagattgagaagagtaagagtcttaaacaaaccgaccagcccaaagcacagggtcaagaaagtgactcatcagagacctctgtgcgaggaccccggattaaacatgtctgcagaagagcagctgttgcccttggccgaaaacgagctgtgtttcctgatgacatgcccaccctgagtgccttaccatgggaagaacgagaaaagattttgtcttccatggggaatgatgacaagtcatcaattgctggctcagaagatgctgaacctcttgctccacccatcaaaccaattaaacctgtcactagaaacaaggcaccccaggaacctccagtaaagaaaggacgtcgatcgaggcggtgtgggcagtgtcccggctgccaggtgcctgaggactgtggtgtttgtactaattgcttagataagcccaagtttggtggtcgcaatataaagaagcagtgctgcaag

SEQ ID NO: 150242 - DNA, 16602 bp, Homo sapiens
  Payload ID: 9663
  Gene Symbol: KMT2A
  Gene Name: lysine (K)-specific methyltransferase 2A
  Uniprot ID: Q03164
  ENST ID: ENST00000534358
  CDS Start-End: 24-11942
ctgcttcacttcacggggcgaacatggcgcacagctgtcggtggcgcttccccgcccgacccgggaccaccgggggcggcggcggcggggggcgccggggcctagggggcgccccgcggcaacgcgtcccggccctgctgcttccccccgggcccccggtcggcggtggcggccccggggcgcccccctcccccccggctgtggcggccgcggcggcggcggcgggaagcagcggggctggggttccagggggagcggccgccgcctcagcagcctcctcgtcgtccgcctcgtcttcgtcttcgtcatcgtcctcagcctcttcagggccggccctgctccgggtgggcccgggcttcgacgcggcgctgcaggtctcggccgccatcggcaccaacctgcgccggttccgggccgtgtttggggagagcggcgggggaggcggcagcggagaggatgagcaattcttaggttttggctcagatgaagaagtcagagtgcgaagtcccacaaggtctccttcagttaaaactagtcctcgaaaacctcgtgggagacctagaagtggctctgaccgaaattcagctatcctctcagatccatctgtgttttcccctctaaataaatcagagaccaaatctggagataagatcaagaagaaagattctaaaagtatagaaaagaagagaggaagacctcccaccttccctggagtaaaaatcaaaataacacatggaaaggacatttcagagttaccaaagggaaacaaagaagatagcctgaaaaaaattaaaaggacaccttctgctacgtttcagcaagccacaaagattaaaaaattaagagcaggtaaactctctcctctcaagtctaagtttaagacagggaagcttcaaataggaaggaagggggtacaaattgtacgacggagaggaaggcctccatcaacagaaaggataaagaccccttcgggtctcctcattaattctgaactggaaaagccccagaaagtccggaaagacaaggaaggaacacctccacttacaaaagaagataagacagttgtcagacaaagccctcgaaggattaagccagttaggattattccttcttcaaaaaggacagatgcaaccattgctaagcaactcttacagagggcaaaaaagggggctcaaaagaaaattgaaaaagaagcagctcagctgcagggaagaaaggtgaagacacaggtcaaaaatattcgacagttcatcatgcctgttgtcagtgctatctcctcgcggatcattaagacccctcggcggtttatagaggatgaggattatgaccctccaattaaaattgcccgattagagtctacaccgaatagtagattcagtgccccgtcctgtggatcttctgaaaaatcaagtgcagcttctcagcactcctctcaaatgtcttcagactcctctcgatctagtagccccagtgttgatacctccacagactctcaggcttctgaggagattcaggtacttcctgaggagcggagcgatacccctgaagttcatcctccactgcccatttcccagtccccagaaaatgagagtaatgataggagaagcagaaggtattcagtgtcggagagaagttttggatctagaacgacgaaaaaattatcaactctacaaagtgccccccagcagcagacctcctcgtctccacctccacctctgctgactccaccgccaccactgcagccagcctccagtatctctgaccacacaccttggcttatgcctccaacaatccccttagcatcaccatttttgcctgcttccactgctcctatgcaagggaagcgaaaatctattttgcgagaaccgacatttaggtggacttctttaaagcattctaggtcagagccacaatacttttcctcagcaaagtatgccaaagaaggtcttattcgcaaaccaatatttgataatttccgaccccctccactaactcccgaggacgttggctttgcatctggtttttctgcatctggtaccgctgcttcagcccgattgttttcgccactccattctggaacaaggtttgatatgcacaaaaggagccctcttctgagagctccaagatttactccaagtgaggctcactctagaatatttgagtctgtaaccttgcctagtaatcgaacttctgctggaacatcttcttcaggagtatccaatagaaaaaggaaaagaaaagtgtttagtcctattcgatctgaaccaagatctccttctcactccatgaggacaagaagtggaaggcttagtagttctgagctctcacctctcacccccccgtcttctgtctcttcctcgttaagcatttctgttagtcctcttgccactagtgccttaaacccaacttttacttttccttctcattccctgactcagtctggggaatctgcagagaaaaatcagagaccaaggaagcagactagtgctccggcagagccattttcatcaagtagtcctactcctctcttcccttggtttaccccaggctctcagactgaaagagggagaaataaagacaaggcccccgaggagctgtccaaagatcgagatgctgacaagagcgtggagaaggacaagagtagagagagagaccgggagagagaaaaggagaataagcgggagtcaaggaaagagaaaaggaaaaagggatcagaaattcagagtagttctgctttgtatcctgtgggtagggtttccaaagagaaggttgttggtgaagatgttgccacttcatcttctgccaaaaaagcaacagggcggaagaagtcttcatcacatgattctgggactgatattacttctgtgactcttggggatacaacagctgtcaaaaccaaaatacttataaagaaagggagaggaaatctggaaaaaaccaacttggacctcggcccaactgccccatccctggagaaggagaaaaccctctgcctttccactccttcatctagcactgttaaacattccacttcctccataggctccatgttggctcaggcagacaagcttccaatgactgacaagagggttgccagcctcctaaaaaaggccaaagctcagctctgcaagattgagaagagtaagagtcttaaacaaaccgaccagcccaaagcacagggtcaagaaagtgactcatcagagacctctgtgcgaggaccccggattaaacatgtctgcagaagagcagctgttgcccttggccgaaaacgagctgtgtttcctgatgacatgcccaccctgagtgccttaccatgggaagaacgagaaaagattttgtcttccatggggaatgatgacaagtcatcaattgctggctcagaagatgctgaacctcttgctccacccatcaaaccaattaaacctgtcactagaaacaaggcaccccaggaacctccagtaaagaaaggacgtcgatcgaggcggtgtgggcagtgtcccggctgccaggtgcctgaggactgtggtgtttgtactaattgcttagataagcccaagtttggtggtcgcaatataaagaagcagtgctgcaagatgagaaaatgtcagaatctacaatggatgccttccaaagcctacctgcagaagcaagctaaagctgtgaaaaagaaagagaaaaagtctaagaccagtgaaaagaaagacagcaaagagagcagtgttgtgaagaacgtggtggactctagtcagaaacctaccccatcagcaagagaggatcctgccccaaagaaaagcagtagtgagcctcctccacgaaagcccgtcgaggaaaagagtgaagaagggaatgtctcggcccctgggcctgaatccaaacaggccaccactccagcttccaggaagtcaagcaagcaggtctcccagccagcactggtcatcccgcctcagccacctactacaggaccgccaagaaaagaagttcccaaaaccactcctagtgagcccaagaaaaagcagcctccaccaccagaatcaggtccagagcagagcaaacagaaaaaagtggctccccgcccaagtatccctgtaaaacaaaaaccaaaagaaaaggaaaaaccacctccggtcaataagcaggagaatgcaggcactttgaacatcctcagcactctctccaatggcaatagttctaagcaaaaaattccagcagatggagtccacaggatcagagtggactttaaggaggattgtgaagcagaaaatgtgtgggagatgggaggcttaggaatcttgacttctgttcctataacacccagggtggtttgctttctctgtgccagtagtgggcatgtagagtttgtgtattgccaagtctgttgtgagcccttccacaagttttgtttagaggagaacgagcgccctctggaggaccagctggaaaattggtgttgtcgtcgttgcaaattctgtcacgtttgtggaaggcaacatcaggctacaaagcagctgctggagtgtaataagtgccgaaacagctatcaccctgagtgcctgggaccaaactaccccaccaaacccacaaagaagaagaaagtctggatctgtaccaagtgtgttcgctgtaagagctgtggatccacaactccaggcaaagggtgggatgcacagtggtctcatgatttctcactgtgtcatgattgcgccaagctctttgctaaaggaaacttctgccctctctgtgacaaatgttatgatgatgatgactatgagagtaagatgatgcaatgtggaaagtgtgatcgctgggtccattccaaatgtgagaatctttcaggtacagaagatgagatgtatgagattctatctaatctgccagaaagtgtggcctacacttgtgtgaactgtactgagcggcaccctgcagagtggcgactggcccttgaaaaagagctgcagatttctctgaagcaagttctgacagctttgttgaattctcggactaccagccatttgctacgctaccggcaggctgccaagcctccagacttaaatcccgagacagaggagagtataccttcccgcagctcccccgaaggacctgatccaccagttcttactgaggtcagcaaacaggatgatcagcagcctttagatctagaaggagtcaagaggaagatggaccaagggaattacacatctgtgttggagttcagtgatgatattgtgaagatcattcaagcagccattaattcagatggaggacagccagaaattaaaaaagccaacagcatggtcaagtccttcttcattcggcaaatggaacgtgtttttccatggttcagtgtcaaaaagtccaggttttgggagccaaataaagtatcaagcaacagtgggatgttaccaaacgcagtgcttccaccttcacttgaccataattatgctcagtggcaggagcgagaggaaaacagccacactgagcagcctcctttaatgaagaaaatcattccagctcccaaacccaaaggtcctggagaaccagactcaccaactcctctgcatcctcctacaccaccaattttgagtactgataggagtcgagaagacagtccagagctgaacccacccccaggcatagaagacaatagacagtgtgcgttatgtttgacttatggtgatgacagtgctaatgatgctggtcgtttactatatattggccaaaatgagtggacacatgtaaattgtgctttgtggtcagcggaagtgtttgaagatgatgacggatcactaaagaatgtgcatatggctgtgatcaggggcaagcagctgagatgtgaattctgccaaaagccaggagccaccgtgggttgctgtctcacatcctgcaccagcaactatcacttcatgtgttcccgagccaagaactgtgtctttctggatgataaaaaagtatattgccaacgacatcgggatttgatcaaaggcgaagtggttcctgagaatggatttgaagttttcagaagagtgtttgtggactttgaaggaatcagcttgagaaggaagtttctcaatggcttggaaccagaaaatatccacatgatgattgggtctatgacaatcgactgcttaggaattctaaatgatctctccgactgtgaagataagctctttcctattggatatcagtgttccagggtatactggagcaccacagatgctcgcaagcgctgtgtatatacatgcaagatagtggagtgccgtcctccagtcgtagagccggatatcaacagcactgttgaacatgatgaaaacaggaccattgcccatagtccaacatcttttacagaaagttcatcaaaagagagtcaaaacacagctgaaattataagtcctccatcaccagaccgacctcctcattcacaaacctctggctcctgttattatcatgtcatctcaaaggtccccaggattcgaacacccagttattctccaacacagagatcccctggctgtcgaccgttgccttctgcaggaagtcctaccccaaccactcatgaaatagtcacagtaggtgatcctttactctcctctggacttcgaagcattggctccaggcgtcacagtacctcttccttatcaccccagcggtccaaactccggataatgtctccaatgagaactgggaatacttactctaggaataatgtttcctcagtctccaccaccgggaccgctactgatcttgaatcaagtgccaaagtagttgatcatgtcttagggccactgaattcaagtactagtttagggcaaaacacttccacctcttcaaatttgcaaaggacagtggttactgtaggcaataaaaacagtcacttggatggatcttcatcttcagaaatgaagcagtccagtgcttcagacttggtgtccaagagctcctctttaaagggagagaagaccaaagtgctgagttccaagagctcagagggatctgcacataatgtggcttaccctggaattcctaaactggccccacaggttcataacacaacatctagagaactgaatgttagtaaaatcggctcctttgctgaaccctcttcagtgtcgttttcttctaaagaggccctctccttcccacacctccatttgagagggcaaaggaatgatcgagaccaacacacagattctacccaatcagcaaactcctctccagatgaagatactgaagtcaaaaccttgaagctatctggaatgagcaacagatcatccattatcaacgaacatatgggatctagttccagagataggagacagaaagggaaaaaatcctgtaaagaaactttcaaagaaaagcattccagtaaatcttttttggaacctggtcaggtgacaactggtgaggaaggaaacttgaagccagagtttatggatgaggttttgactcctgagtatatgggccaacgaccatgtaacaatgtttcttctgataagattggtgataaaggcctttctatgccaggagtccccaaagctccacccatgcaagtagaaggatctgccaaggaattacaggcaccacggaaacgcacagtcaaagtgacactgacacctctaaaaatggaaaatgagagtcaatccaaaaatgccctgaaagaaagtagtcctgcttcccctttgcaaatagagtcaacatctcccacagaaccaatttcagcctctgaaaatccaggagatggtccagtggcccaaccaagccccaataatacctcatgccaggattctcaaagtaacaactatcagaatcttccagtacaggacagaaacctaatgcttccagatggccccaaacctcaggaggatggctcttttaaaaggaggtatccccgtcgcagtgcccgtgcacgttctaacatgttttttgggcttaccccactctatggagtaagatcctatggtgaagaagacattccattctacagcagctcaactgggaagaagcgaggcaagagatcagctgaaggacaggtggatggggccgatgacttaagcacttcagatgaagacgacttatactattacaacttcactagaacagtgatttcttcaggtggagaggaacgactggcatcccataatttatttcgggaggaggaacagtgtgatcttccaaaaatctcacagttggatggtgttgatgatgggacagagagtgatactagtgtcacagccacaacaaggaaaagcagccagattccaaaaagaaatggtaaagaaaatggaacagagaacttaaagattgatagacctgaagatgctggggagaaagaacatgtcactaagagttctgttggccacaaaaatgagccaaagatggataactgccattctgtaagcagagttaaaacacagggacaagattccttggaagctcagctcagctcattggagtcaagccgcagagtccacacaagtaccccctccgacaaaaatttactggacacctataatactgagctcctgaaatcagattcagacaataacaacagtgatgactgtgggaatatcctgccttcagacattatggactttgtactaaagaatactccatccatgcaggctttgggtgagagcccagagtcatcttcatcagaactcctgaatcttggtgaaggattgggtcttgacagtaatcgtgaaaaagacatgggtctttttgaagtattttctcagcagctgcctacaacagaacctgtggatagtagtgtctcttcctctatctcagcagaggaacagtttgagttgcctctagagctaccatctgatctgtctgtcttgaccacccggagtcccactgtccccagccagaatcccagtagactagctgttatctcagactcaggggagaagagagtaaccatcacagaaaaatctgtagcctcctctgaaagtgacccagcactgctgagcccaggagtagatccaactcctgaaggccacatgactcctgatcattttatccaaggacacatggatgcagaccacatctctagccctccttgtggttcagtagagcaaggtcatggcaacaatcaggatttaactaggaacagtagcacccctggccttcaggtacctgtttccccaactgttcccatccagaaccagaagtatgtgcccaattctactgatagtcctggcccgtctcagatttccaatgcagctgtccagaccactccaccccacctgaagccagccactgagaaactcatagttgttaaccagaacatgcagccactttatgttctccaaactcttccaaatggagtgacccaaaaaatccaattgacctcttctgttagttctacacccagtgtgatggagacaaatacttcagtattgggacccatgggaggtggtctcacccttaccacaggactaaatccaagcttgccaacttctcaatctttgttcccttctgctagcaaaggattgctacccatgtctcatcaccagcacttacattccttccctgcagctactcaaagtagtttcccaccaaacatcagcaatcctccttcaggcctgcttattggggttcagcctcctccggatccccaacttttggtttcagaatccagccagaggacagacctcagtaccacagtagccactccatcctctggactcaagaaaagacccatatctcgtctacagacccgaaagaataaaaaacttgctccctctagtaccccttcaaacattgccccttctgatgtggtttctaatatgacattgattaacttcacaccctcccagcttcctaatcatccaagtctgttagatttggggtcacttaatacttcatctcaccgaactgtccccaacatcataaaaagatctaaatctagcatcatgtattttgaaccggcacccctgttaccacagagtgtgggaggaactgctgccacagcggcaggcacatcaacaataagccaggatactagccacctcacatcagggtctgtgtctggcttggcatccagttcctctgtcttgaatgttgtatccatgcaaactaccacaacccctacaagtagtgcgtcagttccaggacacgtcaccttaaccaacccaaggttgcttggtaccccagatattggctcaataagcaatcttttaatcaaagctagccagcagagcctggggattcaggaccagcctgtggctttaccgccaagttcaggaatgtttccacaactggggacatcacagaccccctctactgctgcaataacagcggcatctagcatctgtgtgctcccctccactcagactacgggcataacagccgcttcaccttctggggaagcagacgaacactatcagcttcagcatgtgaaccagctccttgccagcaaaactgggattcattcttcccagcgtgatcttgattctgcttcagggccccaggtatccaactttacccagacggtagacgctcctaatagcatgggactggagcagaacaaggctttatcctcagctgtgcaagccagccccacctctcctgggggttctccatcctctccatcttctggacagcggtcagcaagcccttcagtgccgggtcccactaaacccaaaccaaaaaccaaacggtttcagctgcctctagacaaagggaatggcaagaagcacaaagtttcccatttgcggaccagttcttctgaagcacacattccagaccaagaaacgacatccctgacctcaggcacagggactccaggagcagaggctgagcagcaggatacagctagcgtggagcagtcctcccagaaggagtgtgggcaacctgcagggcaagtcgctgttcttccggaagttcaggtgacccaaaatccagcaaatgaacaagaaagtgcagaacctaaaacagtggaagaagaggaaagtaatttcagctccccactgatgctttggcttcagcaagaacaaaagcggaaggaaagcattactgagaaaaaacccaagaaaggacttgtttttgaaatttccagtgatgatggctttcagatctgtgcagaaagtattgaagatgcctggaagtcattgacagataaagtccaggaagctcgatcaaatgcccgcctaaagcagctctcatttgcaggtgttaacggtttgaggatgctggggattctccatgatgcagttgtgttcctcattgagcagctgtctggtgccaagcactgtcgaaattacaaattccgtttccacaagccagaggaggccaatgaaccccccttgaaccctcacggctcagccagggctgaagtccacctcaggaagtcagcatttgacatgtttaacttcctggcttctaaacatcgtcagcctcctgaatacaaccccaatgatgaagaagaggaggaggtacagctgaagtcagctcggagggcaactagcatggatctgccaatgcccatgcgcttccggcacttaaaaaagacttctaaggaggcagttggtgtctacaggtctcccatccatggccggggtcttttctgtaagagaaacattgatgcaggtgagatggtgattgagtatgccggcaacgtcatccgctccatccagactgacaagcgggaaaagtattacgacagcaagggcattggttgctatatgttccgaattgatgactcagaggtagtggatgccaccatgcatggaaatgctgcacgcttcatcaatcactcgtgtgagcctaactgctattctcgggtcatcaatattgatgggcagaagcacattgtcatctttgccatgcgtaagatctaccgaggagaggaactcacttacgactataagttccccattgaggatgccagcaacaagctgccctgcaactgtggcgccaagaaatgccggaagttcctaaactaaagctgctcttctcccccagtgttggagtgcaaggaggcggggccatccaaagcaacgctgaaggccttttccagcagctgggagctcccggattgcgtggcacagctgaggggcctctgtgatggctgagctctcttatgtcctatactcacatcagacatgtgatcatagtcccagagacagagttgaggtctcgaagaaaagatccatgatcggctttctcctggggcccctccaattgtttactgttagaaagtgggaatggggtccctagcagacttgcctggaaggagcctattatagagggttggttatgttgggagattgggcctgaatttctccacagaaataagttgccatcctcaggttggccctttcccaagcactgtaagtgagtgggtcaggcaaagccccaaatggagggttggttagattcctgacagtttgccagccaggccccacctacagcgtctgtcgaacaaacagaggtctggtggttttccctactatcctcccactcgagagttcacttctggttgggagacaggattcctagcacctccggtgtcaaaaggctgtcatggggttgtgccaattaattaccaaacattgagcctgcaggctttgagtgggagtgttgcccccaggagccttatctcagccaattacctttcttgacagtaggagcggcttccctctcccattccctcttcactcccttttcttcctttcccctgtcttcatgccactgctttcccatgcttctttcgggttgtaggggagactgactgcctgctcaaggacactccctgctgggcataggatgtgcctgcaaaaagttccctgagcctgtaagcactccaggtggggaagtggacaggagccattggtcataaccagacagaatttggaaacattttcataaagctccatggagagttttaaagaaacatatgtagcatgattttgtaggagaggaaaaagattatttaaataggatttaaatcatgcaacaacgagagtatcacagccaggatgacccttgggtcccattcctaagacatggttactttattttccccttgttaagacataggaagacttaatttttaaacggtcagtgtccagttgaaggcagaacactaatcagatttcaaggcccacaacttggggactagaccaccttatgttgagggaactctgccacctgcgtgcaacccacagctaaagtaaattcaatgacactactgccctgattactccttaggatgtggtcaaaacagcatcaaatgtttcttctcttcctttccccaagacagagtcctgaacctgttaaattaagtcattggattttactctgttctgtttacagtttactatttaaggttttataaatgtaaatatattttgtatatttttctatgagaagcacttcatagggagaagcacttatgacaaggctattttttaaaccgcggtattatcctaatttaaaagaagatcggtttttaataattttttattttcataggatgaagttagagaaaatattcagctgtacacacaaagtctggtttttcctgcccaacttccccctggaaggtgtactttttgttgtttaatgtgtagcttgtttgtgccctgttgacataaatgtttcctgggtttgctctttgacaataaatggagaaggaaggtcacccaactccattgggccactcccctccttcccctattgaagctcctcaaaaggctacagtaatatcttgatacaacagattctcttctttcccgcctctctcctttccggcgcaacttccagagtggtgggagacggcaatctttacatttccctcatctttcttacttcagagttagcaaacaacaagttgaatggcaacttgacatttttgcatcaccatctgcctcataggccactctttcctttccctctgcccaccaagtcctcatatctgcagagaacccattgatcaccttgtgccctcttttggggcagcctgttgaaactgaagcacagtctgaccactcacgataaagcagatttttctctgcctctgccacaaggtttcagagtagtgtagtccaagtagagggtggggcacccttttctcgccgcaagaagcccattcctatggaagtctagcaaagcaatacgactcagcccagcactctctgccccaggactcatggctctgctgtgccttccatcctgggctcccttctctcctgtgaccttaagaactttgtctggtggctttgctggaacattgtcactgttttcactgtcatgcagggagcccagcactgtggccaggatggcagagacttccttgtcatcatggagaagtgccagcaggggactgggaaaagcactctacccagacctcacctcccttcctccttttgcccatgaacaagatgcagtggccctaggggttccactagtgtctgctttcctttattattgcactgtgtgaggtttttttgtaaatccttgtattcctattttttttaaagaaaaaaaaaaaaccttaagctgcatttgttactgaaatgattaatgcactgatgggtcctgaattcaccttgagaaagacccaaaggccagtcagggggtggggggaactcagctaaatagacctagttactgccctgctaggccatgctgtactgtgagcccctcctcactctctaccaaccctaaaccctgaggacaggggaggaacccacagcttccttctcctgccagctgcagatggtttgccttgcctttccaccccctaattgtcaaccacaaaaatgagaaattcctcttctagctcagccttgagtccattgccaaattttcagcacacctgccagcaacttgggggaataagcgaaggtttccctacaagagggaaagaaggcaaaaacggcacagctatctccaaacacatctgagttcatttcaaaagtgaccaagggaatctccgcacaaaagtgcagattgaggaattgtgatgggtcattcccaagaatcccccaaggggcatcccaaatccctgaggagtaacagctgcaaacctggtcagttctcagtgagagccagctcacttatagctttgctgctagaacctgttgtggctgcatttcctggtggccagtgacaactgtgtaaccagaatagctgcatggcgctgaccctttggccggaacttggtctcttggctccctccttggccacccaccacctctcgcacagcccctctgtttttacaccaataacaagaattaagggggaagccctggcagctatacgttttcaaccagactcctttgccgggacccagcccgccaccctgctcgcctccgtcaaacccccggccaatgcagtgagcaccatgtagctcccttgatttaaaaaaaataaaaaataaaaaaaaaaggaaaaaaaaatacaacacacacacaaaaataaaaaaaatattctaatgaatgtatctttctaaaggactgacgttcaatcaaatatctgaaaatactaaaggtcaaaaccttgtcagatgttaacttctaagttcggtttgggattttttttttttaatagaaatcaagttgtttttgtttttaaggaaaagcgggtcattgcaaagggctgggtgtaattttatgtttcatttccttcattttaaagcaatacaaggttatggagcagatggttttgtgccgaatcatgaatactagtcaagtcacacactctggaaacttgcaactttttgtttgttttggttttcaaataaatataaatatgatatatataggaactaatatagtaatgcaccatgtaacaaagcctagttcagtccatggcttttaattctcttaacactatagataaggattgtgttacagttgctagtagcggcaggaagatgtcaggctcactttcctctgattcccgaaatggggggaacctctaaccataaaggaatggtagaacagtccattcctcggatcagagaaaaatgcagacatggtgtcacctggatttttttctgcccatgaatgttgccagtcagtacctgtcctccttgtttctctatttttggttatgaatgttggggttaccacctgcatttaggggaaaattgtgttctgtgctttcctggtatcttgttccgaggtactctagttctgtctttcaaccaagaaaatagaattgtggtgtttcttttattgaacttttaacagtctctttagtaaatacaggtagttgaataattgtttcaagagctcaacagatgacaagcttcttttctagaaataagacattttttgacaactttatcatgtataacagatctgttttttttccttgtgttcttccaagcttctggttagagaaaaagagaaaaaaaaaaaaggaaaatgtgtctaaagtccatcagtgttaactccctgtgacagggatgaaggaaaatactttaatagttcaaaaaataataatgctgaaagctctctacgaaagactgaatgtaaaagtaaaaagtgtacatagttgtaaaaaaaaggagtttttaaacatgtttattttctatgcacttttttttatttaagtgatagtttaattaataaacatgtcaagtttattgctgca

SEQ ID NO: 150243 - DNA, 8469 bp, Homo sapiens
  Payload ID: 9664
  Gene Symbol: KMT2B
  Gene Name: lysine (K)-specific methyltransferase 2B
  Uniprot ID: Q9UMN6
  ENST ID: ENST00000420124
  CDS Start-End: 1-8148
atggcggcggcggcgggcggcggcagttgccccgggcctggctccgcgcggggccgcttcccgggccggccgcggggcgccggcgggggcgggggccgcggcggacggggcaacggggccgaaagagtgcgggtagctctgcggcgcggcggtggcgcgacggggccgggcggagccgagcccggggaggacacggccctgctccgtttgctggggctccgccggggcctgcgccggctccgccgcctgtgggccggcccgcgggtccagcggggccggggacggggtcggggccggggctggggcccgagtcgaggctgcgtgccggaggaggagagcagtgacggggaatccgacgaggaggagtttcagggttttcattcagatgaagatgtggcccccagttccctgcgctctgcgctccgatcccagcgaggtcgagcgccccgaggtcggggtcgcaagcataagacgaccccccttcctcctcctcgcctagcagatgtggctcctacccccccaaagacccctgcccggaaacggggtgaggaaggcacagaacggatggtgcaggcactgactgaacttctccggcgggcccaggcaccccaagcaccccggagccgggcatgtgagccctccaccccccggcggtctcggggacggcccccaggacggccagcaggcccctgcaggaggaagcagcaagcagtagtggtggcagaagcagctgtgacaatccccaaacctgagcccccacctcctgtggttccagtgaaacatcagactggcagctggaaatgcaaggaggggcccggtccaggacctgggacccccaggcgtggaggacagtcaagccgtggaggccgtggaggcaggggccgcggccgaggtggtgggctcccctttgtgatcaagtttgtttcaagggccaaaaaagtaaagatgggacaattgtccttgggactcgaatcaggtcaaggtcaaggtcaacatgaggaaagttggcaggatgtcccccaaagaagagttggatctggacagggagggagcccttgctggaaaaagcaggaacagaagctggatgacgaggaagaagagaagaaagaagaagaagaaaaagacaaggagggagaagagaaggaagaaagagctgtagctgaggagatgatgccagctgcggaaaaggaagaggcaaagctgccaccaccgcctctgactcctccagccccttcacctcctccacccctcccacccccttcgacatctcctccacccccactctgccctccaccaccacccccagtgtccccaccacctctaccatcccctccaccgcctcctgcccaagaggagcaggaggaatcccctcctcctgtggtcccagctacgtgctccaggaagaggggccggcctcccctgactcccagccagcgggcggagcgggaagctgctcgggcagggccagagggcacctctcctcccactccaacccccagcaccgccacgggaggccctccggaagacagtcccaccgtggcccccaaaagcaccaccttcctgaagaatatccggcagtttattatgcctgtggtgagtgcccgctcctcccgtgtcatcaagacaccccggcgatttatggatgaagacccccccaaacccccaaaggtggaggtctcacctgtcctgcgacctcccattaccacctccccacctgttccccaggagccagcaccagtcccctctccaccacgtgccccaactcctccatctaccccagttccactccctgagaagagacggtccatcctaagggaacccacatttcgctggacctcactgacccgggagctgccccctcctcccccagcccctccacctcccccggccccctccccaccccctgctcctgccacctcctcccggaggcccctactccttcgggcccctcagtttaccccaagcgaagcccacctgaagatctacgaatcggtgcttactcctcctcctcttggggctcctgaagcccctgagccagagcctcctcctgccgatgactctccagctgagcctgagcctcgggcagtgggccgcaccaaccacctcagcctgcctcgattcgcccctgtggtcaccactcctgttaaggccgaggtgtcccctcacggggctccagctctgagcaacgggccacagacacaggctcagctactgcagcccctgcaggccttgcaaacccagctcctgccccaggcactaccgccaccacagccacagctgcagccaccgccgtcaccacagcagatgcctcccctggaaaaagcccggattgcgggcgtgggttccttgccgctgtctggggtagaggagaagatgttcagcctcctcaagagagccaaagtgcagctattcaagatcgatcagcagcagcagcagaaggtggcagcttccatgccgctgagccctggagggcagatggaggaggtggccggggctgtcaagcagatctccgacagaggccctgtccggtctgaagatgagtcggtggaagctaagagagagcggccctcaggtcccgagtcccctgtgcaaggtccccgcatcaaacatgtctgccgtcatgctgctgtggccctgggtcaggcccgggccatggtgcctgaagatgtccctcgcctcagtgccctccctctccgggatcggcaggacctcgccacagaggatacatcatcggcgtccgagactgagagtgtcccgtcacggtcccggcggggaaaggtggaggcagcaggccctgggggagaatcagagcccacaggttctggagggaccctggcccacacaccccggcgctcactgccctcccatcacggcaagaagatgcgcatggctcgatgtggacactgtcggggctgcctacgtgtgcaggactgtgggtcctgtgtcaactgcctagacaagcccaagtttgggggccctaacaccaagaagcagtgctgtgtataccggaagtgtgacaaaatagaggctcggaagatggaacgactggctaaaaaaggccggacgatagtgaagacgctgttgccctgggattccgatgaatctcctgaggcctcccctggtcctccaggcccacgccggggggcgggagctggggggccccgggaggaggtggtggcccacccagggcccgaggagcaggactccctcctgcagcgcaagtcagctcggcgctgcgtcaaacagcgaccctcctatgatatcttcgaggattcggatgactcggagcccgggggcccccctgctcctcggcgtcggaccccccgagaaaatgagctgccactgccagaacctgaggagcagagccggccccgcaaacctaccctgcagcctgtgttgcagctcaaggcccgaaggcgcctggacaaggatgctttggcccctggcccctttgcttcttttcccaatggctggactggaaagcagaagtctcccgatggtgtgcaccgcgtccgtgtggattttaaggaggattgtgatttagagaacgtgtggctgatggggggcctgagtgtgctcacctctgtgccagggggccccccgatggtgtgcttgctgtgtgccagcaaaggactccacgagctggtgttctgtcaagtctgctgtgacccattccacccattctgcctggaggaggccgagcggcccctgccccagcatcacgacacctggtgctgccgtcgctgcaaattctgccacgtctgtggacgcaaaggtcgtggatccaagcacctcctggagtgcgagcgctgccgccatgcataccacccggcctgtctggggcccagctatccaacccgggccacgcgcaaacggcgccactggatctgttcagcctgtgtgcgctgtaagagctgtggggcaactccaggcaagaactgggacgtcgagtggtctggagattacagcctctgccccaggtgcacccagctatatgagaaaggaaactactgcccgatctgtacacgctgctatgaagacaacgactatgagagcaagatgatgcagtgcgcacagtgcgatcactgggtgcatgccaagtgcgaggggctctcagatgaagactacgagatcctttcaggactgccagactcggtgctgtacacctgcggaccgtgtgctggggcagcgcagccccgctggcgagaggccctgagcggggccctccaggggggcctgcgccaggtgctccagggcctgctgagctccaaggtggtgggcccactgctgctctgcacccagtgtgggccagatgggaagcaactgcacccaggaccctgcggcctgcaagctgtgagtcagcgcttcgaggatggccactacaagtctgtgcacagcttcatggaggacatggtgggcatcctcatgcggcactcggaggagggagagaccccggaccgccgggctggaggccagatgaaggggctcctgctgaagctgctagaatctgcgttcggctggttcgacgcccacgaccccaagtactggcgacggagtacccggctgccaaacggagtccttcccaatgcggtgttgcccccatccctggatcatgtctatgcgcagtggagacagcaggaaccagagaccccagaatcagggcagcctccaggggatccctcagcagcattccagggcaaggatccggctgccttctcacacctggaggacccccgtcagtgtgcactctgcctcaaatacggggatgcagactccaaggaggcggggcggctcttgtacatcgggcagaacgagtggacacacgtcaactgtgccatctggtcggcggaagtcttcgaggagaacgacggctccctcaagaatgtgcatgctgctgtggcccgagggaggcagatgcgctgcgagctctgcctgaagcctggcgccacggtgggctgctgcctgtcctcctgcctcagcaacttccacttcatgtgtgcccgggccagctactgcatcttccaggatgacaagaaagtcttctgccagaaacacactgatctcctggatggcaaggaaattgtgaaccccgatggttttgatgttctccgccgagtctatgtggacttcgagggcatcaacttcaagcggaagttcttgacggggcttgaacccgatgccatcaacgtgctcattggttccatccgcattgactccctgggtactctgtctgatctctcggactgcgagggacggctcttccccattggctaccagtgctcccgtctgtactggagcacagtggatgctcggaggcgctgctggtatcggtgccgaattctggagtatcggccatgggggccgagggaagagccagctcacctggaggctgcagaggagaaccagaccattgtgcacagccccgccccttcctcagagcccccaggtggtgaggaccccccactggacacagatgttcttgtccctggagctcctgagcgccactcgcccattcagaacctggaccctccactgcggccagattcaggcagcgcccctcctccagccccccgttctttttcgggggctcgaatcaaagtgcccaactactcgccatcccggaggcccttggggggtgtctcctttggccccctgccctcccctggaagtccatcttcactgacccaccacatccccacagtgggagacccggacttcccagctccccccagacgttcccgtcgtcccagccctttggctcccaggccgcctccatcacggtgggcctcccctcctctaaaaacctcccctcagctcagggtgccccctcctacctcagtcgtcacagccctcacacctacctcaggggagctggctccccctggcccggccccatctccaccaccccctgaagacctgggcccagacttcgaggacatggaggtggtgtcaggactgagtgctgctgacctggacttcgcggccagcctgctggggactgagcccttccaggaagagattgtagccgctggggccatggggagcagccacgggggcccgggggacagctccgaggaggagtccagccccacctcccgctacatccacttccctgtgactgtggtgtccgcccctggtctggcccccagcgctacccctggagccccccgcattgaacagctggacggcgtggacgacggcactgacagtgaggctgaggcggtgcagcagcctcggggccagggcacgcctccttcggggccaggagtagtccgggcaggggtccttggggctgcaggggacagggcccggcctcctgaggacctgccatcggaaattgtggattttgtgttgaagaacctagggggtcctggggatggaggtgctggccctagagaggagtcactccccccggcgcctcccctggctaatggcagccagccctcccaaggcctgaccgccagcccagctgaccccacccgcacatttgcctggctcccaggggccccaggggtccgggtgttaagccttggccctgcccctgagccccccaaacccgccacatccaaaatcatacttgtcaacaagctggggcaagtatttgtgaagatggctggggagggtgaacctgtcccacccccagtgaagcagccacctttgccccccaccatttcccccacggctcccacctcctggactctgcccccaggccccctcctcggcgtgctgcccgtggtcggagtggtccgccctgccccgcccccgccaccccctcccctgacgctggtgctgagcagtgggccagccagcccgccccgccaggccatccgcgtcaagagggtgtccactttctccggccggtccccgccagcacctcccccatacaaagccccccggctggatgaagatggagaggcctcagaggatacccctcaggttccagggcttggcagtggcgggtttagccgtgtgaggatgaaaacccccacagtgcgtggggtccttgacctggatcggcctggggagcccgctggggaagaaagtcctgggcccctccaggaacggtcccctttgctgccacttccggaagatggtcctccccaggtccccgatggtcccccagacctgctgcttgagtcccagtggcaccactattcaggtgaggcttcgagctctgaggaagagcctccatccccagatgataaagagaaccaggccccaaaacggactggcccacatctgcgcttcgagatcagcagtgaggatgggttcagcgttgaggcagagagcttggagggggcgtggagaactctgatcgagaaagtgcaagaggcccgagggcatgcccgactcagacatctctcctttagtggaatgagtggggcgagactcctgggcatccaccatgatgctgtcatcttcctggccgagcagctccccggagcccagcgttgccagcactataagttccgttaccaccagcagggagagggccaggaggagccgcccctgaatccccatggggctgctcgggcagaggtctatctccggaagtgcacctttgacatgttcaacttcctggcctcccagcaccgggtgctccctgagggggccacctgtgatgaggaagaggatgaggtgcagctcaggtcaaccagacgtgccaccagcctggagctgcccatggccatgcgttttcgtcaccttaagaagacgtccaaagaagctgtgggtgtctacagatcagccatccacgggcgaggcctgttctgtaagcgcaacatcgacgcgggggagatggtcatcgagtactctggcattgtcatccgctcggtgttgactgacaagcgggagaagttctacgatgggaagggcatcgggtgctatatgttccgcatggatgactttgatgtagtggacgccacgatgcatggcaatgccgcccgcttcatcaaccactcctgtgagcccaactgcttctctcgggtcatccacgtggagggccagaaacacattgttatcttcgccctgcgccgcatcctgcgtggtgaggagctcacctacgactacaagttccccatcgaggatgccagcaacaagctgccctgcaactgtggcgccaagcgctgccgtcggttccttaactgaggccgtggctgcccaccacgacccctcacacctcctgctgccgtcgctgccatcttgcccctagcctgggggctccctagcccctcccagagcatctcacccccaccctcatgttcagggtggatgtgggcatgcaggtgacaagggccctgcctccacccctccagcccatccagcaatcgccccctttctgccctgggggcccaggatgtagatattgtacaaaggtttctaaatcccttcttttctatgcacttttttatttaagaggtggggtcccaggtgggaacccccccacaataaagtctgtcaatgtttgga

SEQ ID NO: 150244 - DNA, 16862 bp, Homo sapiens
  Payload ID: 9665
  Gene Symbol: KMT2C
  Gene Name: lysine (K)-specific methyltransferase 2C
  Uniprot ID: Q8NEZ4
  ENST ID: ENST00000262189
  CDS Start-End: 220-14955
gaggtgcgcgcgcccgcgccgatgtgtgtgagtgcgtgtcctgctcgctccatgttgccgcctctcccggtacctgctgctgctcccggggctgcgggaaatgcgagaggctgagccggggaggaggaacccgagcagcagcggcggcggcggcggccgcggcggcgggagccccccaggaggaggaccgggatccatgtgtctttcctggtgactaggatgtcgtcggaggaggacaagagcgtggagcagccgcagccgccgccaccaccccccgaggagcctggagccccggccccgagccccgcagccgcagacaaaagacctcggggccggcctcgcaaagatggcgcttcccctttccagagagccagaaagaaacctcgaagtagggggaaaactgcagtggaagatgaggacagcatggatgggctggagacaacagaaacagaaacgattgtggaaacagaaatcaaagaacaatctgcagaagaggatgctgaagcagaagtggataacagcaaacagctaattccaactcttcagcgatctgtgtctgaggaatcggcaaactccctggtctctgttggtgtagaagccaaaatcagtgaacagctctgcgctttttgttactgtggggaaaaaagttccttaggacaaggagacttaaaacaattcagaataacgcctggatttatcttgccatggagaaaccaaccttctaacaagaaggacattgatgacaacagcaatggaacctatgagaaaatgcaaaactcagcaccacgaaaacaaagaggacagagaaaagaacgatctcctcagcagaatatagtatcttgtgtaagtgtaagcacccagacagcttcagatgatcaagctggtaaactgtgggatgaactcagtctggttgggcttccagatgccattgatatccaagccttatttgattctacaggcacttgttgggctcatcaccgttgtgtggagtggtcactaggagtatgccagatggaagaaccattgttagtgaacgtggacaaagctgttgtctcagggagcacagaacgatgtgcattttgtaagcaccttggagccactatcaaatgctgtgaagagaaatgtacccagatgtatcattatccttgtgctgcaggagccggcacctttcaggatttcagtcacatcttcctgctttgtccagaacacattgaccaagctcctgaaagatcgaaggaagatgcaaactgtgcagtgtgcgacagcccgggagacctcttagatcagttcttttgtactacttgtggtcagcactatcatggaatgtgcctggatatagcggttactccattaaaacgtgcaggttggcaatgtcctgagtgcaaagtgtgccagaactgcaaacaatcgggagaagatagcaagatgctagtgtgtgatacgtgtgacaaagggtatcatactttttgtcttcaaccagttatgaaatcagtaccaaccaatggctggaaatgcaaaaattgcagaatatgtatagagtgtggcacacggtctagttctcagtggcaccacaattgcctgatatgtgacaattgttaccaacagcaggataacttatgtcccttctgtgggaagtgttatcatccagaattgcagaaagacatgcttcattgtaatatgtgcaaaaggtgggttcacctagagtgtgacaaaccaacagatcatgaactggatactcagctcaaagaagagtatatctgcatgtattgtaaacacctgggagctgagatggatcgtttacagccaggtgaggaagtggagatagctgagctcactacagattataacaatgaaatggaagttgaaggccctgaagatcaaatggtattctcagagcaggcagctaataaagatgtcaacggtcaggagtccactcctggaattgttccagatgcggttcaagtccacactgaagagcaacagaagagtcatccctcagaaagtcttgacacagatagtcttcttattgctgtatcatcccaacatacagtgaatactgaattggaaaaacagatttctaatgaagttgatagtgaagacctgaaaatgtcttctgaagtgaagcatatttgtggcgaagatcaaattgaagataaaatggaagtgacagaaaacattgaagtcgttacacaccagatcactgtgcagcaagaacaactgcagttgttagaggaacctgaaacagtggtatccagagaagaatcaaggcctccaaaattagtcatggaatctgtcactcttccactagaaaccttagtgtccccacatgaggaaagtatttcattatgtcctgaggaacagttggttatagaaaggctacaaggagaaaaggaacagaaagaaaattctgaactttctactggattgatggactctgaaatgactcctacaattgagggttgtgtgaaagatgtttcataccaaggaggcaaatctataaagttatcatctgagacagagtcatcattttcatcatcagcagacataagcaaggcagatgtgtcttcctccccaacaccttcttcagacttgccttcgcatgacatgctgcataattacccttcagctcttagttcctctgctggaaacatcatgccaacaacttacatctcagtcactccaaaaattggcatgggtaaaccagctattactaagagaaaattttctcctggtagacctcggtccaaacagggggcttggagtacccataatacagtgagcccaccttcctggtccccagacatttcagaaggtcgggaaatttttaaacccaggcagcttcctggcagtgccatttggagcatcaaagtgggccgtgggtctggatttccaggaaagcggagacctcgaggtgcaggactgtcggggcgaggtggccgaggcaggtcaaagctgaaaagtggaatcggagctgttgtattacctggggtgtctactgcagatatttcatcaaataaggatgatgaagaaaactctatgcacaatacagttgtgttgttttctagcagtgacaagttcactttgaatcaggatatgtgtgtagtttgtggcagttttggccaaggagcagaaggaagattacttgcctgttctcagtgtggtcagtgttaccatccatactgtgtcagtattaagatcactaaagtggttcttagcaaaggttggaggtgtcttgagtgcactgtgtgtgaggcctgtgggaaggcaactgacccaggaagactcctgctgtgtgatgactgtgacataagttatcacacctactgcctagaccctccattgcagacagttcccaaaggaggctggaagtgcaaatggtgtgtttggtgcagacactgtggagcaacatctgcaggtctaagatgtgaatggcagaacaattacacacagtgcgctccttgtgcaagcttatcttcctgtccagtctgctatcgaaactatagagaagaagatcttattctgcaatgtagacaatgtgatagatggatgcatgcagtttgtcagaacttaaatactgaggaagaagtggaaaatgtagcagacattggttttgattgtagcatgtgcagaccctatatgcctgcgtctaatgtgccttcctcagactgctgtgaatcttcacttgtagcacaaattgtcacaaaagtaaaagagctagacccacccaagacttatacccaggatggtgtgtgtttgactgaatcagggatgactcagttacagagcctcacagttacagttccaagaagaaaacggtcaaaaccaaaattgaaattgaagattataaatcagaatagcgtggccgtccttcagacccctccagacatccaatcagagcattcaagggatggtgaaatggatgatagtcgagaaggagaacttatggattgtgatggaaaatcagaatctagtcctgagcgggaagctgtggatgatgaaactaagggagtggaaggaacagatggtgtcaaaaagagaaaaaggaaaccatacagaccaggtattggtggatttatggtgcggcaaagaagtcgaactgggcaagggaaaaccaaaagatctgtgatcagaaaagattcctcaggctctatttccgagcagttaccttgcagagatgatggctggagtgagcagttaccagatactttagttgatgaatctgtttctgttactgaaagcactgaaaaaataaagaagagataccgaaaaaggaaaaataagcttgaagaaactttccctgcctatttacaagaagctttctttggaaaagatcttctagatacaagtagacaaagcaagataagtttagataatctgtcagaagatggagctcagcttttatataaaacaaacatgaacacaggtttcttggatccttccttagatccactacttagttcatcctcggctccaacaaaatctggaactcacggtcctgctgatgacccattagctgatatttctgaagttttaaacacagatgatgacattcttggaataatttcagatgatctagcaaaatcagttgatcattcagatattggtcctgtcactgatgatccttcctctttgcctcagccaaatgtcaatcagagttcacgaccattaagtgaagaacagctagatgggatcctcagtcctgaactagacaaaatggtcacagatggagcaattcttggaaaattatataaaattccagagcttggcggaaaagatgttgaagacttatttacagctgtacttagtcctgcgaacactcagccaactccattgccacagcctcccccaccaacacagctgttgccaatacacaatcaggatgctttttcacggatgcctctcatgaatggccttattggatccagtcctcatctcccacataattctttgccacctggaagcggactgggaactttctctgcaattgcacaatcctcttatcctgatgccagggataaaaattcagcctttaatccaatggcaagtgatcctaacaactcttggacatcatcagctcccactgtggaaggagaaaatgacacaatgtcgaatgcccagagaagcacgcttaagtgggagaaagaggaggctctgggtgaaatggcaactgttgccccagttctctacaccaatattaatttccccaacttaaaggaagaattccctgattggactactagagtgaagcaaattgccaaattgtggagaaaagcaagctcacaagaaagagcaccatatgtgcaaaaagccagagataacagagctgctttacgcattaataaagtacagatgtcaaatgattccatgaaaaggcagcaacagcaagatagcattgatcccagctctcgtattgattcggagctttttaaagatcctttaaagcaaagagaatcagaacatgaacaggaatggaaatttagacagcaaatgcgtcagaaaagtaagcagcaagctaaaattgaagccacacagaaacttgaacaggtgaaaaatgagcagcagcagcagcaacaacagcaatttggttctcagcatcttctggtgcagtctggttcagatacaccaagtagtgggatacagagtcccttgacacctcagcctggcaatggaaatatgtctcctgcacagtcattccataaagaactgtttacaaaacagccacccagtacccctacgtctacatcttcagatgatgtgtttgtaaagccacaagctccacctcctcctccagccccatcccggattcccatccaggatagtctttctcaggctcagacttctcagccaccctcaccgcaagtgttttcacctgggtcctctaactcacgaccaccatctccaatggatccatatgcaaaaatggttggtacccctcgaccacctcctgtgggccatagtttttccagaagaaattctgctgcaccagtggaaaactgtacacctttatcatcggtatctaggccccttcaaatgaatgagacaacagcaaataggccatcccctgtcagagatttatgttcttcttccacgacaaataatgacccctatgcaaaacctccagacacacctaggcctgtgatgacagatcaatttcccaaatccttgggcctatcccggtctcctgtagtttcagaacaaactgcaaaaggccctatagcagctggaaccagtgatcactttactaaaccatctcctagggcagatgtgtttcaaagacaaaggatacctgactcatatgcacgacccttgttgacacctgcacctcttgatagtggtcctggaccttttaagactccaatgcaacctcctccatcctctcaggatccttatggatcagtgtcacaggcatcaaggcgattgtctgttgacccttatgaaaggcctgctttgacaccaagacctatagataatttttctcataatcagtcaaatgatccatatagtcagcctccccttaccccacatccagcagtgaatgaatcttttgcccatccttcaagggctttttcccagcctggaaccatatcaaggccaacatctcaggacccatactcccaacccccaggaactccacgacctgttgtagattcttattcccaatcttcaggaacagctaggtccaatacagacccttactctcaacctcctggaactccccggcctactactgttgacccatatagtcagcagccccaaaccccaagaccatctacacaaactgacttgtttgttacacctgtaacaaatcagaggcattctgatccatatgctcatcctcctggaacaccaagacctggaatttctgtcccttactctcagccaccagcaacaccaaggccaaggatttcagagggttttactaggtcctcaatgacaagaccagtcctcatgccaaatcaggatcctttcctgcaagcagcacaaaaccgaggaccagctttacctggcccgttggtaaggccacctgatacatgttcccagacacctaggccccctggacctggtctttcagacacatttagccgtgtttccccatctgctgcccgtgatccctatgatcagtctccaatgactccaagatctcagtctgactcttttggaacaagtcaaactgcccatgatgttgctgatcagccaaggcctggatcagaggggagcttctgtgcatcttcaaactctccaatgcactcccaaggccagcagttctctggtgtctcccaacttcctggacctgtgccaacttcaggagtaactgatacacagaatactgtaaatatggcccaagcagatacagagaaattgagacagcggcagaagttacgtgaaatcattctccagcagcaacagcagaagaagattgcaggtcgacaggagaaggggtcacaggactcacccgcagtgcctcatccagggcctcttcaacactggcaaccagagaatgttaaccaggctttcaccagacccccacctccctatcctgggaacattaggtctcctgttgcccctcctttaggacctagatatgctgttttcccaaaagatcagcgtggaccctatcctcctgatgttgctagtatggggatgagacctcatggatttagatttggatttccaggaggtagtcatggtaccatgccgagtcaagagcgcttccttgtgcctcctcagcaaatacagggatctggagtttctccacagctaagaagatcagtatctgtagatatgcctaggcctttaaataactcacaaatgaataatccagttggacttcctcagcatttttcaccacagagcttgccagttcagcagcacaacatactgggccaagcatatattgaactgagacatagggctcctgacggaaggcaacggctgcctttcagtgctccacctggcagcgttgtagaggcatcttctaatctgagacatggaaacttcattccccggccagactttccgggccctagacacacagaccccatgcgacgacctccccagggtctacctaatcagctacctgtgcacccagatttggaacaagtgccaccatctcaacaagagcaaggtcattctgtccattcatcttctatggtcatgaggactctgaaccatccactaggtggtgaattttcagaagctcctttgtcaacatctgtaccgtctgaaacaacgtctgataatttacagataaccacccagccttctgatggtctagaggaaaaacttgattctgatgacccttctgtgaaggaactggatgttaaagaccttgagggggttgaagtcaaagacttagatgatgaagatcttgaaaacttaaatttagatacagaggatggcaaggtagttgaattggatactttagataatttggaaactaatgatcccaacctggatgacctcttaaggtcaggagagtttgatatcattgcatatacagatccagaacttgacatgggagataagaaaagcatgtttaatgaggaactagaccttccaattgatgataagttagataatcagtgtgtatctgttgaaccaaaaaaaaaggaacaagaaaacaaaactctggttctctctgataaacattcaccacagaaaaaatccactgttaccaatgaggtaaaaacggaagtactgtctccaaattctaaggtggaatccaaatgtgaaactgaaaaaaatgatgagaataaagataatgttgacactccttgctcacaggcttctgctcactcagacctaaatgatggagaaaagacttctttgcatccttgtgatccagatctatttgagaaaagaaccaatcgagaaactgctggccccagtgcaaatgtcattcaggcatccactcaactacctgctcaagatgtaataaactcttgtggcataactggatcaactccagttctctcaagtttacttgctaatgagaaatctgataattcagacattaggccatcggggtctccaccaccaccaactctgccggcctccccatccaatcatgtgtcaagtttgcctcctttcatagcaccgcctggccgtgttttggataatgccatgaattctaatgtgacagtagtctctagggtaaaccatgttttttctcagggtgtgcaggtaaacccagggctcattccaggtcaatcaacagttaaccacagtctggggacaggaaaacctgcaactcaaactgggcctcaaacaagtcagtctggtaccagtagcatgtctggaccccaacagctaatgattcctcaaacattagcacagcagaatagagagaggccccttcttctagaagaacagcctctacttctacaggatcttttggatcaagaaaggcaagaacagcagcagcaaagacagatgcaagccatgattcgtcagcgatcagaaccgttcttccctaatattgattttgatgcaattacagatcctataatgaaagccaaaatggtggcccttaaaggtataaataaagtgatggcacaaaacaatctgggcatgccaccaatggtgatgagcaggttcccttttatgggccaggtggtaactggaacacagaacagtgaaggacagaaccttggaccacaggccattcctcaggatggcagtataacacatcagatttctaggcctaatcctccaaattttggtccaggctttgtcaatgattcacagcgtaagcagtatgaagagtggctccaggagacccaacagctgcttcaaatgcagcagaagtatcttgaagaacaaattggtgctcacagaaaatctaagaaggccctttcagctaaacaacgtactgccaagaaagctgggcgtgaatttccagaggaagatgcagaacaactcaagcatgttactgaacagcaaagcatggttcagaaacagctagaacagattcgtaaacaacagaaagaacatgctgaattgattgaagattatcggatcaaacagcagcagcaatgtgcaatggccccacctaccatgatgcccagtgtccagccccagccacccctaattccaggtgccactccacccaccatgagccaacccacctttcccatggtgccacagcagcttcagcaccagcagcacacaacagttatttctggccatactagccctgttagaatgcccagtttacctggatggcaacccaacagtgctcctgcccacctgcccctcaatcctcctagaattcagcccccaattgcccagttaccaataaaaacttgtacaccagccccagggacagtctcaaatgcaaatccacagagtggaccaccacctcgggtagaatttgatgacaacaatccctttagtgaaagttttcaagaacgggaacgtaaggaacgtttacgagaacagcaagagagacaacggatccaactcatgcaggaggtagatagacaaagagctttgcagcagaggatggaaatggagcagcatggtatggtgggctctgagataagtagtagtaggacatctgtgtcccagattcccttctacagttccgacttaccttgtgattttatgcaacctctaggaccccttcagcagtctccacaacaccaacagcaaatggggcaggttttacagcagcagaatatacaacaaggatcaattaattcaccctccacccaaactttcatgcagactaatgagcgaaggcaggtaggccctccttcatttgttcctgattcaccatcaatccctgttggaagcccaaatttttcttctgtgaagcagggacatggaaatctttctgggaccagcttccagcagtccccagtgaggccttcttttacacctgctttaccagcagcacctccagtagctaatagcagtctcccatgtggccaagattctactataacccatggacacagttatccgggatcaacccaatcgctcattcagttgtattctgatataatcccagaggaaaaagggaaaaagaaaagaacaagaaagaagaaaagagatgatgatgcagaatccaccaaggctccatcaactccccattcagatataactgccccaccgactccaggcatctcagaaactacctctactcctgcagtgagcacacccagtgagcttcctcaacaagccgaccaagagtcggtggaaccagtcggcccatccactcccaatatggcagcaggccagctatgtacagaattagagaacaaactgcccaatagtgatttctcacaagcaactccaaatcaacagacgtatgcaaattcagaagtagacaagctctccatggaaacccctgccaaaacagaagagataaaactggaaaaggctgagacagagtcctgcccaggccaagaggagcctaaattggaggaacagaatggtagtaaggtagaaggaaacgctgtagcctgtcctgtctcctcagcacagagtcctccccattctgctggggcccctgctgccaaaggagactcagggaatgaacttctgaaacacttgttgaaaaataaaaagtcatcttctcttttgaatcaaaaacctgagggcagtatttgttcagaagatgactgtacaaaggataataaactagttgagaagcagaacccagctgaaggactgcaaactttgggggctcaaatgcaaggtggttttggatgtggcaaccagttgccaaaaacagatggaggaagtgaaaccaagaaacagcgaagcaaacggactcagaggacgggtgagaaagcagcacctcgctcaaagaaaaggaaaaaggacgaagaggagaaacaagctatgtactctagcactgacacgtttacccacttgaaacagcagaataatttaagtaatcctccaacaccccctgcctctcttcctcctacaccacctcctatggcttgtcagaagatggccaatggttttgcaacaactgaagaacttgctggaaaagccggagtgttagtgagccatgaagttaccaaaactctaggacctaaaccatttcagctgcccttcagaccccaggacgacttgttggcccgagctcttgctcagggccccaagacagttgatgtgccagcctccctcccaacaccacctcataacaatcaggaagaattaaggatacaggatcactgtggtgatcgagatactcctgacagttttgttccctcatcctctcctgagagtgtggttggggtagaagtgagcaggtatccagatctgtcattggtcaaggaggagcctccagaaccggtgccgtcccccatcattccaattcttcctagcactgctgggaaaagttcagaatcaagaaggaatgacatcaaaactgagccaggcactttatattttgcgtcaccttttggtccttccccaaatggtcccagatcaggtcttatatctgtagcaattactctgcatcctacagctgctgagaacattagcagtgttgtggctgcattttccgaccttcttcacgtccgaatccctaacagctatgaggttagcagtgctccagatgtcccatccatgggtttggtcagtagccacagaatcaacccgggtttggagtatcgacagcatttacttctccgtgggcctccgccaggatctgcaaaccctcccagattagtgagctcttaccggctgaagcagcctaatgtaccatttcctccaacaagcaatggtctttctggatataaggattctagtcatggtattgcagaaagcgcagcactcagaccacagtggtgttgtcattgtaaagtggttattcttggaagtggtgtgcggaaatctttcaaagatctgacccttttgaacaaggattcccgagaaagcaccaagagggtagagaaggacattgtcttctgtagtaataactgctttattctttattcatcaactgcacaagcgaaaaactcagaaaacaaggaatccattccttcattgccacaatcacctatgagagaaacgccttccaaagcatttcatcagtacagcaacaacatctccactttggatgtgcactgtctcccccagctcccagagaaagcttctccccctgcctcaccacccatcgccttccctcctgcttttgaagcagcccaagtcgaggccaagccagatgagctgaaggtgacagtcaagctgaagcctcggctaagagctgtccatggtgggtttgaagattgcaggccgctcaataaaaaatggagaggaatgaaatggaagaagtggagcattcatattgtaatccctaaggggacatttaaaccaccttgtgaggatgaaatagatgaatttctaaagaaattgggcacttcccttaaacctgatcctgtgcccaaagactatcggaaatgttgcttttgtcatgaagaaggtgatggattgacagatggaccagcaaggctactcaaccttgacttggatctgtgggtccacttgaactgcgctctgtggtccacggaggtctatgagactcaggctggtgccttaataaatgtggagctagctctgaggagaggcctacaaatgaaatgtgtcttctgtcacaagacgggtgccactagtggatgccacagatttcgatgcaccaacatttatcacttcacttgcgccattaaagcacaatgcatgttttttaaggacaaaactatgctttgccccatgcacaaaccaaagggaattcatgagcaagaattaagttactttgcagtcttcaggagggtctatgttcagcgtgatgaggtgcgacagattgctagcatcgtgcaacgaggagaacgggaccatacctttcgcgtgggtagcctcatcttccacacaattggtcagctgcttccacagcagatgcaagcattccattctcctaaagcactcttccctgtgggctatgaagccagccggctgtactggagcactcgctatgccaataggcgctgccgctacctgtgctccattgaggagaaggatgggcgcccagtgtttgtcatcaggattgtggaacaaggccatgaagacctggttctaagtgacatctcacctaaaggtgtctgggataagattttggagcctgtggcatgtgtgagaaaaaagtctgaaatgctccagcttttcccagcgtatttaaaaggagaggatctgtttggcctgaccgtctctgcagtggcacgcatagcggaatcacttcctggggttgaggcatgtgaaaattataccttccgatacggccgaaatcctctcatggaacttcctcttgccgttaaccccacaggttgtgcccgttctgaacctaaaatgagtgcccatgtcaagaggtttgtgttaaggcctcacaccttaaacagcaccagcacctcaaagtcatttcagagcacagtcactggagaactgaacgcaccttatagtaaacagtttgttcactccaagtcatcgcagtaccggaagatgaaaactgaatggaaatccaatgtgtatctggcacggtctcggattcaggggctgggcctgtatgctgctcgagacattgagaaacacaccatggtcattgagtacatcgggactatcattcgaaacgaagtagccaacaggaaagagaagctttatgagtctcagaaccgtggtgtgtacatgttccgcatggataacgaccatgtgattgacgcgacgctcacaggagggcccgcaaggtatatcaaccattcgtgtgcacctaattgtgtggctgaagtggtgacttttgagagaggacacaaaattatcatcagctccagtcggagaatccagaaaggagaagagctctgctatgactataagtttgactttgaagatgaccagcacaagattccgtgtcactgtggagctgtgaactgccggaagtggatgaactgaaatgcattccttgctagctcagcgggcggcttgtccctaggaagaggcgattcaacacaccattggaattttgcagacagaaagagatttttgttttctgttttatgactttttgaaaaagcttctgggagttctgatttcctcagtcctttaggttaaagcagcgccaggaggaagctgacagaagcagcgttcctgaagtggccgaggttaaacggaatcacagaatggtccagcacttttgcttttttttcttttccttttcttttttttttgtttgttttttgttttgtttttcccttgtgggtgggtttcattgttttggttttctagtctcactaaggagaaacttttactggggcaaagagccgatggctgccctgccccgggcaggggccttcctatgaatgtaagactgaaatcaccagcgagggggacagagagtgctggccacggccttattaaaaaggggcaggccctctaacttcaaaatgtttttaaataaagtagacaccactgaacaaggaatgtactgaaatgacttccttagggatagagctaagggataataacttgcactaaatacatttaaatacttgattccatgagtcagtttattgtagtttttgatttctgtaaaataagagaaacttttgtatttattattgaataagtgaatgaagctatttttaaataaagttagaagaaagccaagctgctgctgttacctgcagaactaacaaaccctgttactttgtacagatatgtaaatattttgagaaaaaatacagtataaaaatagttattgaccaaatgctaccaggctctgcagcagctcgggggcttataaaatgttcatagggatgttacaatataattttgtgttataaaatatgccattataattatgtaataaccaaaatttcaacctagagtgttgggggttttttggaaaccgcagtctattagtactcaatggttttatacaccttacttctgacagagcggggcgtatgctacgactacaacttttatagctgttttggtaatttaaactaattttttcatattatattgttgcatccctacttcttcagtcaggtttttttgtgcttacaatttgtgataactgtgaataactgcttaaaaatacacccaaatggaggctgaattttttcttcagcaaaagtagttttgattagaactttgtttcagccacagagaatcatgtaaacgtaataggatcatgtagcagaaacttaaatctaaccctttagccttctatttaacacaaaaatttgaaaaagttaaaaaaaaaaaggagatgtgattatgcttacagctgcaggactctggcaatagggtttttggaagatgtaattttaaaatgtgtttgtatgaactgtttgtttacatttctttaataaaaaaaacactgttttgtgtttgcttgtagaaacttaatcagcattttgaaccaggttagctttttattttgtacttaaaattctggtactgacacttcacaggctaagtataaaatgaagttttgtgtgcacaattcaagtggactgtaaactgttggtatattcagtgatgcagttctgaacttgtatatggcatgatgtatttttatcttacagaataaatcaattgtatatatttttctcttgataaatagctgtatgaaatttgtttcctgaatatttttcttctcttgtacaatatcctgacatcctaccagtatttgtcctaccgggtttttgttgttttctgttctgtataatagtatctaatgttggcaaaaattgaattttttgaagtatacagagtgttatgggttttggaatttgtggacacagatttagaagatcaccatttacaaataaaatattttacatctataa

SEQ ID NO: 150245 - DNA, 16858 bp, Homo sapiens
  Payload ID: 9665
  Gene Symbol: KMT2C
  Gene Name: lysine (K)-specific methyltransferase 2C
  Uniprot ID: Q8NEZ4
  ENST ID: ENST00000355193
  CDS Start-End: 220-14955
gaggtgcgcgcgcccgcgccgatgtgtgtgagtgcgtgtcctgctcgctccatgttgccgcctctcccggtacctgctgctgctcccggggctgcgggaaatgcgagaggctgagccggggaggaggaacccgagcagcagcggcggcggcggcggccgcggcggcgggagccccccaggaggaggaccgggatccatgtgtctttcctggtgactaggatgtcgtcggaggaggacaagagcgtggagcagccgcagccgccgccaccaccccccgaggagcctggagccccggccccgagccccgcagccgcagacaaaagacctcggggccggcctcgcaaagatggcgcttcccctttccagagagccagaaagaaacctcgaagtagggggaaaactgcagtggaagatgaggacagcatggatgggctggagacaacagaaacagaaacgattgtggaaacagaaatcaaagaacaatctgcagaagaggatgctgaagcagaagtggataacagcaaacagctaattccaactcttcagcgatctgtgtctgaggaatcggcaaactccctggtctctgttggtgtagaagccaaaatcagtgaacagctctgcgctttttgttactgtggggaaaaaagttccttaggacaaggagacttaaaacaattcagaataacgcctggatttatcttgccatggagaaaccaaccttctaacaagaaggacattgatgacaacagcaatggaacctatgagaaaatgcaaaactcagcaccacgaaaacaaagaggacagagaaaagaacgatctcctcagcagaatatagtatcttgtgtaagtgtaagcacccagacagcttcagatgatcaagctggtaaactgtgggatgaactcagtctggttgggcttccagatgccattgatatccaagccttatttgattctacaggcacttgttgggctcatcaccgttgtgtggagtggtcactaggagtatgccagatggaagaaccattgttagtgaacgtggacaaagctgttgtctcagggagcacagaacgatgtgcattttgtaagcaccttggagccactatcaaatgctgtgaagagaaatgtacccagatgtatcattatccttgtgctgcaggagccggcacctttcaggatttcagtcacatcttcctgctttgtccagaacacattgaccaagctcctgaaagatcgaaggaagatgcaaactgtgcagtgtgcgacagcccgggagacctcttagatcagttcttttgtactacttgtggtcagcactatcatggaatgtgcctggatatagcggttactccattaaaacgtgcaggttggcaatgtcctgagtgcaaagtgtgccagaactgcaaacaatcgggagaagatagcaagatgctagtgtgtgatacgtgtgacaaagggtatcatactttttgtcttcaaccagttatgaaatcagtaccaaccaatggctggaaatgcaaaaattgcagaatatgtatagagtgtggcacacggtctagttctcagtggcaccacaattgcctgatatgtgacaattgttaccaacagcaggataacttatgtcccttctgtgggaagtgttatcatccagaattgcagaaagacatgcttcattgtaatatgtgcaaaaggtgggttcacctagagtgtgacaaaccaacagatcatgaactggatactcagctcaaagaagagtatatctgcatgtattgtaaacacctgggagctgagatggatcgtttacagccaggtgaggaagtggagatagctgagctcactacagattataacaatgaaatggaagttgaaggccctgaagatcaaatggtattctcagagcaggcagctaataaagatgtcaacggtcaggagtccactcctggaattgttccagatgcggttcaagtccacactgaagagcaacagaagagtcatccctcagaaagtcttgacacagatagtcttcttattgctgtatcatcccaacatacagtgaatactgaattggaaaaacagatttctaatgaagttgatagtgaagacctgaaaatgtcttctgaagtgaagcatatttgtggcgaagatcaaattgaagataaaatggaagtgacagaaaacattgaagtcgttacacaccagatcactgtgcagcaagaacaactgcagttgttagaggaacctgaaacagtggtatccagagaagaatcaaggcctccaaaattagtcatggaatctgtcactcttccactagaaaccttagtgtccccacatgaggaaagtatttcattatgtcctgaggaacagttggttatagaaaggctacaaggagaaaaggaacagaaagaaaattctgaactttctactggattgatggactctgaaatgactcctacaattgagggttgtgtgaaagatgtttcataccaaggaggcaaatctataaagttatcatctgagacagagtcatcattttcatcatcagcagacataagcaaggcagatgtgtcttcctccccaacaccttcttcagacttgccttcgcatgacatgctgcataattacccttcagctcttagttcctctgctggaaacatcatgccaacaacttacatctcagtcactccaaaaattggcatgggtaaaccagctattactaagagaaaattttctcctggtagacctcggtccaaacagggggcttggagtacccataatacagtgagcccaccttcctggtccccagacatttcagaaggtcgggaaatttttaaacccaggcagcttcctggcagtgccatttggagcatcaaagtgggccgtgggtctggatttccaggaaagcggagacctcgaggtgcaggactgtcggggcgaggtggccgaggcaggtcaaagctgaaaagtggaatcggagctgttgtattacctggggtgtctactgcagatatttcatcaaataaggatgatgaagaaaactctatgcacaatacagttgtgttgttttctagcagtgacaagttcactttgaatcaggatatgtgtgtagtttgtggcagttttggccaaggagcagaaggaagattacttgcctgttctcagtgtggtcagtgttaccatccatactgtgtcagtattaagatcactaaagtggttcttagcaaaggttggaggtgtcttgagtgcactgtgtgtgaggcctgtgggaaggcaactgacccaggaagactcctgctgtgtgatgactgtgacataagttatcacacctactgcctagaccctccattgcagacagttcccaaaggaggctggaagtgcaaatggtgtgtttggtgcagacactgtggagcaacatctgcaggtctaagatgtgaatggcagaacaattacacacagtgcgctccttgtgcaagcttatcttcctgtccagtctgctatcgaaactatagagaagaagatcttattctgcaatgtagacaatgtgatagatggatgcatgcagtttgtcagaacttaaatactgaggaagaagtggaaaatgtagcagacattggttttgattgtagcatgtgcagaccctatatgcctgcgtctaatgtgccttcctcagactgctgtgaatcttcacttgtagcacaaattgtcacaaaagtaaaagagctagacccacccaagacttatacccaggatggtgtgtgtttgactgaatcagggatgactcagttacagagcctcacagttacagttccaagaagaaaacggtcaaaaccaaaattgaaattgaagattataaatcagaatagcgtggccgtccttcagacccctccagacatccaatcagagcattcaagggatggtgaaatggatgatagtcgagaaggagaacttatggattgtgatggaaaatcagaatctagtcctgagcgggaagctgtggatgatgaaactaagggagtggaaggaacagatggtgtcaaaaagagaaaaaggaaaccatacagaccaggtattggtggatttatggtgcggcaaagaagtcgaactgggcaagggaaaaccaaaagatctgtgatcagaaaagattcctcaggctctatttccgagcagttaccttgcagagatgatggctggagtgagcagttaccagatactttagttgatgaatctgtttctgttactgaaagcactgaaaaaataaagaagagataccgaaaaaggaaaaataagcttgaagaaactttccctgcctatttacaagaagctttctttggaaaagatcttctagatacaagtagacaaagcaagataagtttagataatctgtcagaagatggagctcagcttttatataaaacaaacatgaacacaggtttcttggatccttccttagatccactacttagttcatcctcggctccaacaaaatctggaactcacggtcctgctgatgacccattagctgatatttctgaagttttaaacacagatgatgacattcttggaataatttcagatgatctagcaaaatcagttgatcattcagatattggtcctgtcactgatgatccttcctctttgcctcagccaaatgtcaatcagagttcacgaccattaagtgaagaacagctagatgggatcctcagtcctgaactagacaaaatggtcacagatggagcaattcttggaaaattatataaaattccagagcttggcggaaaagatgttgaagacttatttacagctgtacttagtcctgcgaacactcagccaactccattgccacagcctcccccaccaacacagctgttgccaatacacaatcaggatgctttttcacggatgcctctcatgaatggccttattggatccagtcctcatctcccacataattctttgccacctggaagcggactgggaactttctctgcaattgcacaatcctcttatcctgatgccagggataaaaattcagcctttaatccaatggcaagtgatcctaacaactcttggacatcatcagctcccactgtggaaggagaaaatgacacaatgtcgaatgcccagagaagcacgcttaagtgggagaaagaggaggctctgggtgaaatggcaactgttgccccagttctctacaccaatattaatttccccaacttaaaggaagaattccctgattggactactagagtgaagcaaattgccaaattgtggagaaaagcaagctcacaagaaagagcaccatatgtgcaaaaagccagagataacagagctgctttacgcattaataaagtacagatgtcaaatgattccatgaaaaggcagcaacagcaagatagcattgatcccagctctcgtattgattcggagctttttaaagatcctttaaagcaaagagaatcagaacatgaacaggaatggaaatttagacagcaaatgcgtcagaaaagtaagcagcaagctaaaattgaagccacacagaaacttgaacaggtgaaaaatgagcagcagcagcagcaacaacagcaatttggttctcagcatcttctggtgcagtctggttcagatacaccaagtagtgggatacagagtcccttgacacctcagcctggcaatggaaatatgtctcctgcacagtcattccataaagaactgtttacaaaacagccacccagtacccctacgtctacatcttcagatgatgtgtttgtaaagccacaagctccacctcctcctccagccccatcccggattcccatccaggatagtctttctcaggctcagacttctcagccaccctcaccgcaagtgttttcacctgggtcctctaactcacgaccaccatctccaatggatccatatgcaaaaatggttggtacccctcgaccacctcctgtgggccatagtttttccagaagaaattctgctgcaccagtggaaaactgtacacctttatcatcggtatctaggccccttcaaatgaatgagacaacagcaaataggccatcccctgtcagagatttatgttcttcttccacgacaaataatgacccctatgcaaaacctccagacacacctaggcctgtgatgacagatcaatttcccaaatccttgggcctatcccggtctcctgtagtttcagaacaaactgcaaaaggccctatagcagctggaaccagtgatcactttactaaaccatctcctagggcagatgtgtttcaaagacaaaggatacctgactcatatgcacgacccttgttgacacctgcacctcttgatagtggtcctggaccttttaagactccaatgcaacctcctccatcctctcaggatccttatggatcagtgtcacaggcatcaaggcgattgtctgttgacccttatgaaaggcctgctttgacaccaagacctatagataatttttctcataatcagtcaaatgatccatatagtcagcctccccttaccccacatccagcagtgaatgaatcttttgcccatccttcaagggctttttcccagcctggaaccatatcaaggccaacatctcaggacccatactcccaacccccaggaactccacgacctgttgtagattcttattcccaatcttcaggaacagctaggtccaatacagacccttactctcaacctcctggaactccccggcctactactgttgacccatatagtcagcagccccaaaccccaagaccatctacacaaactgacttgtttgttacacctgtaacaaatcagaggcattctgatccatatgctcatcctcctggaacaccaagacctggaatttctgtcccttactctcagccaccagcaacaccaaggccaaggatttcagagggttttactaggtcctcaatgacaagaccagtcctcatgccaaatcaggatcctttcctgcaagcagcacaaaaccgaggaccagctttacctggcccgttggtaaggccacctgatacatgttcccagacacctaggccccctggacctggtctttcagacacatttagccgtgtttccccatctgctgcccgtgatccctatgatcagtctccaatgactccaagatctcagtctgactcttttggaacaagtcaaactgcccatgatgttgctgatcagccaaggcctggatcagaggggagcttctgtgcatcttcaaactctccaatgcactcccaaggccagcagttctctggtgtctcccaacttcctggacctgtgccaacttcaggagtaactgatacacagaatactgtaaatatggcccaagcagatacagagaaattgagacagcggcagaagttacgtgaaatcattctccagcagcaacagcagaagaagattgcaggtcgacaggagaaggggtcacaggactcacccgcagtgcctcatccagggcctcttcaacactggcaaccagagaatgttaaccaggctttcaccagacccccacctccctatcctgggaacattaggtctcctgttgcccctcctttaggacctagatatgctgttttcccaaaagatcagcgtggaccctatcctcctgatgttgctagtatggggatgagacctcatggatttagatttggatttccaggaggtagtcatggtaccatgccgagtcaagagcgcttccttgtgcctcctcagcaaatacagggatctggagtttctccacagctaagaagatcagtatctgtagatatgcctaggcctttaaataactcacaaatgaataatccagttggacttcctcagcatttttcaccacagagcttgccagttcagcagcacaacatactgggccaagcatatattgaactgagacatagggctcctgacggaaggcaacggctgcctttcagtgctccacctggcagcgttgtagaggcatcttctaatctgagacatggaaacttcattccccggccagactttccgggccctagacacacagaccccatgcgacgacctccccagggtctacctaatcagctacctgtgcacccagatttggaacaagtgccaccatctcaacaagagcaaggtcattctgtccattcatcttctatggtcatgaggactctgaaccatccactaggtggtgaattttcagaagctcctttgtcaacatctgtaccgtctgaaacaacgtctgataatttacagataaccacccagccttctgatggtctagaggaaaaacttgattctgatgacccttctgtgaaggaactggatgttaaagaccttgagggggttgaagtcaaagacttagatgatgaagatcttgaaaacttaaatttagatacagaggatggcaaggtagttgaattggatactttagataatttggaaactaatgatcccaacctggatgacctcttaaggtcaggagagtttgatatcattgcatatacagatccagaacttgacatgggagataagaaaagcatgtttaatgaggaactagaccttccaattgatgataagttagataatcagtgtgtatctgttgaaccaaaaaaaaaggaacaagaaaacaaaactctggttctctctgataaacattcaccacagaaaaaatccactgttaccaatgaggtaaaaacggaagtactgtctccaaattctaaggtggaatccaaatgtgaaactgaaaaaaatgatgagaataaagataatgttgacactccttgctcacaggcttctgctcactcagacctaaatgatggagaaaagacttctttgcatccttgtgatccagatctatttgagaaaagaaccaatcgagaaactgctggccccagtgcaaatgtcattcaggcatccactcaactacctgctcaagatgtaataaactcttgtggcataactggatcaactccagttctctcaagtttacttgctaatgagaaatctgataattcagacattaggccatcggggtctccaccaccaccaactctgccggcctccccatccaatcatgtgtcaagtttgcctcctttcatagcaccgcctggccgtgttttggataatgccatgaattctaatgtgacagtagtctctagggtaaaccatgttttttctcagggtgtgcaggtaaacccagggctcattccaggtcaatcaacagttaaccacagtctggggacaggaaaacctgcaactcaaactgggcctcaaacaagtcagtctggtaccagtagcatgtctggaccccaacagctaatgattcctcaaacattagcacagcagaatagagagaggccccttcttctagaagaacagcctctacttctacaggatcttttggatcaagaaaggcaagaacagcagcagcaaagacagatgcaagccatgattcgtcagcgatcagaaccgttcttccctaatattgattttgatgcaattacagatcctataatgaaagccaaaatggtggcccttaaaggtataaataaagtgatggcacaaaacaatctgggcatgccaccaatggtgatgagcaggttcccttttatgggccaggtggtaactggaacacagaacagtgaaggacagaaccttggaccacaggccattcctcaggatggcagtataacacatcagatttctaggcctaatcctccaaattttggtccaggctttgtcaatgattcacagcgtaagcagtatgaagagtggctccaggagacccaacagctgcttcaaatgcagcagaagtatcttgaagaacaaattggtgctcacagaaaatctaagaaggccctttcagctaaacaacgtactgccaagaaagctgggcgtgaatttccagaggaagatgcagaacaactcaagcatgttactgaacagcaaagcatggttcagaaacagctagaacagattcgtaaacaacagaaagaacatgctgaattgattgaagattatcggatcaaacagcagcagcaatgtgcaatggccccacctaccatgatgcccagtgtccagccccagccacccctaattccaggtgccactccacccaccatgagccaacccacctttcccatggtgccacagcagcttcagcaccagcagcacacaacagttatttctggccatactagccctgttagaatgcccagtttacctggatggcaacccaacagtgctcctgcccacctgcccctcaatcctcctagaattcagcccccaattgcccagttaccaataaaaacttgtacaccagccccagggacagtctcaaatgcaaatccacagagtggaccaccacctcgggtagaatttgatgacaacaatccctttagtgaaagttttcaagaacgggaacgtaaggaacgtttacgagaacagcaagagagacaacggatccaactcatgcaggaggtagatagacaaagagctttgcagcagaggatggaaatggagcagcatggtatggtgggctctgagataagtagtagtaggacatctgtgtcccagattcccttctacagttccgacttaccttgtgattttatgcaacctctaggaccccttcagcagtctccacaacaccaacagcaaatggggcaggttttacagcagcagaatatacaacaaggatcaattaattcaccctccacccaaactttcatgcagactaatgagcgaaggcaggtaggccctccttcatttgttcctgattcaccatcaatccctgttggaagcccaaatttttcttctgtgaagcagggacatggaaatctttctgggaccagcttccagcagtccccagtgaggccttcttttacacctgctttaccagcagcacctccagtagctaatagcagtctcccatgtggccaagattctactataacccatggacacagttatccgggatcaacccaatcgctcattcagttgtattctgatataatcccagaggaaaaagggaaaaagaaaagaacaagaaagaagaaaagagatgatgatgcagaatccaccaaggctccatcaactccccattcagatataactgccccaccgactccaggcatctcagaaactacctctactcctgcagtgagcacacccagtgagcttcctcaacaagccgaccaagagtcggtggaaccagtcggcccatccactcccaatatggcagcaggccagctatgtacagaattagagaacaaactgcccaatagtgatttctcacaagcaactccaaatcaacagacgtatgcaaattcagaagtagacaagctctccatggaaacccctgccaaaacagaagagataaaactggaaaaggctgagacagagtcctgcccaggccaagaggagcctaaattggaggaacagaatggtagtaaggtagaaggaaacgctgtagcctgtcctgtctcctcagcacagagtcctccccattctgctggggcccctgctgccaaaggagactcagggaatgaacttctgaaacacttgttgaaaaataaaaagtcatcttctcttttgaatcaaaaacctgagggcagtatttgttcagaagatgactgtacaaaggataataaactagttgagaagcagaacccagctgaaggactgcaaactttgggggctcaaatgcaaggtggttttggatgtggcaaccagttgccaaaaacagatggaggaagtgaaaccaagaaacagcgaagcaaacggactcagaggacgggtgagaaagcagcacctcgctcaaagaaaaggaaaaaggacgaagaggagaaacaagctatgtactctagcactgacacgtttacccacttgaaacagcagaataatttaagtaatcctccaacaccccctgcctctcttcctcctacaccacctcctatggcttgtcagaagatggccaatggttttgcaacaactgaagaacttgctggaaaagccggagtgttagtgagccatgaagttaccaaaactctaggacctaaaccatttcagctgcccttcagaccccaggacgacttgttggcccgagctcttgctcagggccccaagacagttgatgtgccagcctccctcccaacaccacctcataacaatcaggaagaattaaggatacaggatcactgtggtgatcgagatactcctgacagttttgttccctcatcctctcctgagagtgtggttggggtagaagtgagcaggtatccagatctgtcattggtcaaggaggagcctccagaaccggtgccgtcccccatcattccaattcttcctagcactgctgggaaaagttcagaatcaagaaggaatgacatcaaaactgagccaggcactttatattttgcgtcaccttttggtccttccccaaatggtcccagatcaggtcttatatctgtagcaattactctgcatcctacagctgctgagaacattagcagtgttgtggctgcattttccgaccttcttcacgtccgaatccctaacagctatgaggttagcagtgctccagatgtcccatccatgggtttggtcagtagccacagaatcaacccgggtttggagtatcgacagcatttacttctccgtgggcctccgccaggatctgcaaaccctcccagattagtgagctcttaccggctgaagcagcctaatgtaccatttcctccaacaagcaatggtctttctggatataaggattctagtcatggtattgcagaaagcgcagcactcagaccacagtggtgttgtcattgtaaagtggttattcttggaagtggtgtgcggaaatctttcaaagatctgacccttttgaacaaggattcccgagaaagcaccaagagggtagagaaggacattgtcttctgtagtaataactgctttattctttattcatcaactgcacaagcgaaaaactcagaaaacaaggaatccattccttcattgccacaatcacctatgagagaaacgccttccaaagcatttcatcagtacagcaacaacatctccactttggatgtgcactgtctcccccagctcccagagaaagcttctccccctgcctcaccacccatcgccttccctcctgcttttgaagcagcccaagtcgaggccaagccagatgagctgaaggtgacagtcaagctgaagcctcggctaagagctgtccatggtgggtttgaagattgcaggccgctcaataaaaaatggagaggaatgaaatggaagaagtggagcattcatattgtaatccctaaggggacatttaaaccaccttgtgaggatgaaatagatgaatttctaaagaaattgggcacttcccttaaacctgatcctgtgcccaaagactatcggaaatgttgcttttgtcatgaagaaggtgatggattgacagatggaccagcaaggctactcaaccttgacttggatctgtgggtccacttgaactgcgctctgtggtccacggaggtctatgagactcaggctggtgccttaataaatgtggagctagctctgaggagaggcctacaaatgaaatgtgtcttctgtcacaagacgggtgccactagtggatgccacagatttcgatgcaccaacatttatcacttcacttgcgccattaaagcacaatgcatgttttttaaggacaaaactatgctttgccccatgcacaaaccaaagggaattcatgagcaagaattaagttactttgcagtcttcaggagggtctatgttcagcgtgatgaggtgcgacagattgctagcatcgtgcaacgaggagaacgggaccatacctttcgcgtgggtagcctcatcttccacacaattggtcagctgcttccacagcagatgcaagcattccattctcctaaagcactcttccctgtgggctatgaagccagccggctgtactggagcactcgctatgccaataggcgctgccgctacctgtgctccattgaggagaaggatgggcgcccagtgtttgtcatcaggattgtggaacaaggccatgaagacctggttctaagtgacatctcacctaaaggtgtctgggataagattttggagcctgtggcatgtgtgagaaaaaagtctgaaatgctccagcttttcccagcgtatttaaaaggagaggatctgtttggcctgaccgtctctgcagtggcacgcatagcggaatcacttcctggggttgaggcatgtgaaaattataccttccgatacggccgaaatcctctcatggaacttcctcttgccgttaaccccacaggttgtgcccgttctgaacctaaaatgagtgcccatgtcaagaggtttgtgttaaggcctcacaccttaaacagcaccagcacctcaaagtcatttcagagcacagtcactggagaactgaacgcaccttatagtaaacagtttgttcactccaagtcatcgcagtaccggaagatgaaaactgaatggaaatccaatgtgtatctggcacggtctcggattcaggggctgggcctgtatgctgctcgagacattgagaaacacaccatggtcattgagtacatcgggactatcattcgaaacgaagtagccaacaggaaagagaagctttatgagtctcagaaccgtggtgtgtacatgttccgcatggataacgaccatgtgattgacgcgacgctcacaggagggcccgcaaggtatatcaaccattcgtgtgcacctaattgtgtggctgaagtggtgacttttgagagaggacacaaaattatcatcagctccagtcggagaatccagaaaggagaagagctctgctatgactataagtttgactttgaagatgaccagcacaagattccgtgtcactgtggagctgtgaactgccggaagtggatgaactgaaatgcattccttgctagctcagcgggcggcttgtccctaggaagaggcgattcaacacaccattggaattttgcagacagaaagagatttttgttttctgttttatgactttttgaaaaagcttctgggagttctgatttcctcagtcctttaggttaaagcagcgccaggaggaagctgacagaagcagcgttcctgaagtggccgaggttaaacggaatcacagaatggtccagcacttttgcttttttttcttttccttttcttttttttttgtttgttttttgttttgtttttcccttgtgggtgggtttcattgttttggttttctagtctcactaaggagaaacttttactggggcaaagagccgatggctgccctgccccgggcaggggccttcctatgaatgtaagactgaaatcaccagcgagggggacagagagtgctggccacggccttattaaaaaggggcaggccctctaacttcaaaatgtttttaaataaagtagacaccactgaacaaggaatgtactgaaatgacttccttagggatagagctaagggataataacttgcactaaatacatttaaatacttgattccatgagtcagtttattgtagtttttgatttctgtaaaataagagaaacttttgtatttattattgaataagtgaatgaagctatttttaaataaagttagaagaaagccaagctgctgctgttacctgcagaactaacaaaccctgttactttgtacagatatgtaaatattttgagaaaaaatacagtataaaaatagttattgaccaaatgctaccaggctctgcagcagctcgggggcttataaaatgttcatagggatgttacaatataattttgtgttataaaatatgccattataattatgtaataaccaaaatttcaacctagagtgttgggggttttttggaaaccgcagtctattagtactcaatggttttatacaccttacttctgacagagcggggcgtatgctacgactacaacttttatagctgttttggtaatttaaactaattttttcatattatattgttgcatccctacttcttcagtcaggtttttttgtgcttacaatttgtgataactgtgaataactgcttaaaaatacacccaaatggaggctgaattttttcttcagcaaaagtagttttgattagaactttgtttcagccacagagaatcatgtaaacgtaataggatcatgtagcagaaacttaaatctaaccctttagccttctatttaacacaaaaatttgaaaaagttaaaaaaaaaaaggagatgtgattatgcttacagctgcaggactctggcaatagggtttttggaagatgtaattttaaaatgtgtttgtatgaactgtttgtttacatttctttaataaaaaaaacactgttttgtgtttgcttgtagaaacttaatcagcattttgaaccaggttagctttttattttgtacttaaaattctggtactgacacttcacaggctaagtataaaatgaagttttgtgtgcacaattcaagtggactgtaaactgttggtatattcagtgatgcagttctgaacttgtatatggcatgatgtatttttatcttacagaataaatcaattgtatatatttttctcttgataaatagctgtatgaaatttgtttcctgaatatttttcttctcttgtacaatatcctgacatcctaccagtatttgtcctaccgggtttttgttgttttctgttctgtataatagtatctaatgttggcaaaaattgaattttttgaagtatacagagtgttatgggttttggaatttgtggacacagatttagaagatcaccatttacaaataaaatattttacatct

SEQ ID NO: 150246 - DNA, 11186 bp, Homo sapiens
  Payload ID: 9665
  Gene Symbol: KMT2C
  Gene Name: lysine (K)-specific methyltransferase 2C
  ENST ID: ENST00000360104
  CDS Start-End: 1-7324
agagcgcttccttgtgcctcctcagcaaatacagggatctggagtttctccacagctaagaagatcagtatctgtagatatgcctaggcctttaaataactcacaaatgaataatccagttggacttcctcagcatttttcaccacagagcttgccagttcagcagcacaacatactgggccaagcatatattgaactgagacatagggctcctgacggaaggcaacggctgcctttcagtgctccacctggcagcgttgtagaggcatcttctaatctgagacatggaaacttcattccccggccagactttccgggccctagacacacagaccccatgcgacgacctccccagggtctacctaatcagctacctgtgcacccagatttggaacaagtgccaccatctcaacaagagcaaggtcattctgtccattcatcttctatggtcatgaggactctgaaccatccactaggtggtgaattttcagaagctcctttgtcaacatctgtaccgtctgaaacaacgtctgataatttacagataaccacccagccttctgatggtctagaggaaaaacttgattctgatgacccttctgtgaaggaactggatgttaaagaccttgagggggttgaagtcaaagacttagatgatgaagatcttgaaaacttaaatttagatacagaggatggcaaggtagttgaattggatactttagataatttggaaactaatgatcccaacctggatgacctcttaaggtcaggagagtttgatatcattgcatatacagatccagaacttgacatgggagataagaaaagcatgtttaatgaggaactagaccttccaattgatgataagttagataatcagtgtgtatctgttgaaccaaaaaaaaaggaacaagaaaacaaaactctggttctctctgataaacattcaccacagaaaaaatccactgttaccaatgaggtaaaaacggaagtactgtctccaaattctaaggtggaatccaaatgtgaaactgaaaaaaatgatgagaataaagataatgttgacactccttgctcacaggcttctgctcactcagacctaaatgatggagaaaagacttctttgcatccttgtgatccagatctatttgagaaaagaaccaatcgagaaactgctggccccagtgcaaatgtcattcaggcatccactcaactacctgctcaagatgtaataaactcttgtggcataactggatcaactccagttctctcaagtttacttgctaatgagaaatctgataattcagacattaggccatcggggtctccaccaccaccaactctgccggcctccccatccaatcatgtgtcaagtttgcctcctttcatagcaccgcctggccgtgttttggataatgccatgaattctaatgtgacagtagtctctagggtaaaccatgttttttctcagggtgtgcaggtaaacccagggctcattccaggtcaatcaacagttaaccacagtctggggacaggaaaacctgcaactcaaactgggcctcaaacaagtcagtctggtaccagtagcatgtctggaccccaacagctaatgattcctcaaacattagcacagcagaatagagagaggccccttcttctagaagaacagcctctacttctacaggatcttttggatcaagaaaggcaagaacagcagcagcaaagacagatgcaagccatgattcgtcagcgatcagaaccgttcttccctaatattgattttgatgcaattacagatcctataatgaaagccaaaatggtggcccttaaaggtataaataaagtgatggcacaaaacaatctgggcatgccaccaatggtgatgagcaggttcccttttatgggccaggtggtaactggaacacagaacagtgaaggacagaaccttggaccacaggccattcctcaggatggcagtataacacatcagatttctaggcctaatcctccaaattttggtccaggctttgtcaatgattcacagcgtaagcagtatgaagagtggctccaggagacccaacagctgcttcaaatgcagcagaagtatcttgaagaacaaattggtgctcacagaaaatctaagaaggccctttcagctaaacaacgtactgccaagaaagctgggcgtgaatttccagaggaagatgcagaacaactcaagcatgttactgaacagcaaagcatggttcagaaacagctagaacagattcgtaaacaacagaaagaacatgctgaattgattgaagattatcggatcaaacagcagcagcaatgtgcaatggccccacctaccatgatgcccagtgtccagccccagccacccctaattccaggtgccactccacccaccatgagccaacccacctttcccatggtgccacagcagcttcagcaccagcagcacacaacagttatttctggccatactagccctgttagaatgcccagtttacctggatggcaacccaacagtgctcctgcccacctgcccctcaatcctcctagaattcagcccccaattgcccagttaccaataaaaacttgtacaccagccccagggacagtctcaaatgcaaatccacagagtggaccaccacctcgggtagaatttgatgacaacaatccctttagtgaaagttttcaagaacgggaacgtaaggaacgtttacgagaacagcaagagagacaacggatccaactcatgcaggaggtagatagacaaagagctttgcagcagaggatggaaatggagcagcatggtatggtgggctctgagataagtagtagtaggacatctgtgtcccagattcccttctacagttccgacttaccttgtgattttatgcaacctctaggaccccttcagcagtctccacaacaccaacagcaaatggggcaggttttacagcagcagaatatacaacaaggatcaattaattcaccctccacccaaactttcatgcagactaatgagcgaaggcaggtaggccctccttcatttgttcctgattcaccatcaatccctgttggaagcccaaatttttcttctgtgaagcagggacatggaaatctttctgggaccagcttccagcagtccccagtgaggccttcttttacacctgctttaccagcagcacctccagtagctaatagcagtctcccatgtggccaagattctactataacccatggacacagttatccgggatcaacccaatcgctcattcagttgtattctgatataatcccagaggaaaaagggaaaaagaaaagaacaagaaagaagaaaagagatgatgatgcagaatccaccaaggctccatcaactccccattcagatataactgccccaccgactccaggcatctcagaaactacctctactcctgcagtgagcacacccagtgagcttcctcaacaagccgaccaagagtcggtggaaccagtcggcccatccactcccaatatggcagcaggccagctatgtacagaattagagaacaaactgcccaatagtgatttctcacaagcaactccaaatcaacagacgtatgcaaattcagaagtagacaagctctccatggaaacccctgccaaaacagaagagataaaactggaaaaggctgagacagagtcctgcccaggccaagaggagcctaaattggaggaacagaatggtagtaaggtagaaggaaacgctgtagcctgtcctgtctcctcagcacagagtcctccccattctgctggggcccctgctgccaaaggagactcagggaatgaacttctgaaacacttgttgaaaaataaaaagtcatcttctcttttgaatcaaaaacctgagggcagtatttgttcagaagatgactgtacaaaggataataaactagttgagaagcagaacccagctgaaggactgcaaactttgggggctcaaatgcaaggtggttttggatgtggcaaccagttgccaaaaacagatggaggaagtgaaaccaagaaacagcgaagcaaacggactcagaggacgggtgagaaagcagcacctcgctcaaagaaaaggaaaaaggacgaagaggagaaacaagctatgtactctagcactgacacgtttacccacttgaaacagcagctctctctgctccctctaatggaaccaatcattggagtgaactttgcgcactttcttccttatggcagtggccaatttaatagtgggaatcgacttctaggaacttttggcagtgctaccctggaaggggtttcggactactattctcagttgatctacaagcagaataatttaagtaatcctccaacaccccctgcctctcttcctcctacaccacctcctatggcttgtcagaagatggccaatggttttgcaacaactgaagaacttgctggaaaagccggagtgttagtgagccatgaagttaccaaaactctaggacctaaaccatttcagctgcccttcagaccccaggacgacttgttggcccgagctcttgctcagggccccaagacagttgatgtgccagcctccctcccaacaccacctcataacaatcaggaagaattaaggatacaggatcactgtggtgatcgagatactcctgacagttttgttccctcatcctctcctgagagtgtggttggggtagaagtgagcaggtatccagatctgtcattggtcaaggaggagcctccagaaccggtgccgtcccccatcattccaattcttcctagcactgctgggaaaagttcagaatcaagaaggaatgacatcaaaactgagccaggcactttatattttgcgtcaccttttggtccttccccaaatggtcccagatcaggtcttatatctgtagcaattactctgcatcctacagctgctgagaacattagcagtgttgtggctgcattttccgaccttcttcacgtccgaatccctaacagctatgaggttagcagtgctccagatgtcccatccatgggtttggtcagtagccacagaatcaacccgggtttggagtatcgacagcatttacttctccgtgggcctccgccaggatctgcaaaccctcccagattagtgagctcttaccggctgaagcagcctaatgtaccatttcctccaacaagcaatggtctttctggatataaggattctagtcatggtattgcagaaagcgcagcactcagaccacagtggtgttgtcattgtaaagtggttattcttggaagtggtgtgcggaaatctttcaaagatctgacccttttgaacaaggattcccgagaaagcaccaagagggtagagaaggacattgtcttctgtagtaataactgctttattctttattcatcaactgcacaagcgaaaaactcagaaaacaaggaatccattccttcattgccacaatcacctatgagagaaacgccttccaaagcatttcatcagtacagcaacaacatctccactttggatgtgcactgtctcccccagctcccagagaaagcttctccccctgcctcaccacccatcgccttccctcctgcttttgaagcagcccaagtcgaggccaagccagatgagctgaaggtgacagtcaagctgaagcctcggctaagagctgtccatggtgggtttgaagattgcaggccgctcaataaaaaatggagaggaatgaaatggaagaagtggagcattcatattgtaatccctaaggggacatttaaaccaccttgtgaggatgaaatagatgaatttctaaagaaattgggcacttcccttaaacctgatcctgtgcccaaagactatcggaaatgttgcttttgtcatgaagaaggtgatggattgacagatggaccagcaaggctactcaaccttgacttggatctgtgggtccacttgaactgcgctctgtggtccacggaggtctatgagactcaggctggtgccttaataaatgtggagctagctctgaggagaggcctacaaatgaaatgtgtcttctgtcacaagacgggtgccactagtggatgccacagatttcgatgcaccaacatttatcacttcacttgcgccattaaagcacaatgcatgttttttaaggacaaaactatgctttgccccatgcacaaaccaaagggaattcatgagcaagaattaagttactttgcagtcttcaggagggtctatgttcagcgtgatgaggtgcgacagattgctagcatcgtgcaacgaggagaacgggaccatacctttcgcgtgggtagcctcatcttccacacaattggtcagctgcttccacagcagatgcaagcattccattctcctaaagcactcttccctgtgggctatgaagccagccggctgtactggagcactcgctatgccaataggcgctgccgctacctgtgctccattgaggagaaggatgggcgcccagtgtttgtcatcaggattgtggaacaaggccatgaagacctggttctaagtgacatctcacctaaaggtgtctgggataagattttggagcctgtggcatgtgtgagaaaaaagtctgaaatgctccagcttttcccagcgtatttaaaaggagaggatctgtttggcctgaccgtctctgcagtggcacgcatagcggaatcacttcctggggttgaggcatgtgaaaattataccttccgatacggccgaaatcctctcatggaacttcctcttgccgttaaccccacaggttgtgcccgttctgaacctaaaatgagtgcccatgtcaagaggcctcacaccttaaacagcaccagcacctcaaagtcatttcagagcacagtcactggagaactgaacgcaccttatagtaaacagtttgttcactccaagtcatcgcagtaccggaagatgaaaactgaatggaaatccaatgtgtatctggcacggtctcggattcaggggctgggcctgtatgctgctcgagacattgagaaacacaccatggtcattgagtacatcgggactatcattcgaaacgaagtagccaacaggaaagagaagctttatgagtctcagaaccgtggtgtgtacatgttccgcatggataacgaccatgtgattgacgcgacgctcacaggagggcccgcaaggtatatcaaccattcgtgtgcacctaattgtgtggctgaagtggtgacttttgagagaggacacaaaattatcatcagctccagtcggagaatccagaaaggagaagaggtaagagtgtgagagattgcatctgccatgttgttcagatcctgggcgaatagttccctcctcacacaggtcacttactcacttgtttcccaattctttgttgtgataaaaactctgtccataataggccagatgttcccaccctgcagtatctcacccttcaggcactccagttcaccttcctccacatggcagctctgtgagcatttgctgtcacctctcccttcccttctgtgccacgggttcagcatccccatggcacccaggtggtatcatttctgtgtgccataggatccttctttatccccttaacctggacacagtttggcagtgtcccctctgaagagcatccccgtccttctccaagggggccgtggctcctgagatggcactgttgggctgtgggcggcaaatctgggccgccgtgctgctgaggattgtgtgctcacgctggcgatcagtgtgtgcttaaccaagtgcccacatcgccacattcttcagcagttcaggtgtgggttgttgtcttcaaaatgccgagtgccaagcttgctgtttgtctccgtgctctcagaggtgactctggtccggcggctcacccattgggattatttttggccttaattgctgcatttgcttcccaccttggtctttcccactgtgattcaggtaccttggttctggaattggcatttcctggaaagctgtcactgagcagcaggcttggtttctgtaggaaacgtcccgcatttggggagtgaggcacctgagtgacttgactttgttggtgctcctctcccttcgtgaacatagccatgggattcgtgggattctatctgtattttgggtctttgtggaatctcctttcttagtcaagaataaggatccgactagacccaaggcccgttatacatctcaaagtaacgtgtaaataagacagtgtgtgggagccctggcacagtgccagtaaccaatggctaccatggtggtcagaagagactcagcccagggccacctgcctccttcctacttgagtattcttgagtaaatagtttaatatgagcccctattttatcttctgcaagatagagaaaatgacttccttaccaggctcttggaaggactcagcagatacctgaaagaaagcagtggaatcattgccaagaacagctgctcaataaacactggtttccttcctttctgtgtagaaggtctttccagctagcgtctagaatcatttcactcagaagagacctagaaattcctgggcctccccttcattttgcagcatcggctctctctggggtggtgggggttgcagggccgcgcactgaggcttgtaccgtgggactcacgcagactcccacctaccttgattggtctgagatgttaatttggtgacctctaaatagaaagacatcctttcagtcttgagtgaggaaaaatgaaggagggaaaacagagttagctggcagttcatctcacccagaattgcatgccccattcagtaaatcaggggaggtgaaaggcttctgggttttagggagagggctaggaaagcagttgcccttccagtcccctccatccacttgcagggacagcattatgagaagtcacagaaatacagctttctctggtcaggctcccgttctcagatctcgctgtttaaaaatactgcctccctcatttcctctgtgcaagcacaatgcctcttttcagggttcccccagggtcccatggaacctcaataaatcaggtcttccttaatttacgtctgtttcgtttgctggttttaaaatgcaagggagatggaggcagaaacgctattgccttccttgctgtcctttcttaccctgtgtctttgccgtgggcagctctgctatgactataagtttgactttgaagatgaccagcacaagattccgtgtcactgtggagctgtgaactgccggaagtggatgaactgaaatgcattccttgctagctcagcgggcggcttgtccctaggaagaggcgattcaacacaccattggaattttgcagacagaaagagatttttgttttctgttttatgactttttgaaaaagcttctgggagttctgatttcctcagtcctttaggttaaagcagcgccaggaggaagctgacagaagcagcgttcctgaagtggccgaggttaaacggaatcacagaatggtccagcacttttgcttttttttcttttccttttcttttttttttgtttgttttttgttttgtttttcccttgtgggtgggtttcattgttttggttttctagtctcactaaggagaaacttttactggggcaaagagccgatggctgccctgccccgggcaggggccttcctatgaatgtaagactgaaatcaccagcgagggggacagagagtgctggccacggccttattaaaaaggggcaggccctctaacttcaaaatgtttttaaataaagtagacaccactgaacaaggaatgtactgaaatgacttccttagggatagagctaagggataataacttgcactaaatacatttaaatacttgattccatgagtcagtttattgtagtttttgatttctgtaaaataagagaaacttttgtatttattattgaataagtgaatgaagctatttttaaataaagttagaagaaagccaagctgctgctgttacctgcagaactaacaaaccctgttactttgtacagatatgtaaatattttgagaaaaaatacagtataaaaatagttattgaccaaatgctaccaggctctgcagcagctcgggggcttataaaatgttcatagggatgttacaatataattttgtgttataaaatatgccattataattatgtaataaccaaaatttcaacctagagtgttgggggttttttggaaaccgcagtctattagtactcaatggttttatacaccttacttctgacagagcggggcgtatgctacgactacaacttttatagctgttttggtaatttaaactaattttttcatattatattgttgcatccctacttcttcagtcaggtttttttgtgcttacaatttgtgataactgtgaataactgcttaaaaatacacccaaatggaggctgaattttttcttcagcaaaagtagttttgattagaactttgtttcagccacagagaatcatgtaaacgtaataggatcatgtagcagaaacttaaatctaaccctttagccttctatttaacacaaaaatttgaaaaagttaaaaaaaaaaaggagatgtgattatgcttacagctgcaggactctggcaatagggtttttggaagatgtaattttaaaatgtgtttgtatgaactgtttgtttacatttctttaataaaaaaaacactgttttgtgtttgcttgtagaaacttaatcagcattttgaaccaggttagctttttattttgtacttaaaattctggtactgacacttcacaggctaagtataaaatgaagttttgtgtgcacaattcaagtggactgtaaactgttggtatattcagtgatgcagttctgaacttgtatatggcatgatgtatttttatcttacagaataaatcaattgtatatatttttctcttgataaatagctgtatgaaatttgtttcctgaatatttttcttctcttgtacaatatcctgacatcctaccagtatttgtcctaccgggtttttgttgttttctgttctgtataatagtatctaatgttggcaaaaattgaattttttgaagtatacagagtgttatgggttttggaatttgtggacacagatttagaagatcaccatttacaaataaaatattttacatctataagag

SEQ ID NO: 150247 - DNA, 682 bp, Homo sapiens
  Payload ID: 9665
  Gene Symbol: KMT2C
  Gene Name: lysine (K)-specific methyltransferase 2C
  ENST ID: ENST00000418673
  CDS Start-End: 1-682
ttcctctgctggaaacatcatgccaacaacttacatctcagtcactccaaaaattggcatgggtaaaccagctattactaagagaaaattttctcctggtagacctcggtccaaacagggccgtgggtctggatttccaggaaagcggagacctcgaggtgcaggactgtcggggcgaggtggccgaggcaggtcaaagctgaaaagtggaatcggagctgttgtattacctggggtgtctactgcagatatttcatcaaataaggatgatgaagaaaactctatgcacaatacagttgtgttgttttctagcagtgacaagttcactttgaatcaggatatgtgtgtagtttgtggcagttttggccaaggagcagaaggaagattacttgcctgttctcagtgtggtcagtgttaccatccatactgtgtcagtattaagatcactaaagtggttcttagcaaaggttggaggtgtcttgagtgcactgtgtgtgaggcctgtgggaaggcaactgacccaggaagactcctgctgtgtgatgactgtgacataagttatcacacctactgcctagaccctccattgcagacagttcccaaaggaggctggaagtgcaaatggtgtgtttggtgcagacactgtggagcaacatctgcaggtctaagatgtgaatggcag

SEQ ID NO: 150248 - DNA, 710 bp, Homo sapiens
  Payload ID: 9665
  Gene Symbol: KMT2C
  Gene Name: lysine (K)-specific methyltransferase 2C
  ENST ID: ENST00000418061
  CDS Start-End: 1-710
acaaaggataataaactagttgagaagcagaacccagctgaaggactgcagaataatttaagtaatcctccaacaccccctgcctctcttcctcctacaccacctcctatggcttgtcagaagatggccaatggttttgcaacaactgaagaacttgctggaaaagccggagtgttagtgagccatgaagttaccaaaactctaggacctaaaccatttcagctgcccttcagaccccaggacgacttgttggcccgagctcttgctcagggccccaagacagttgatgtgccagcctccctcccaacaccacctcataacaatcaggaagaattaaggatacaggatcactgtggtgatcgagatactcctgacagttttgttccctcatcctctcctgagagtgtggttggggtagaagtgagcaggtatccagatctgtcattggtcaaggaggagcctccagaaccggtgccgtcccccatcattccaattcttcctagcactgctgggaaaagttcagaatcaagaaggaatgacatcaaaactgagccaggcactttatattttgcgtcaccttttggtccttccccaaatggtcccagatcaggtcttatatctgtagcaattactctgcatcctacagctgctgagaacattagcagtgttgtggctgcattttccgaccttcttcacgtccgaatccctaa

SEQ ID NO: 150249 - DNA, 479 bp, Homo sapiens
  Payload ID: 9665
  Gene Symbol: KMT2C
  Gene Name: lysine (K)-specific methyltransferase 2C
  ENST ID: ENST00000452749
  CDS Start-End: 14-479
cctggtgactaggatgtcgtcggaggaggacaagagcgtggagcagccgcagccgccgccaccaccccccgaggagcctggagccccggccccgagccccgcagccgcagacaaaagacctcggggccggcctcgcaaagatggcgcttcccctttccagagagccagaaagaaacctcgaagtagggggaaaactgcagtggaagatgaggacagcatggatgggctggagacaacagaaacagaaacgattgtggaaacagcagaaatcaaagaacaatctgcagaagaggatgctgaagcagaagtggataacagcaaacagctaattccaactcttcagcgatctgtgtctgaggaatcggcaaactccctggtctctgttggtgtagaagccaaaatcagtgaacagctctgcgctttttgttactgtggggaaaaaagttccttaggacaaggagacttaaaacaattcagaa

SEQ ID NO: 150250 - DNA, 5874 bp, Homo sapiens
  Payload ID: 9665
  Gene Symbol: KMT2C
  Gene Name: lysine (K)-specific methyltransferase 2C
  ENST ID: ENST00000424877
  CDS Start-End: 1-4575
ctcatgcaggaggtagatagacaaagagctttgcagcagaggatggaaatggagcagcatggtatggtgggctctgagataagtagtagtaggacatctgtgtcccagattcccttctacagttccgacttaccttgtgattttatgcaacctctaggaccccttcagcagtctccacaacaccaacagcaaatggggcaggttttacagcagcagaatatacaacaaggatcaattaattcaccctccacccaaactttcatgcagactaatgagcgaaggcaggtaggccctccttcatttgttcctgattcaccatcaatccctgttggaagcccaaatttttcttctgtgaagcagggacatggaaatctttctgggaccagcttccagcagtccccagtgaggccttcttttacacctgctttaccagcagcacctccagtagctaatagcagtctcccatgtggccaagattctactataacccatggacacagttatccgggatcaacccaatcgctcattcagttgtattctgatataatcccagaggaaaaagggaaaaagaaaagaacaagaaagaagaaaagagatgatgatgcagaatccaccaaggctccatcaactccccattcagatataactgccccaccgactccaggcatctcagaaactacctctactcctgcagtgagcacacccagtgagcttcctcaacaagccgaccaagagtcggtggaaccagtcggcccatccactcccaatatggcagcaggccagctatgtacagaattagagaacaaactgcccaatagtgatttctcacaagcaactccaaatcaacagacgtatgcaaattcagaagtagacaagctctccatggaaacccctgccaaaacagaagagataaaactggaaaaggctgagacagagtcctgcccaggccaagaggagcctaaattggaggaacagaatggtagtaaggtagaaggaaacgctgtagcctgtcctgtctcctcagcacagagtcctccccattctgctggggcccctgctgccaaaggagactcagggaatgaacttctgaaacacttgttgaaaaataaaaagtcatcttctcttttgaatcaaaaacctgagggcagtatttgttcagaagatgactgtacaaaggataataaactagttgagaagcagaacccagctgaaggactgcaaactttgggggctcaaatgcaaggtggttttggatgtggcaaccagttgccaaaaacagatggaggaagtgaaaccaagaaacagcgaagcaaacggactcagaggacgggtgagaaagcagcacctcgctcaaagaaaaggaaaaaggacgaagaggagaaacaagctatgtactctagcactgacacgtttacccacttgaaacagcagctctctctgctccctctaatggaaccaatcattggagtgaactttgcgcactttcttccttatggcagtggccaatttaatagtgggaatcgacttctaggaacttttggcagtgctaccctggaaggggtttcggactactattctcagttgatctacaagaagatggccaatggttttgcaacaactgaagaacttgctggaaaagccggagtgttagtgagccatgaagttaccaaaactctaggacctaaaccatttcagctgcccttcagaccccaggacgacttgttggcccgagctcttgctcagggccccaagacagttgatgtgccagcctccctcccaacaccacctcataacaatcaggaagaattaaggatacaggatcactgtggtgatcgagatactcctgacagttttgttccctcatcctctcctgagagtgtggttggggtagaagtgagcaggtatccagatctgtcattggtcaaggaggagcctccagaaccggtgccgtcccccatcattccaattcttcctagcactgctgggaaaagttcagaatcaagaaggaatgacatcaaaactgagccaggcactttatattttgcgtcaccttttggtccttccccaaatggtcccagatcaggtcttatatctgtagcaattactctgcatcctacagctgctgagaacattagcagtgttgtggctgcattttccgaccttcttcacgtccgaatccctaacagctatgaggttagcagtgctccagatgtcccatccatgggtttggtcagtagccacagaatcaacccgggtttggagtatcgacagcatttacttctccgtgggcctccgccaggatctgcaaaccctcccagattagtgagctcttaccggctgaagcagcctaatgtaccatttcctccaacaagcaatggtctttctggatataaggattctagtcatggtattgcagaaagcgcagcactcagaccacagtggtgttgtcattgtaaagtggttattcttggaagtggtgtgcggaaatctttcaaagatctgacccttttgaacaaggattcccgagaaagcaccaagagggtagagaaggacattgtcttctgtagtaataactgctttattctttattcatcaactgcacaagcgaaaaactcagaaaacaaggaatccattccttcattgccacaatcacctatgagagaaacgccttccaaagcatttcatcagtacagcaacaacatctccactttggatgtgcactgtctcccccagctcccagagaaagcttctccccctgcctcaccacccatcgccttccctcctgcttttgaagcagcccaagtcgaggccaagccagatgagctgaaggtgacagtcaagctgaagcctcggctaagagctgtccatggtgggtttgaagattgcaggccgctcaataaaaaatggagaggaatgaaatggaagaagtggagcattcatattgtaatccctaaggggacatttaaaccaccttgtgaggatgaaatagatgaatttctaaagaaattgggcacttcccttaaacctgatcctgtgcccaaagactatcggaaatgttgcttttgtcatgaagaaggtgatggattgacagatggaccagcaaggctactcaaccttgacttggatctgtgggtccacttgaactgcgctctgtggtccacggaggtctatgagactcaggctggtgccttaataaatgtggagctagctctgaggagaggcctacaaatgaaatgtgtcttctgtcacaagacgggtgccactagtggatgccacagatttcgatgcaccaacatttatcacttcacttgcgccattaaagcacaatgcatgttttttaaggacaaaactatgctttgccccatgcacaaaccaaagggaattcatgagcaagaattaagttactttgcagtcttcaggagggtctatgttcagcgtgatgaggtgcgacagattgctagcatcgtgcaacgaggagaacgggaccatacctttcgcgtgggtagcctcatcttccacacaattggtcagctgcttccacagcagatgcaagcattccattctcctaaagcactcttccctgtgggctatgaagccagccggctgtactggagcactcgctatgccaataggcgctgccgctacctgtgctccattgaggagaaggatgggcgcccagtgtttgtcatcaggattgtggaacaaggccatgaagacctggttctaagtgacatctcacctaaaggtgtctgggataagattttggagcctgtggcatgtgtgagaaaaaagtctgaaatgctccagcttttcccagcgtatttaaaaggagaggatctgtttggcctgaccgtctctgcagtggcacgcatagcggaatcacttcctggggttgaggcatgtgaaaattataccttccgatacggccgaaatcctctcatggaacttcctcttgccgttaaccccacaggttgtgcccgttctgaacctaaaatgagtgcccatgtcaagaggcctcacaccttaaacagcaccagcacctcaaagtcatttcagagcacagtcactggagaactgaacgcaccttatagtaaacagtttgttcactccaagtcatcgcagtaccggaagatgaaaactgaatggaaatccaatgtgtatctggcacggtctcggattcaggggctgggcctgtatgctgctcgagacattgagaaacacaccatggtcattgagtacatcgggactatcattcgaaacgaagtagccaacaggaaagagaagctttatgagtctcagaaccgtggtgtgtacatgttccgcatggataacgaccatgtgattgacgcgacgctcacaggagggcccgcaaggtatatcaaccattcgtgtgcacctaattgtgtggctgaagtggtgacttttgagagaggacacaaaattatcatcagctccagtcggagaatccagaaaggagaagagctctgctatgactataagtttgactttgaagatgaccagcacaagattccgtgtcactgtggagctgtgaactgccggaagtggatgaactgaaatgcattccttgctagctcagcgggcggcttgtccctaggaagaggcgattcaacacaccattggaattttgcagacagaaagagatttttgttttctgttttatgactttttgaaaaagcttctgggagttctgatttcctcagtcctttaggttaaagcagcgccaggaggaagctgacagaagcagcgttcctgaagtggccgaggttaaacggaatcacagaatggtccagcacttttgcttttttttcttttccttttcttttttttttgtttgttttttgttttgtttttcccttgtgggtgggtttcattgttttggttttctagtctcactaaggagaaacttttactggggcaaagagccgatggctgccctgccccgggcaggggccttcctatgaatgtaagactgaaatcaccagcgagggggacagagagtgctggccacggccttattaaaaaggggcaggccctctaacttcaaaatgtttttaaataaagtagacaccactgaacaaggaatgtactgaaatgacttccttagggatagagctaagggataataacttgcactaaatacatttaaatacttgattccatgagtcagtttattgtagtttttgatttctgtaaaataagagaaacttttgtatttattattgaataagtgaatgaagctatttttaaataaagttagaagaaagccaagctgctgctgttacctgcagaactaacaaaccctgttactttgtacagatatgtaaatattttgagaaaaaatacagtataaaaatagttattgaccaaatgctaccaggctctgcagcagctcgggggcttataaaatgttcatagggatgttacaatataattttgtgttataaaatatgccattataattatgtaataaccaaaatttcaacctagagtgttgggggttttttggaaaccgcagtctattagtactcaatggttttatacaccttacttctgacagagcggggcgtatgctacgactacaacttttatagctgttttggtaatttaaactaattttttcatattatattgttgcatccctacttcttcagtcaggtttttttgtgcttacaatttgtgataactgtgaataactgcttaaaaatacacccaaatggaggctgaattttttcttcagcaaaagtagttttgattagaactttgtttcagccacagagaatcatgtaaacgtaataggatcatgtagcagaaacttaaatctaaccctttagccttctatttaacacaaaaatt

SEQ ID NO: 150251 - DNA, 16862 bp, Homo sapiens; identical to SEQ ID NO: 150244
  Payload ID: 9665
  Gene Symbol: KMT2C
  Gene Name: lysine (K)-specific methyltransferase 2C
  ENST ID: ENST00000558084
  CDS Start-End: 220-2699

SEQ ID NO: 150252 - DNA, 538 bp, Homo sapiens
  Payload ID: 9665
  Gene Symbol: KMT2C
  Gene Name: lysine (K)-specific methyltransferase 2C
  ENST ID: ENST00000558665
  CDS Start-End: 1-538
gtgttttcacctgggtcctctaactcacgaccaccatctccaatggatccatatgcaaaaatgcggcagaagttacgtgaaatcattctccagcagcaacagcagaagaagattgcaggtcgacaggagaaggggtcacaggactcacccgcagtgcctcatccagggcctcttcaacactggcaaccagagaatgttaaccaggctttcaccagacccccacctccctatcctgggaacattaggtctcctgttgcccctcctttaggacctagatatgctgttttcccaaaagatcagcgtggaccctatcctcctgatgttgctagtatggggatgagacctcatggatttagatttggatttccaggaggtagtcatggtaccatgccgagtcaagagcgcttccttgtgcctcctcagcaaatacagggatctggagtttctccacagctaagaagatcagtatctgtagatatgcctaggcctttaaataactcacaaatgaataatccagttggacttcctcagcattttt

SEQ ID NO: 150253 - DNA, 19419 bp, Homo sapiens
  Payload ID: 9666
  Gene Symbol: KMT2D
  Gene Name: lysine (K)-specific methyltransferase 2D
  Uniprot ID: O14686
  ENST ID: ENST00000301067
  CDS Start-End: 1-16614
atggacagccagaagctggctggtgaggataaagattcagaaccggcagctgatggacctgcagcttctgaggacccaagtgccactgagtcagacctgcccaacccacatgtgggagaggtctctgtccttagttctgggagtcccaggcttcaggagactcctcaggactgcagtgggggtccggtgcggcgttgtgctctctgtaactgcggggagcccagtctacacgggcagcgggagctacggcgctttgagttgccatttgattggccccggtgtccagtggtgtcccctggggggagcccagggcccaatgaggcagtgctgcccagtgaggacctatcacagattggtttccctgagggccttacacctgcccacctaggagaacctggagggtcctgctgggctcaccattggtgtgctgcatggtcggcaggcgtatgggggcaggagggcccagaactatgtggtgtggacaaggccatcttctcagggatctcacagcgctgctcccactgcaccaggctcggtgcctccatcccttgccgctcacctggatgtccacggctttaccacttcccctgcgcgactgccagcggttccttcctatccatgaaaacactgcagctgctatgcccagagcacagtgagggggctgcatatctggaggaggctcgctgtgcagtgtgtgaggggccaggggagttgtgtgacctgttcttctgtaccagctgtgggcatcactatcacggggcctgcctggacactgctctgactgcccgcaaacgtgctggctggcagtgccctgaatgcaaagtgtgccaagcctgcaggaaacctgggaatgactctaagatgttggtttgtgagacgtgtgacaaaggataccatactttctgcctaaaaccacccatggaggaactgcctgctcactcttggaagtgcaaggcgtgccgggtgtgccgggcctgtggggcgggctcagcagaactgaatcccaactcggagtggtttgagaactactctctctgtcaccgctgtcacaaagcccagggaggtcagactatccgctccgttgctgagcagcataccccggtgtgtagcagattttcacccccagagcctggcgatacccccactgacgagcccgatgctctgtacgttgcatgccaagggcagccaaagggtgggcacgtgacctctatgcaacccaaggaaccagggcccctgcaatgtgaagccaaaccactagggaaagcaggggtccaacttgagccccagttggaggcccccctaaacgaggagatgccactgctgcccccacctgaggagtcacccctgtccccaccacctgaggaatcacccacgtccccaccacctgaggcatcacgcctgtcaccaccacctgaggaattgcccgcatccccacttcctgaggcattgcacctgtcccggccgctggaggaatcgcccctctctccgccgcctgaggagtctcctctgtctcccccacctgaatcatcacctttttctccactggaggagtcgcccttgtctccaccggaagagtcacccccatctcctgcacttgagacgcctctatccccaccacctgaagcatcgcccctgtccccaccatttgaagaatctcctttgtccccgccacctgaggaattgcccacttccccgccacctgaagcatctcgcctgtctccaccacctgaggagtcacccatgtcccctccacctgaagagtcacccatgtctccaccaccggaggcatctcgtctgttcccaccatttgaagagtctcctctgtcccctccacctgaggagtctcccctttccccaccacctgaggcatcacgcctgtccccaccacctgaggactcgcctatgtccccaccacctgaagaatcacctatgtcccccccacctgaggtatcgcgcctatcccccctgcctgtggtgtcacgcctgtctccaccgcctgaggaatctcccttgtccccaccgcctgaggagtctcccacgtcccctccacctgaggcttcacgcctctccccaccacctgaggactcccccacatccccaccacctgaggactcacctgcttccccaccaccggaggactcgctcatgtccctgccgctggaggagtcacccctgttgccactacctgaggagccgcaactctgcccccggtccgaggggccgcacctgtcaccccggcctgaggagccgcacctgtccccccggcctgaggagccacacctatctccgcaggctgaggagccacacctgtccccccagcctgaggagccatgcctatgcgctgtgcctgaggagccacacttgtccccccaggctgagggaccacatctgtcccctcagcctgaggaattgcacctgtccccccagactgaggagccgcacctgtctcctgtgcctgaggagccatgcttgtccccccaacctgaggaatcacacctgtccccccagtctgaggagccatgcctgtccccccggcctgaggaatcgcatctgtcccctgagcttgagaagccacccctgtcccctcggcctgaaaagccccctgaggagccaggccaatgccctgcacctgaggagctgcccttgttccctccccctggggaaccatccttatctcccttgcttggagagccagccctgtctgagcctggggaaccacctctgtcccctctgcccgaggagctgccgttgtccccatctggggagccatccttgtcgcctcagctgatgccaccagatccccttcctcctccactctcacccatcatcacagctgcggccccaccggccctgtctcctttgggggagttagagtacccctttggtgccaaaggggacagtgaccctgagtcaccgttggctgcccccatcctggagacacccatcagccctccaccagaagctaactgcactgaccctgagcctgtcccccctatgatccttcccccatctccaggctccccagtggggccggcttctcccatcctgatggagccccttcctcctcagtgttcgccactccttcagcattccctggttccccaaaactcccctccttcccagtgctctcctcctgccctaccactgtccgttccctccccgttgagtcccatagggaaggtagtgggggtctcagatgaggctgagctgcacgagatggagactgagaaagtttcagaacctgaatgcccagccttggaacccagtgccaccagtcctctcccttccccaatgggggacctttcctgccccgcccccagccctgccccagccctggatgacttctctggcctaggggaagacacagcccctctggatgggattgatgctccgggttcacagccagagcctggacagacccctggcagtttggctagtgaacttaaaggctcccctgtgctcctggaccccgaggagctggcccctgtgacccctatggaggtctaccccgaatgcaagcagacagcagggcagggctcaccatgtgaagaacaggaagagccacgtgcaccggtggcccccacaccacccactctcatcaaatccgacatcgttaacgagatctctaatctgagccagggtgatgccagtgccagttttcctggctcagagcccctcctgggctctccagacccggaggggggtggctccctgtccatggagttgggggtctctacggatgttagtccagcccgagatgagggctccctacggctctgtactgactcactgccagagactgatgactcactattgtgcgatgctgggacagctatcagcggaggcaaagctgagggggagaaggggcggcggcgcagctccccagcccgttcccgcatcaaacagggtcgcagcagcagtttcccaggaagacgccggcctcgtggaggagcccatggaggacgtggtagaggacgggcccggctaaagtcaactgcttcttccattgagactctggtagttgctgacattgatagctctcccagtaaggaggaggaggaagaagatgatgacaccatgcagaataccgtggttctcttctccaacacagacaaatttgtcctaatgcaggacatgtgtgtggtatgtggcagctttggccggggggcagagggccacctccttgcctgttcgcagtgctctcagtgctatcacccttactgtgtcaacagcaagatcaccaaggtgatgctgctcaagggctggcgttgtgtggagtgtattgtgtgtgaggtgtgtggccaggcctccgacccctcacgcctgctgctctgtgatgactgtgatattagctaccacacatactgcctggaccccccactgctcaccgtccccaagggcggctggaagtgcaagtggtgtgtgtcctgtatgcagtgtggggctgcttcccctggcttccactgtgaatggcagaatagttacacacactgtgggccctgtgccagcctggtgacctgccctatctgtcatgctccttacgtagaagaggacctactaatccagtgccgccactgtgaacggtggatgcatgcaggctgtgagagcctcttcacagaggacgatgtggagcaggcagccgatgaaggctttgactgtgtctcctgccagccctacgtggtaaagcctgtggcgcctgttgcacctccagagctggtgcccatgaaggtgaaagagccagagccccagtactttcgcttcgaaggtgtgtggctgacagaaactggcatggccttgctgcgtaacctgaccatgtcaccactgcacaagcggcgccaacggcgaggacggcttggcctcccaggcgaggcaggattggagggttctgagccctcagatgcccttggccctgatgacaagaaggatggggacctggacaccgatgagctgctcaagggtgaaggtggtgtggagcacatggagtgcgaaattaaactggagggccccgtcagccctgatgtggagcctggcaaagaggagaccgaggaaagcaaaaaacgcaagcgtaaaccatatcggcctggcattggtggtttcatggtgcgacagcggaaatcccacacacgcacgaaaaaggggcctgctgcacaggcggaggtgttgagtggggatgggcagcccgacgaggtgatacctgctgacctgcctgcagagggcgccgtggagcagagcttagctgaaggggatgagaagaagaagcaacagcggcgagggcgcaagaagagcaaactggaggacatgttccctgcttacttgcaggaagccttctttgggaaggagctgctggacctgagccgtaaggccctttttgcagttggggtgggccggccaagctttggactagggaccccaaaagccaagggagatggaggctcagaaaggaaggaactccccacatcgcagaaaggagatgatggtccagatattgcagatgaagaatcccgtggcctcgagggcaaagccgatacaccaggacctgaggatgggggcgtgaaggcatccccagtgcccagtgaccctgagaagccaggcaccccaggtgaagggatgcttagctctgacttagacaggatttccacagaagaactgcccaagatggaatccaaggacctgcagcagctcttcaaggatgttctgggctctgaacgagaacagcatctgggttgtggaacccctggcctagaaggcagccgtacgccactgcagaggccctttcttcaaggtggactccctttgggcaatctgccctccagcagcccaatggactcctacccaggcctctgccagtccccgttcctggattctagggagcgcgggggcttctttagcccggaacccggtgagcccgacagcccctggacgggctcaggtggcaccacgccctccacccccacaacccccaccacggagggtgagggcgacggactctcctataaccagcggagtcttcagcgctgggagaaggatgaggagttgggccagctgtccaccatctcacctgtgctctatgccaacattaattttcctaatctcaagcaagactacccagactggtcaagccgttgcaaacaaatcatgaagctctggagaaaggttccagcagctgacaaagccccctacctgcaaaaggccaaagataaccgggcagctcaccgcatcaacaaggtgcagaagcaggctgagagccagatcaacaagcagaccaaggtgggcgacatagcccgtaagactgaccgaccggccctacatctccgcattcccccgcagccaggggcactgggcagcccgccccccgctgctgcccccaccattttcattggcagccccactacccccgccggcttgtctacctctgcggacgggttcctgaagccgccggcgggctcggtgcctggccctgactcgcctggtgagctcttcctcaagctcccaccccaggtgcccgcccaagtgccttcgcaggacccctttggactggcccctgcctatcccctggagccccgcttccccacggcaccgcccacctatcccccctatcctagtcctacgggggcccctgcgcagcccccgatgctgggcgcctcatctcgtcctggggctggccagccaggggaattccacactaccccacctggcacccccagacaccagccctccacacctgacccattcctcaaaccccgctgcccctcgctggataacttggctgtgcctgagagccctggggtagggggaggcaaagcttccgagcccctgctctcgcccccaccttttggggagtcccggaaggccctagaggtgaagaaggaagagcttggggcatcctctcctagctatgggcccccaaacctgggctttgttgactcaccctcctcaggcacccacctgggtggcctggagttaaagacacctgatgtcttcaaagcccccctgacccctcgggcatctcaggtagagccccagagcccgggcttgggcctaaggccccaggagccaccccctgcccaggctttggcaccttctcctccaagtcacccagacatctttcgccctggctcctacactgacccatatgctcagcccccattgactcctcggccccaacctccgccccctgagagctgctgtgctctgccccctcgctcactgccctccgaccctttctcccgagtgcctgccagtcctcagtcccagtccagctcccagtctccactgacaccccggcctctgtctgctgaagctttttgcccatcacccgttacccctcgcttccagtcccctgacccttattctcgcccaccctcacgccctcagtcccgtgacccatttgccccattgcataagccaccccgaccccagccccctgaagttgcctttaaggctgggtctctagcccacacttcgctgggggctggggggttcccagcagccctgcccgcggggccagcaggtgagctccatgccaaggtcccaagtgggcagccccccaattttgtccggtcccctgggacgggtgcatttgtgggcaccccctctcccatgcgtttcactttccctcaggcagtaggggagccttccctaaagccccctgtccctcagcctggtctcccgccaccccatgggatcaacagccattttgggcccggccccaccttgggcaagcctcaaagcacaaactacacagtagccacagggaacttccacccatcgggcagccccctggggcccagcagcgggtccacaggggagagctatgggctgtccccactacgccctccgtcggttctgccaccacctgcacccgacggatccctcccctacctgtcccatggagcctcacagcgatcaggcatcacctctcctgtcgaaaagcgagaagacccagggactggaatgggtagctctttggcgacagctgaactcccaggtacccaggacccaggcatgtccggccttagccaaacagagctggagaagcaacggcagcgccagcgactacgagagctgctgattcggcagcagatccagcgcaacaccctgcggcaggagaaggaaacagctgcagcagctgcaggagcagtggggcctccaggcagctggggtgctgagcccagcagccctgcctttgagcagctgagtcgaggccagaccccctttgctgggacacaggacaagagcagccttgtggggttgcccccaagcaagctgagtggccccatcctggggccagggtccttccctagcgatgaccgactctcccggccacctccaccagccacgccttcctctatggatgtgaacagccggcaactggtaggaggctcccaagctttctatcagcgagcaccctatcctgggtccctgcccttacagcagcaacagcaacaactgtggcagcaacaacaggcaacagcagcaacctccatgcgatttgccatgtcagctcgctttccatcaactcctggacctgaacttggccgccaagccctaggttccccgttggcgggaatttccacccgtctgccaggccctggtgagccagtgcctggtccagctggtcctgcccagttcattgagctgcggcacaatgtacagaaaggactgggacctgggggcactccgtttcctggtcagggcccacctcagagaccccgtttttaccctgtaagtgaggacccccaccgactggctcctgaagggcttcggggcctggcggtatcaggtcttcccccacagaaaccctcagccccaccggcccctgaattgaacaacagtcttcatccaacaccccacaccaagggtcctaccctgccaactggtttggagctggtcaaccggcccccgtcgagcactgagcttggccgccccaatcctctggccctggaagctgggaagttgccctgtgaggatcccgagctggatgacgattttgatgcccacaaggccctagaggatgatgaagagcttgctcacctgggtctgggtgtggatgtggccaagggtgatgatgaacttggcaccttagaaaacctggagaccaatgacccccacttggatgacctgctcaatggagacgagtttgacctgctggcatatactgatcctgagctggacactggggacaagaaggatatcttcaatgagcacctgaggctggtagaatcggctaatgagaaggctgaacgggaggccctgctgcggggggtggagccaggacccttgggccctgaggagcgccctccccctgctgctgatgcctctgaaccccgcctggcatctgtgctccctgaggtgaagcccaaggtggaggagggtggacgccacccttctccttgccaattcaccattgctacccccaaggtagagcccgcacctgctgccaattcccttggcctggggctaaagccaggacagagcatgatgggcagccgggatacccggatgggcacagggccattttctagcagtgggcacacagctgagaaggcctcctttggggccacgggaggaccaccagctcacctgctgacccccagcccactgagtggcccaggaggatcctccctgctggaaaagtttgagctcgagagtggggctttgaccttgcctggtggacctgcagcatctggggatgagctagacaagatggagagctcactggtagccagcgagttacccctgctcattgaggacctgttggagcatgagaagaaggagctgcagaagaagcagcagctttcagcacagttgcagcctgcccagcagcagcagcaacagcagcagcagcattccctactgtctgcaccaggccctgcccaggccatgtctttgccacatgagggctcttctcccagtttggctgggtcccaacagcagctttccctgggtcttgcaggtgcccgacagccaggtttgccccagccactgatgcccacccagccaccagctcatgccctccagcaacgcctggctccatccatggctatggtgtccaatcaagggcatatgctaagtgggcagcatggagggcaggcaggcttggtaccccagcagagctcacagccagtgctatcacagaagcccatgggcaccatgccaccttccatgtgcatgaagccgcagcaattggcaatgcagcagcagctggcaaacagcttcttcccagatacagacctggacaaatttgctgcagaagatatcattgatcccattgcaaaggccaagatggtggctttgaaaggcatcaagaaagtgatggctcagggcagcattggggtggcacctggtatgaacagacagcaagtgtctctgctagcccagaggctctcggggggacctagcagtgatctgcagaaccatgtggcagctgggagtggccaggagcggagtgctggtgatccctcccagcctcgtcccaacccgcccacttttgctcagggagtgatcaatgaagctgaccagcggcagtatgaggagtggctgttccatacccagcagctcctacagatgcagctgaaggtgctagaggagcagattggtgtacaccgcaagtcccggaaggctctgtgtgccaagcagcgcactgccaaaaaagctggccgtgagttcccagaagctgatgctgagaagctcaagctggttacagagcagcagagcaagatccagaaacaactggatcaggtccggaaacagcagaaggagcacactaatctcatggcagaatatcggaacaagcagcagcaacaacagcagcagcagcagcaacaacagcaacagcactcagctgtgctggctctcagcccttcccagagtccccggctgctcaccaagctccctggtcagctgctccctggccatgggctgcagccaccacaggggcctccgggtgggcaagccggaggtcttcgcctgacccctgggggtatggcactacctggacagcctggtggccccttccttaatacagctctggcccaacagcagcaacagcaacattctggtggggctggatccctggctggcccttcagggggcttcttccctggcaaccttgctcttcgaagcctcggacctgattcaaggcttttacaggaaaggcagctgcagctgcagcagcaacgtatgcagctggcccagaaactgcagcagcagcagcagcagcaacagcagcagcagcaccttctaggacaggtggcaatccagcagcaacagcagcagggtcctggagtacagacaaaccaagctctgggtcccaagccccagggccttatgcctcccagcagccaccaaggcctcctggtccagcagctgtcccctcaaccaccccaggggccccagggcatgctgggccctgcccaggtggctgtgttgcagcagcagcaccctggagctttgggcccccagggccctcacagacaggtgcttatgacccagtcccgggtgctcagttccccccagctggcacagcagggtcagggccttatgggacacaggctggtcacagcccagcagcagcagcagcaacaacagcaccaacagcaagggtccatggcagggctgtcccatcttcagcagagtctgatgtcacacagtgggcagcccaaactgagcgctcagcccatgggctctttacagcagcttcagcagcagcagcagctgcaacagcaacagcaacttcagcagcagcagcagcagcagctacaacagcaacagcaacttcagcagcaacagcttcaacagcagcaacagcagcagcagcttcaacaacagcagcagcaacagcttcaacagcagcaacagcagctacaacagcaacagcaacaacaacagcagcagtttcaacagcagcagcaacagcagcagatgggccttttaaaccagagtcgaactttactgtctcctcagcaacaacagcagcagcaagtggcacttggccctggcatgccagcaaagcctcttcaacacttttctagccctggagccctgggtccaaccctcctcctgacgggcaaggaacaaaacaccgtagacccagccgtttcttcagaggccactgaggggccctctacacatcagggagggccgttagcaataggaactacccctgagtcaatggccactgaaccaggagaggtaaagccctcactctctggggactcacaactcctgcttgtccaaccccagccccagcctcagcccagctctctgcagctgcagccacctctgaggcttccaggacaacagcagcagcaagttagcctgctccacacagcaggtggaggaagccatgggcagctaggcagtggatcatcttctgaggcctcatctgtgccccacctgctggctcagccctctgtttccttaggggatcagcctgggtccatgacccagaaccttctgggcccccaacagcccatgctagagcggcccatgcaaaataatacagggccacaacctcccaaaccaggacctgtcctccagtctgggcagggtctgcctggggttggaatcatgcctacggtgggtcagcttcgagcacagctccaaggagtcctggccaaaaacccacagctgcggcacttaagtcctcagcagcagcagcagctacaggcactcctcatgcagcggcagctgcagcagagtcaggcagtacgccagaccccaccctaccaggagcctgggacccagacctctcccctccagggcctcctgggctgccaacctcaacttgggggcttccctggaccacagacaggccccctccaggagctaggggcagggcctcgacctcagggcccaccccggctccctgccccaccaggagccttatctacaggaccagtccttggccctgtccatcccacacctccaccatccagccctcaagagccaaagagaccttcacaattaccttcccccagctcccagcttcccactgaggcccagctccctcccacccatccagggacccccaaacctcaggggccaaccttggagccgcctcctgggagggtctcacctgctgctgcccagcttgcagataccttgtttagcaagggtctgggaccttgggatcccccagacaacctagcagaaacccagaagccagagcagagcagcctggtacctgggcatctggaccaggtgaatggacaggtggtgcctgaggcatcccaactcagcatcaagcaggaacctcgggaagagccatgtgccctgggagcccagtcagtgaagagggaggccaatggggagccaataggggcaccaggaaccagcaaccacctcctgctggcaggccctcgctcagaagctgggcatctgctcttgcagaagctactccgggcaaagaatgtgcaactcagcactgggcgggggtccgaggggctgcgagctgagatcaacgggcacattgacagcaagctggctgggctggagcagaaactacagggtacccccagcaacaaggaggatgcagcagcaaggaagcctttgacaccgaagcccaagcgggtacagaaggcaagcgacaggttggtgagctcccgaaagaagctgcggaaggaggacggggtcagggccagcgaggccttgctgaaacagctgaaacaggagctgtccctgctgcccctaacggagcctgctatcaccgccaattttagcctctttgccccctttggcagtggctgcccagtcaatgggcagagccagctgaggggggcctttggaagtggggcgctgcccactggccctgactactattcccagctgcttaccaagaataacctgagtaacccgccgacaccaccctcgtcgctgccccccaccccacccccatcggtgcagcagaagatggtgaatggcgtcaccccatctgaagagctgggggagcaccccaaggatgctgcctctgcccgggatagtgaaagggcactgagggatacttcagaggtgaagagtctagacctgctggctgccttgcctacaccccctcacaatcagactgaggatgtcaggatggagagtgatgaggatagcgattctcctgacagcattgtgccagcttcatcccctgagagcatcttgggggaggaggcccctcgtttccctcatctgggctcaggccggtgggagcaagaggaccgggccctctcccctgtcatccccctcattcctcgggccagcatcccagtcttcccagataccaaaccttatggggcccttggcctggaggtccctggaaagctgcctgtcacaacttgggaaaagggcaaaggaagtgaggtgtcagtcatgctcacagtctctgctgctgcagccaagaacctgaatggcgtgatggtggcagtggcggagctgctgagcatgaagatccccaactcctatgaggtgctgttcccagagagccccgcccgggcaggcactgagccaaagaagggggaagctgagggtcctggtgggaaggaaaagggtctggaaggcaagagcccagacactggccctgattggctgaagcagtttgatgcagtgttgcctggctataccctgaagagccaactagacatcttgagcctcctgaaacaggagagccccgccccagagccacccactcagcacagctatacctacaatgtctccaatctggatgtgcgacagctctcggccccacctcctgaagaaccctccccgcccccttcccccttggcaccttctcctgccagtccccctactgagcccttggttgaacttcccaccgaacccttggctgagccacccgtcccctcacctctgccactggcctcatcccctgaatcagcccgacccaagccccgtgcccggccccctgaagaaggtgaagattcccgtcctcctcgcctcaagaaatggaaaggagtgcgctggaagcggcttcggctgctgctgaccatccagaagggcagtgggcggcaggaggatgagcgggaagtggcagagtttatggagcagcttggcacagccttgcgacctgacaaggtaccgcgagacatgcgtcgctgctgtttctgtcatgaggagggtgacggggccactgatgggcctgcccgtctgctgaacctggacctggacctgtgggtgcacctcaactgtgccctttggtccacggaggtgtatgagacccagggcggggcactgatgaatgtggaggttgccctgcaccgaggactgctaaccaagtgctccctgtgccagcgaactggtgccaccagcagctgcaatcgcatgcgttgccccaatgtctaccattttgcttgtgccatccgtgccaagtgcatgttcttcaaggacaagaccatgctgtgtccaatgcataagatcaaggggccctgtgagcaagagctgagctcttttgctgtcttccggcgggtctacattgagcgggacgaggtgaagcaaatcgctagcatcattcagcggggagaacggctgcacatgttccgtgtggggggccttgtgttccacgccatcggacagctgctgcctcaccagatggctgactttcatagtgccactgccctctatcccgtgggctacgaggccacgcgcatctattggagcctccgcaccaacaatcgtcgctgctgctatcgctgttctattggtgagaacaacgggcggccggagtttgtaatcaaagtcatcgagcagggcctggaggacctggtcttcactgacgcctctccccaggccgtgtggaatcgcatcattgagcctgtggctgccatgagaaaagaggctgacatgctgcgactcttccctgagtatctgaagggcgaggagctctttgggctgacggtgcatgccgtgcttcgcatagctgaatcactgcccggggtggagagctgtcaaaactatttattccgctatgggcgccacccccttatggagctgccactcatgatcaaccccactggctgtgcccgatcagagcctaaaatcctcacacactacaaacggccccataccctgaacagcaccagcatgtctaaggcatatcagagcaccttcacaggcgagaccaacaccccctacagcaagcagtttgtgcactccaagtcatctcagtaccggcggctgcgcaccgaatggaagaacaacgtgtacctggctcgctcccgtatccagggcctggggctctatgcagccaaggacctagaaaagcacacaatggttatcgagtacattggcaccatcattcggaacgaggtggccaaccggcgggagaaaatctacgaagagcagaatcgaggcatctacatgttccgaataaacaatgaacatgtgattgatgctacgttgaccggcggccctgccaggtacattaaccattcctgtgcccctaactgtgtggccgaagtcgtgacatttgacaaagaggacaaaatcatcatcatctccagccggcgaatccccaaaggagaggagctaacctatgactatcagtttgattttgaggacgatcagcacaagatcccctgccactgtggagcctggaattgtcggaaatggatgaactaagaagctttgaggctaccaggcaggggagtccccctacccacaacctcttccctgaaagggatgagggggaagagaggtagcagccagagccaggacccagggttggggctgccggctgacccggagcccctggagcaggaggctggggcagagggccctaggccaagcccaccctgggcaccagggacaatcctcttccccaccaccggccctcaggctggcatctctgcccccagctccaggaggggccagacagaagcagccattgggcatctcaggtttgagggggatatgggccgggaactacccagaagcatctgggaggcagcagggtgggggaagaggatgtgtggccgggcctcacagccctgctgctcccactgacctctccggcccaactcacggctgcaaagagacttgactaagcttgacaatcccaaaggccgggtcccacacctggccctgcctgccgggtcctgcccccaccctcacccccatccccctccctcttgatctgtctctgtttccctcttttcctctgtgtttctgtctctctatgggttgtgtttccttgttttccactctgacaaatgcaacatgaacgggaaagaggcgcccagctgcctaggagggcaagctgggcaagccgggcaaggagaccccgcacccacacctacctcatttaagtgttggattttttgctgttttgaaatgtgagaccctctccaagccccctactgccccaaccctctcccccacctcactgccctcttctgagtgggtggaaggggggtaggaggaggaagaaaaacaacaacaaaaaatccatctttgtttttaattatgggcatgggatggtggttgaggcaaatgatgatgaagattggggatgactggcccctagttgctctaggacttccttctccatctggacatgggggcaggagggagctaaacctaggaccaggatatctccctcctgttttcccaacctcatcatgagcctgtttgccctccagcccctggacgggttgggtggggggtagggtgagggctatccctgagtggcatgcccatacctagtgaggcagggtgtggcccggagctcccactttccctcagtcaccaaactgctgctggtctggtgggaaggggtggtgatgtgggggtgggggagcttagtgtcagcgcggggagggtggggggtatttatctatttatacatgggattgtacatagtcttgtggggcatgggggagccggctggaggtgagaaccctcccctctccccccaccccccggggagagcaaatgtaaaactactaatttttgtgctttatatattctatataaatatatctattttctttttacaaaaccagtttataaatggtaggggggtgtggggcggacacatggagctccccttgtgggggggccccctccattacccgacctaccgcccttttcctcaccccccaccccactccccaccccctggctgtgactgctgtaagatgggggtatagaggctgggcaattcccaccccctgttgtatagttggactatgttataacgcacaaaagagagctgaccccagggggagccagagggtgatgggttccttgcctccctttccttcccctttctgcccaagcttgtgctgcagttgaacctcttcctgggggtgggagtaggtaaggggtgggtgaggccccaaacccctctctggtagggaaccgtggggatgaagatgaagcttatatgcagttctcttctaggggctgtgggcaaagggcattttgtaattaatattttcaagaatcagatgtctggagtgtaggggtgggcttggtggtggtggacgggcgggcctgctggagggggagcttggtcgctgttgtgattttaggtttgtttttgttttgttttgaatttggggggttgtggattgttgggggtagggagattttttttttttaaagctgcttcctcaactgtttcaagctgcaaatgtttaagagaataacagcccccactcccacaggaaccgctgtaattaaatcagacagtaggaagactgggctgctgccctcaaagccacagcccttggatgttccttttccgagagcagaaggtctaggctacagggagggggagattggctcccgtgagtcaggctgtgtttggggcttgggccctgggattgggaaaaggggatggggcagactttgtaagcatatgctaggtatccgatagtcctgtagaatttagtgaagaaaccttatacagtttttaatttttatataaactataactcagacccaagctacaaggttggaattttggttggttttttttttaagtaccctgcctgtataattgcatcagaatcccccaccccaccccccgcccccgtgtttgtattttgggttggtttacactcgcacatactcagttttcagttttcccctttacagtcttctcccctcacctccaggaccctccccctttttaaaaaataaatcgctgacaagtgtgaatcccgtgaagactttattttgtgttgtgtgtatcctgtacagcaaggttggtccttcgtaacaacggatgaaatggttcccttttttaaagcgccctctctccctccaccctcagcgcccctgtccttggcatgttttgtatcagcgatcattctgaactgtacatatttatgttgcgagaggcaaagggcaagttttggattttgcttcttccaagtttgtttttaaacgacaaataaaaaaagaacattttaaatacaa

SEQ ID NO: 150254 - DNA, 859 bp, Homo sapiens
  Payload ID: 9666
  Gene Symbol: KMT2D
  Gene Name: lysine (K)-specific methyltransferase 2D
  ENST ID: ENST00000526209
  CDS Start-End: 1-657
actggctgtgcccgatcagagcctaaaatcctcacacactacaaacgcgttttcacatccattatctcatttgatcctcacaacaaccttatgaggccccataccctgaacagcaccagcatgtctaaggcatatcagagcaccttcacaggcgagaccaacaccccctacagcaagcagtttgtgcactccaagtcatctcagtaccggcggctgcgcaccgaatggaagaacaacgtgtacctggctcgctcccgtatccagggcctggggctctatgcagccaaggacctagaaaagcacacaatggttatcgagtacattggcaccatcattcggaacgaggtggccaaccggcgggagaaaatctacgaagagcagaatcgaggcatctacatgttccgaataaacaatgaacatgtgattgatgctacgttgaccggcggccctgccaggtacattaaccattcctgtgcccctaactgtgtggccgaagtcgtgacatttgacaaagaggacaaaatcatcatcatctccagccggcgaatccccaaaggagaggagctaacctatgactatcagtttgattttgaggacgatcagcacaagatcccctgccactgtggagcctggaattgtcggaaatggatgaactaagaagctttgaggctaccaggcaggggagtccccctacccacaacctcttccctgaaagggatgagggggaagagaggtagcagccagagccaggacccagggttggggctgccggctgacccggagcccctggagcaggaggctggggcagagggccctaggccaagcccaccctgggcaccagggacaatcctcttcccca

SEQ ID NO: 150255 - DNA, 636 bp, Homo sapiens
  Payload ID: 9666
  Gene Symbol: KMT2D
  Gene Name: lysine (K)-specific methyltransferase 2D
  ENST ID: ENST00000547610
  CDS Start-End: 200-636
ggggggagggtggccactccgacctggatttaccgttcttggcccccctaagcccccccgtgcggggggcggctgtgatcgctctggcggttggaggtcggggagcggcccgggctctggccatgttctcggatgaggatttctggatcgccctgtgaagaggtctccccgagagggccctgcccagtcggagagagggatggacagccagaagctggctggtgaggataaagattcagaaccggcagctgatggacctgcagcttctgaggacccaagtgccactgagtcagacctgcccaacccacatgtgggagaggtctctgtccttagttctgggagtcccaggcttcaggagactcctcaggactgcagtgggggtccggtgcggcgttgtgctctctgtaactgcggggagcccagtctacacgggcagcgggagctacggcgctttgagttgccatttgattggccccggtgtccagtggtgtcccctggggggagcccagggcccaatgaggcagtgctgcccagtgaggacctatcacagattggtttccctgagggccttacacctgcccacctaggagaacctggagggtcctgctgggctcaccattggtgtgctgcatggtc

SEQ ID NO: 150256 - DNA, 6714 bp, Homo sapiens
  Payload ID: 9667
  Gene Symbol: KMT2E
  Gene Name: lysine (K)-specific methyltransferase 2E
  Uniprot ID: Q8IZD2
  ENST ID: ENST00000257745
  CDS Start-End: 387-5963
cgccgccattttcccagagcgagaggcagtgacactgagcgggcgcagggggccgagtcggagaccgtgccggagttcgggagcggcaacagagtgggcatagacactccgagcagcctcgccgtcgtctctgcgttcctgttgactgcctggctgccccctcccctactcctcggttcctggtgaagaggctgcgcgctgctgtttggggagggggtgtgtggagccgggtcctgtgtccgcagtggctgctgtcggggggtcgcctgttcgcggaggtgcggagagactccttgggggtcgagcactgtggctggcatgccccagtgttttggataccaatgcataggactccatagtaatcgaatttaccagaggcgaacgtcatgagcatagtgatcccattgggggttgatacagcagagacgtcatacttggaaatggctgcaggttcagaaccagaatccgtagaagctagccctgtggtagttgagaaatccaacagttatccccaccagttatataccagcagctcacatcattcacacagttacattggtttgccctatgcggaccataattatggtgctcgtcctcctccgacacctccggcttcccctcctccatcagtccttattagcaaaaatgaagtaggcatatttaccactcctaattttgatgaaacttccagtgctactacaatcagcacatctgaggatggaagttatggtactgatgtaaccaggtgcatatgtggttttacacatgatgatggatacatgatctgttgtgacaaatgcagcgtttggcaacatattgactgcatggggattgataggcagcatattcctgatacatatctatgtgaacgttgtcagcctaggaatttggataaagagagggcagtgctactacaacgccggaaaagggaaaatatgtcagatggtgataccagtgcaactgagagtggtgatgaggttcctgtggaattatatactgcatttcagcatactccaacatcaattactttaactgcttcaagagtttccaaagttaatgataaaagaaggaaaaaaagcggggagaaagaacaacacatttcaaaatgtaaaaaggcatttcgtgaaggatctaggaagtcatcaagagttaagggttcagctccagagattgatccttcatctgatggttcaaattttggatgggagacaaagatcaaagcatggatggatcgatatgaagaagcaaataacaaccagtacagtgagggtgttcagagggaggcacaaagaatagctctgagattaggcaatggaaatgacaaaaaagagatgaataaatccgatttgaataccaacaatttgctcttcaaacctcctgtagagagccatatacaaaagaataagaaaattcttaaatctgcaaaagatttgcctcctgatgcacttatcattgaatacagagggaagtttatgctgagagaacagtttgaagcaaatgggtatttctttaaaagaccatacccttttgtgttattctactctaaatttcatgggctagaaatgtgtgttgatgcaaggacttttgggaatgaggctcgattcatcaggcggtcttgtacacccaatgcagaggtgaggcatgaaattcaagatggaaccatacatctttatatttattctatacacagtattccaaagggaactgaaattactattgcctttgattttgactatggaaattgtaagtacaaggtggactgtgcatgcctcaaagaaaacccagagtgccctgttctaaaacgtagttctgaatccatggaaaatatcaatagtggttatgagaccagacggaaaaaaggaaaaaaagacaaagatatttcaaaagaaaaagatacacaaaatcagaatattactttggattgtgaaggaacgaccaacaaaatgaagagcccagaaactaaacaaagaaagctttctccactgagactatcagtatcaaataatcaggaaccagattttattgatgatatagaagaaaaaactcctattagtaatgaagtagaaatggaatcagaggagcagattgcagaaaggaaaaggaagatgacaagagaagaaagaaaaatggaagcaattttgcaagcttttgccagacttgaaaagagagagaaaagaagagaacaagctttggaaaggatcagcacagccaaaactgaagttaaaactgaatgtaaagatacacagattgtcagtgatgctgaagttattcaggaacaagcaaaagaagaaaatgctagcaagccaacccctgccaaagtaaatagaactaaacagagaaaaagtttttctcggagtaggactcacattggacagcagcgtcggagacacagaactgtcagcatgtgttcagatatccagccatcttctcctgatatagaagttacttcacaacaaaatgatattgaaaatactgtacttacaatagaaccagaaactgaaactgcactagcagaaataattactgaaactgaagttccagcacttaataaatgtcctaccaagtaccccaaaacaaagaagcacttggttaatgaatggttaagtgagaagaatgagaagacaggaaaaccttcagatggcctttcagaaaggcctctacgcataactacagatcctgaagtgttagctacacaactcaattctttaccaggtctcacttacagcccccatgtatactccactcctaagcattatattagatttacttcaccattcctttcagaaaaaaggagaagaaaagaacctactgaaaacatttctggttcatgcaagaagcgatggttgaaacaagctctggaagaagaaaattcagcaattttacatagatttaattcaccctgtcaagaaagatccagaagtcctgcagtcaatggtgaaaataaaagtccactactattaaatgacagctgttcccttccagatttaactacaccactaaaaaaacgaagattttatcagttgctagattcggtttactcagaaacctccacacctactccttccccgtatgctacaccaactcacaccgatattactcctatggacccatcttttgccacgcctccacggataaaatcagatgatgaaacttgtagaaatggttataaacccatatattcaccagttaccccagtaactcctggtacaccaggaaataccatgcactttgagaatatttcttccccagaaagttctccagaaataaagagacgcacttatagtcaagagggatatgacagatcttcaaccatgttaacattggggccttttagaaattctaatttaactgaactgggtctgcaagaaataaagactattggttatacgagccctaggagtaggactgaagtcaacaggcagtgtcctggagaaaaggaacctgtgtcagaccttcagctaggactcgatgcagttgagccaactgccctacataaaaccctggaaacgcctgcacatgacagggctgagcccaacagccaactggactcgactcactctggacggggcacaatgtattcttcctgggtaaagagccctgacagaacaggagttaacttctcagtgaactccaacttgagggacctgacaccctcgcatcagttggaggttggaggaggcttccgaataagtgagtcaaagtgcctgatgcaggatgatactagaggcatgtttatggaaacaactgtgttttgtacttccgaagatgggcttgtatctggtttcggacggactgttaatgacaatttgatcgacgggaattgcacaccccagaatccaccacaaaagaaaaaggtttctctattagaataccgtaagagacaacgtgaagctaggaaaagtggctctaagacagagaactttccactcattagtgtatcaccccatgcaagtggaagcttgagcaacaatggtgatggctgtgccagcagtaatgacaatggggagcaggtggaccacactgctagcctacctttaccaacaccagctacagtttataatgccacttctgaagaaactagcaataactgccctgttaaggatgctactgctagtgagaagaatgaaccagaagttcaatggactgcctcaacttcagtggaacaagtcagagaaaggagttatcagagagctttacttctcagtgatcaccgaaaagataaagatagtgggggagaatcaccatgtgtctcatgttcaccgagtcatgttcagtcttcaccttcatctcattcaaatcacataccccagttgcaagctaagggcccagtcccttctttcagtgaacttatggaagaccctgatcctgaaaatccagaacccacaactacgaatgaatgtccatccccagatacttctcaaaatacttgtaaaagtcctccaaaaatgagcaagcctggttcacctggatctgtaattcctgctcaagcacacgggaaaatattcacaaaaccagatccccaatgggactccacagttagtgcatccgaagctgaaaatggtgttcacctaaaaacagagctccaacaaaaacagctatcaaataacaaccaagcactttcaaagaatcatcctcctcagacacacgttcgtaattcatctgagcaactttcacaaaagctgccttctgtgccaacaaagttgcactgtcctccatcacctcacctagaaaatcctccaaagtcatccacgcctcacacacctgtacagcatggttatctttcaccaaagcctccttcacagcagttaggatctccctacaggcctcatcattcacagtcacctcaagttggaacacctcagcgagagcctcaaagaaacttttatccagcagcacagaaccttccagccaatactcagcaggcaacttctggaacattatttacacagacaccctcaggacaatcttcagcaacatacagtcagtttaaccaacaaagtctgaacagcacggcaccaccccctccacctcctccacctccttcttcgtcttactatcaaaaccagcagccctctgcaaactttcagaattataatcagctcaaaggtagtctttctcaacaaactgtgtttacatcaggaccaaatcaagcacttcctggcaccacaagccagcaaacagttccaggacaccacgtgactccagggcattttttgccctctcagaaccctaccattcaccatcaaactgctgctgccgtagtcccccctcctcctccaccaccacctgctccaggaccgcaccttgtacaacagccgaattcccatcagcaacactctgtagcacatgtagtagggcctgttcatgcggtcacccctgggtcgcatattcattctcaaactgctggacaccacttacccccacccccaccccctcctggtcctgcccctcatcaccatccaccaccccatccatccacaggactccaaggtctacaagcacaacaccagcatgttgtaaattcagcacccccaccaccccctccgccgccaccttccagtgttttggcttctgggcatcataccacatcagctcaagccttacaccacccacctcatcaaggacctccactttttccttcgagtgctcatccaactgtaccaccgtatccctcacaagctacacatcataccactttgggaccgggaccccagcaccagccttctggaacagggccacattgtccattacctgtcacaggtcctcatctccagccccaaggaccaaacagtattccaacacctactgcttcagggttctgtcctcatcctggctctgtggccctgccacatggggttcaaggacctcagcaggcatctccagtgcctggacagattccaattcacagagcacaggtgccaccaacatttcaaaacaattaccatgggtcagggtggcattaaaatggactccaaaaacatttttttaaatgttctgtaagataaactgtatatttcatatgtacctgttaaggtactttttaaagcttgtacatgaacctttgtataaaaaacaccagtgctctttcgttgtatttttctcatttttgctttttaaaattcctttaaaaaatgtgctgttaagccagtattaggtatctttattttgtaagtgaacattccagctgtttttttctggcagatctgatgctgatttgatgctgtatgatcttttttttttttttagttaaattcatttagtgaatgttctattattttatacatacacattaagtactcagctaagtaatggcactatgaggattttttttttctttcctgtcagcagcagttctgtgaatgcatcttaggtataaaaatgcaatacagatttttatattttggtgtggacatggctcattttgttttaccagttatttgcaagcaaaatgtaatttaatgtatagatgatttctaatgtctcctgacaaactgtaaatactgcatttcttttgcgtatataattgcttacagcttttctcatttgatatatagcattgtacatatgacaagtcttttgcaaaactgtgtgatctttgtgaaagtagtacagtatatgacctttaatttcttttttattttaaatatactgtcacactgaagcactggttgggcattttaattcatgttaataaatcacaattatgtcagtttt

SEQ ID NO: 150257 - DNA, 6874 bp, Homo sapiens
  Payload ID: 9667
  Gene Symbol: KMT2E
  Gene Name: lysine (K)-specific methyltransferase 2E
  Uniprot ID: Q8IZD2
  ENST ID: ENST00000311117
  CDS Start-End: 546-6122
gccgccgccgccgccgccattttcccagagcgagaggcagtgacactgagcgggcgcagggggccgagtcggagaccgtgccggagttcgggagcggcaacagagtgggcatagacactccgagcagcctcgccgtcgtctctgcgttcctgttgactgcctggctgccccctcccctactcctcggttcctggtgaagaggctgcgcgctgctgtttggggagggggtgtgtggagccgggtcctgtgtccgcagtggctgctgtcggggggtcgcctgttcgcggaggtgcggagagactccttgggggtcgagcacataacggggttcgggtgtctcgtgtgtgaacatcacaggtctattctggataagcaggttttgtgaagacatttattctttcttggacctcagatttaccagacatctcatgggtttgtggatgcacttagatgtttgcaatgagcactgtggctggcatgccccagtgttttggataccaatgcataggactccatagtaatcgaatttaccagaggcgaacgtcatgagcatagtgatcccattgggggttgatacagcagagacgtcatacttggaaatggctgcaggttcagaaccagaatccgtagaagctagccctgtggtagttgagaaatccaacagttatccccaccagttatataccagcagctcacatcattcacacagttacattggtttgccctatgcggaccataattatggtgctcgtcctcctccgacacctccggcttcccctcctccatcagtccttattagcaaaaatgaagtaggcatatttaccactcctaattttgatgaaacttccagtgctactacaatcagcacatctgaggatggaagttatggtactgatgtaaccaggtgcatatgtggttttacacatgatgatggatacatgatctgttgtgacaaatgcagcgtttggcaacatattgactgcatggggattgataggcagcatattcctgatacatatctatgtgaacgttgtcagcctaggaatttggataaagagagggcagtgctactacaacgccggaaaagggaaaatatgtcagatggtgataccagtgcaactgagagtggtgatgaggttcctgtggaattatatactgcatttcagcatactccaacatcaattactttaactgcttcaagagtttccaaagttaatgataaaagaaggaaaaaaagcggggagaaagaacaacacatttcaaaatgtaaaaaggcatttcgtgaaggatctaggaagtcatcaagagttaagggttcagctccagagattgatccttcatctgatggttcaaattttggatgggagacaaagatcaaagcatggatggatcgatatgaagaagcaaataacaaccagtacagtgagggtgttcagagggaggcacaaagaatagctctgagattaggcaatggaaatgacaaaaaagagatgaataaatccgatttgaataccaacaatttgctcttcaaacctcctgtagagagccatatacaaaagaataagaaaattcttaaatctgcaaaagatttgcctcctgatgcacttatcattgaatacagagggaagtttatgctgagagaacagtttgaagcaaatgggtatttctttaaaagaccatacccttttgtgttattctactctaaatttcatgggctagaaatgtgtgttgatgcaaggacttttgggaatgaggctcgattcatcaggcggtcttgtacacccaatgcagaggtgaggcatgaaattcaagatggaaccatacatctttatatttattctatacacagtattccaaagggaactgaaattactattgcctttgattttgactatggaaattgtaagtacaaggtggactgtgcatgcctcaaagaaaacccagagtgccctgttctaaaacgtagttctgaatccatggaaaatatcaatagtggttatgagaccagacggaaaaaaggaaaaaaagacaaagatatttcaaaagaaaaagatacacaaaatcagaatattactttggattgtgaaggaacgaccaacaaaatgaagagcccagaaactaaacaaagaaagctttctccactgagactatcagtatcaaataatcaggaaccagattttattgatgatatagaagaaaaaactcctattagtaatgaagtagaaatggaatcagaggagcagattgcagaaaggaaaaggaagatgacaagagaagaaagaaaaatggaagcaattttgcaagcttttgccagacttgaaaagagagagaaaagaagagaacaagctttggaaaggatcagcacagccaaaactgaagttaaaactgaatgtaaagatacacagattgtcagtgatgctgaagttattcaggaacaagcaaaagaagaaaatgctagcaagccaacccctgccaaagtaaatagaactaaacagagaaaaagtttttctcggagtaggactcacattggacagcagcgtcggagacacagaactgtcagcatgtgttcagatatccagccatcttctcctgatatagaagttacttcacaacaaaatgatattgaaaatactgtacttacaatagaaccagaaactgaaactgcactagcagaaataattactgaaactgaagttccagcacttaataaatgtcctaccaagtaccccaaaacaaagaagcacttggttaatgaatggttaagtgagaagaatgagaagacaggaaaaccttcagatggcctttcagaaaggcctctacgcataactacagatcctgaagtgttagctacacaactcaattctttaccaggtctcacttacagcccccatgtatactccactcctaagcattatattagatttacttcaccattcctttcagaaaaaaggagaagaaaagaacctactgaaaacatttctggttcatgcaagaagcgatggttgaaacaagctctggaagaagaaaattcagcaattttacatagatttaattcaccctgtcaagaaagatccagaagtcctgcagtcaatggtgaaaataaaagtccactactattaaatgacagctgttcccttccagatttaactacaccactaaaaaaacgaagattttatcagttgctagattcggtttactcagaaacctccacacctactccttccccgtatgctacaccaactcacaccgatattactcctatggacccatcttttgccacgcctccacggataaaatcagatgatgaaacttgtagaaatggttataaacccatatattcaccagttaccccagtaactcctggtacaccaggaaataccatgcactttgagaatatttcttccccagaaagttctccagaaataaagagacgcacttatagtcaagagggatatgacagatcttcaaccatgttaacattggggccttttagaaattctaatttaactgaactgggtctgcaagaaataaagactattggttatacgagccctaggagtaggactgaagtcaacaggcagtgtcctggagaaaaggaacctgtgtcagaccttcagctaggactcgatgcagttgagccaactgccctacataaaaccctggaaacgcctgcacatgacagggctgagcccaacagccaactggactcgactcactctggacggggcacaatgtattcttcctgggtaaagagccctgacagaacaggagttaacttctcagtgaactccaacttgagggacctgacaccctcgcatcagttggaggttggaggaggcttccgaataagtgagtcaaagtgcctgatgcaggatgatactagaggcatgtttatggaaacaactgtgttttgtacttccgaagatgggcttgtatctggtttcggacggactgttaatgacaatttgatcgacgggaattgcacaccccagaatccaccacaaaagaaaaaggtttctctattagaataccgtaagagacaacgtgaagctaggaaaagtggctctaagacagagaactttccactcattagtgtatcaccccatgcaagtggaagcttgagcaacaatggtgatggctgtgccagcagtaatgacaatggggagcaggtggaccacactgctagcctacctttaccaacaccagctacagtttataatgccacttctgaagaaactagcaataactgccctgttaaggatgctactgctagtgagaagaatgaaccagaagttcaatggactgcctcaacttcagtggaacaagtcagagaaaggagttatcagagagctttacttctcagtgatcaccgaaaagataaagatagtgggggagaatcaccatgtgtctcatgttcaccgagtcatgttcagtcttcaccttcatctcattcaaatcacataccccagttgcaagctaagggcccagtcccttctttcagtgaacttatggaagaccctgatcctgaaaatccagaacccacaactacgaatgaatgtccatccccagatacttctcaaaatacttgtaaaagtcctccaaaaatgagcaagcctggttcacctggatctgtaattcctgctcaagcacacgggaaaatattcacaaaaccagatccccaatgggactccacagttagtgcatccgaagctgaaaatggtgttcacctaaaaacagagctccaacaaaaacagctatcaaataacaaccaagcactttcaaagaatcatcctcctcagacacacgttcgtaattcatctgagcaactttcacaaaagctgccttctgtgccaacaaagttgcactgtcctccatcacctcacctagaaaatcctccaaagtcatccacgcctcacacacctgtacagcatggttatctttcaccaaagcctccttcacagcagttaggatctccctacaggcctcatcattcacagtcacctcaagttggaacacctcagcgagagcctcaaagaaacttttatccagcagcacagaaccttccagccaatactcagcaggcaacttctggaacattatttacacagacaccctcaggacaatcttcagcaacatacagtcagtttaaccaacaaagtctgaacagcacggcaccaccccctccacctcctccacctccttcttcgtcttactatcaaaaccagcagccctctgcaaactttcagaattataatcagctcaaaggtagtctttctcaacaaactgtgtttacatcaggaccaaatcaagcacttcctggcaccacaagccagcaaacagttccaggacaccacgtgactccagggcattttttgccctctcagaaccctaccattcaccatcaaactgctgctgccgtagtcccccctcctcctccaccaccacctgctccaggaccgcaccttgtacaacagccgaattcccatcagcaacactctgtagcacatgtagtagggcctgttcatgcggtcacccctgggtcgcatattcattctcaaactgctggacaccacttacccccacccccaccccctcctggtcctgcccctcatcaccatccaccaccccatccatccacaggactccaaggtctacaagcacaacaccagcatgttgtaaattcagcacccccaccaccccctccgccgccaccttccagtgttttggcttctgggcatcataccacatcagctcaagccttacaccacccacctcatcaaggacctccactttttccttcgagtgctcatccaactgtaccaccgtatccctcacaagctacacatcataccactttgggaccgggaccccagcaccagccttctggaacagggccacattgtccattacctgtcacaggtcctcatctccagccccaaggaccaaacagtattccaacacctactgcttcagggttctgtcctcatcctggctctgtggccctgccacatggggttcaaggacctcagcaggcatctccagtgcctggacagattccaattcacagagcacaggtgccaccaacatttcaaaacaattaccatgggtcagggtggcattaaaatggactccaaaaacatttttttaaatgttctgtaagataaactgtatatttcatatgtacctgttaaggtactttttaaagcttgtacatgaacctttgtataaaaaacaccagtgctctttcgttgtatttttctcatttttgctttttaaaattcctttaaaaaatgtgctgttaagccagtattaggtatctttattttgtaagtgaacattccagctgtttttttctggcagatctgatgctgatttgatgctgtatgatcttttttttttttttagttaaattcatttagtgaatgttctattattttatacatacacattaagtactcagctaagtaatggcactatgaggattttttttttctttcctgtcagcagcagttctgtgaatgcatcttaggtataaaaatgcaatacagatttttatattttggtgtggacatggctcattttgttttaccagttatttgcaagcaaaatgtaatttaatgtatagatgatttctaatgtctcctgacaaactgtaaatactgcatttcttttgcgtatataattgcttacagcttttctcatttgatatatagcattgtacatatgacaagtcttttgcaaaactgtgtgatctttgtgaaagtagtacagtatatgacctttaatttcttttttattttaaatatactgtcacactgaagcactggttgggcattttaattcatgttaataaatcacaattatgtcagtttta

SEQ ID NO: 150258 - DNA, 5337 bp, Homo sapiens
  Payload ID: 9667
  Gene Symbol: KMT2E
  Gene Name: lysine (K)-specific methyltransferase 2E
  ENST ID: ENST00000334914
  CDS Start-End: 1-5337
atgagcatagtgatcccattgggggttgatacagcagagacgtcatacttggaaatggctgcaggttcagaaccagaatccgtagaagctagccctgtggtagttgagaaatccaacagttatccccaccagttatataccagcagctcacatcattcacacagttacattggtttgccctatgcggaccataattatggtgctcgtcctcctccgacacctccggcttcccctcctccatcagtccttattagcaaaaatgaagtaggcatatttaccactcctaattttgatgaaacttccagtgctactacaatcagcacatctgaggatggaagttatggtactgatgtaaccaggtgcatatgtggttttacacatgatgatggatacatgatctgttgtgacaaatgcagcgtttggcaacatattgactgcatggggattgataggcagcatattcctgatacatatctatgtgaacgttgtcagcctaggaatttggataaagagagggcagtgctactacaacgccggaaaagggaaaatatgtcagatggtgataccagtgcaactgagagtggtgatgaggttcctgtggaattatatactgcatttcagcatactccaacatcaattactttaactgcttcaagagtttccaaagttaatgataaaagaaggaaaaaaagcggggagaaagaacaacacatttcaaaatgtaaaaaggcatttcgtgaaggatctaggaagtcatcaagagttaagggttcagctccagagattgatccttcatctgatggttcaaattttggatgggagacaaagatcaaagcatggatggatcgatatgaagaagcaaataacaaccagtacagtgagggtgttcagagggaggcacaaagaatagctctgagattaggcaatggaaatgacaaaaaagagatgaataaatccgatttgaataccaacaatttgctcttcaaacctcctgtagagagccatatacaaaagaataagaaaattcttaaatctgcaaaagatttgcctcctgatgcacttatcattgaatacagagggaagtttatgctgagagaacagtttgaagcaaatgggtatttctttaaaagaccatacccttttgtgttattctactctaaatttcatgggctagaaatgtgtgttgatgcaaggacttttgggaatgaggctcgattcatcaggcggtcttgtacacccaatgcagaggtgaggcatgaaattcaagatggaaccatacatctttatatttattctatacacagtattccaaagggaactgaaattactattgcctttgattttgactatggaaattgtaagtacaaggtggactgtgcatgcctcaaagaaaacccagagtgccctgttctaaaacgtagttctgaatccatggaaaatatcaatagtggttatgagaccagacggaaaaaaggaaaaaagacaagagaagaaagaaaaatggaagcaattttgcaagcttttgccagacttgaaaagagagagaaaagaagagaacaagctttggaaaggatcagcacagccaaaactgaagttaaaactgaatgtaaagatacacagattgtcagtgatgctgaagttattcaggaacaagcaaaagaagaaaatgctagcaagccaacccctgccaaagtaaatagaactaaacagagaaaaagtttttctcggagtaggactcacattggacagcagcgtcggagacacagaactgtcagcatgtgttcagatatccagccatcttctcctgatatagaagttacttcacaacaaaatgatattgaaaatactgtacttacaatagaaccagaaactgaaactgcactagcagaaataattactgaaactgaagttccagcacttaataaatgtcctaccaagtaccccaaaacaaagaagcacttggttaatgaatggttaagtgagaagaatgagaagacaggaaaaccttcagatggcctttcagaaaggcctctacgcataactacagatcctgaagtgttagctacacaactcaattctttaccaggtctcacttacagcccccatgtatactccactcctaagcattatattagatttacttcaccattcctttcagaaaaaaggagaagaaaagaacctactgaaaacatttctggttcatgcaagaagcgatggttgaaacaagctctggaagaagaaaattcagcaattttacatagatttaattcaccctgtcaagaaagatccagaagtcctgcagtcaatggtgaaaataaaagtccactactattaaatgacagctgttcccttccagatttaactacaccactaaaaaaacgaagattttatcagttgctagattcggtttactcagaaacctccacacctactccttccccgtatgctacaccaactcacaccgatattactcctatggacccatcttttgccacgcctccacggataaaatcagatgatgaaacttgtagaaatggttataaacccatatattcaccagttaccccagtaactcctggtacaccaggaaataccatgcactttgagaatatttcttccccagaaagttctccagaaataaagagacgcacttatagtcaagagggatatgacagatcttcaaccatgttaacattggggccttttagaaattctaatttaactgaactgggtctgcaagaaataaagactattggttatacgagccctaggagtaggactgaagtcaacaggcagtgtcctggagaaaaggaacctgtgtcagaccttcagctaggactcgatgcagttgagccaactgccctacataaaaccctggaaacgcctgcacatgacagggctgagcccaacagccaactggactcgactcactctggacggggcacaatgtattcttcctgggtaaagagccctgacagaacaggagttaacttctcagtgaactccaacttgagggacctgacaccctcgcatcagttggaggttggaggaggcttccgaataagtgagtcaaagtgcctgatgcaggatgatactagaggcatgtttatggaaacaactgtgttttgtacttccgaagatgggcttgtatctggtttcggacggactgttaatgacaatttgatcgacgggaattgcacaccccagaatccaccacaaaagaaaaaggtttctctattagaataccgtaagagacaacgtgaagctaggaaaagtggctctaagacagagaactttccactcattagtgtatcaccccatgcaagtggaagcttgagcaacaatggtgatggctgtgccagcagtaatgacaatggggagcaggtggaccacactgctagcctacctttaccaacaccagctacagtttataatgccacttctgaagaaactagcaataactgccctgttaaggatgctactgctagtgagaagaatgaaccagaagttcaatggactgcctcaacttcagtggaacaagtcagagaaaggagttatcagagagctttacttctcagtgatcaccgaaaagataaagatagtgggggagaatcaccatgtgtctcatgttcaccgagtcatgttcagtcttcaccttcatctcattcaaatcacataccccagttgcaagctaagggcccagtcccttctttcagtgaacttatggaagaccctgatcctgaaaatccagaacccacaactacgaatgaatgtccatccccagatacttctcaaaatacttgtaaaagtcctccaaaaatgagcaagcctggttcacctggatctgtaattcctgctcaagcacacgggaaaatattcacaaaaccagatccccaatgggactccacagttagtgcatccgaagctgaaaatggtgttcacctaaaaacagagctccaacaaaaacagctatcaaataacaaccaagcactttcaaagaatcatcctcctcagacacacgttcgtaattcatctgagcaactttcacaaaagctgccttctgtgccaacaaagttgcactgtcctccatcacctcacctagaaaatcctccaaagtcatccacgcctcacacacctgtacagcatggttatctttcaccaaagcctccttcacagcagttaggatctccctacaggcctcatcattcacagtcacctcaagttggaacacctcagcgagagcctcaaagaaacttttatccagcagcacagaaccttccagccaatactcagcaggcaacttctggaacattatttacacagacaccctcaggacaatcttcagcaacatacagtcagtttaaccaacaaagtctgaacagcacggcaccaccccctccacctcctccacctccttcttcgtcttactatcaaaaccagcagccctctgcaaactttcagaattataatcagctcaaaggtagtctttctcaacaaactgtgtttacatcaggaccaaatcaagcacttcctggcaccacaagccagcaaacagttccaggacaccacgtgactccagggcattttttgccctctcagaaccctaccattcaccatcaaactgctgctgccgtagtcccccctcctcctccaccaccacctgctccaggaccgcaccttgtacaacagccgaattcccatcagcaacactctgtagcacatgtagtagggcctgttcatgcggtcacccctgggtcgcatattcattctcaaactgctggacaccacttacccccacccccaccccctcctggtcctgcccctcatcaccatccaccaccccatccatccacaggactccaaggtctacaagcacaacaccagcatgttgtaaattcagcacccccaccaccccctccgccgccaccttccagtgttttggcttctgggcatcataccacatcagctcaagccttacaccacccacctcatcaaggacctccactttttccttcgagtgctcatccaactgtaccaccgtatccctcacaagctacacatcataccactttgggaccgggaccccagcaccagccttctggaacagggccacattgtccattacctgtcacaggtcctcatctccagccccaaggaccaaacagtattccaacacctactgcttcagggttctgtcctcatcctggctctgtggccctgccacatggggttcaaggacctcagcaggcatctccagtgcctggacagattccaattcacagagcacaggtgccaccaacatttcaaaacaattaccatgggtcagggtggcattaa

SEQ ID NO: 150259 - DNA, 6840 bp, Homo sapiens
  Payload ID: 9667
  Gene Symbol: KMT2E
  Gene Name: lysine (K)-specific methyltransferase 2E
  Uniprot ID: Q8IZD2
  ENST ID: ENST00000334884
  CDS Start-End: 535-3132
cgccgccattttcccagagcgagaggcagtgacactgagcgggcgcagggggccgagtcggagaccgtgccggagttcgggagcggcaacagagtgggcatagacactccgagcagcctcgccgtcgtctctgcgttcctgttgactgcctggctgccccctcccctactcctcggttcctggtgaagaggctgcgcgctgctgtttggggagggggtgtgtggagccgggtcctgtgtccgcagtggctgctgtcggggggtcgcctgttcgcggaggtgcggagagactccttgggggtcgagcacataacggggttcgggtgtctcgtgtgtgaacatcacaggtctattctggataagcaggttttgtgaagacatttattctttcttggacctcagatttaccagacatctcatgggtttgtggatgcacttagatgtttgcaatgagcactgtggctggcatgccccagtgttttggataccaatgcataggactccatagtaatcgaatttaccagaggcgaacgtcatgagcatagtgatcccattgggggttgatacagcagagacgtcatacttggaaatggctgcaggttcagaaccagaatccgtagaagctagccctgtggtagttgagaaatccaacagttatccccaccagttatataccagcagctcacatcattcacacagttacattggtttgccctatgcggaccataattatggtgctcgtcctcctccgacacctccggcttcccctcctccatcagtccttattagcaaaaatgaagtaggcatatttaccactcctaattttgatgaaacttccagtgctactacaatcagcacatctgaggatggaagttatggtactgatgtaaccaggtgcatatgtggttttacacatgatgatggatacatgatctgttgtgacaaatgcagcgtttggcaacatattgactgcatggggattgataggcagcatattcctgatacatatctatgtgaacgttgtcagcctaggaatttggataaagagagggcagtgctactacaacgccggaaaagggaaaatatgtcagatggtgataccagtgcaactgagagtggtgatgaggttcctgtggaattatatactgcatttcagcatactccaacatcaattactttaactgcttcaagagtttccaaagttaatgataaaagaaggaaaaaaagcggggagaaagaacaacacatttcaaaatgtaaaaaggcatttcgtgaaggatctaggaagtcatcaagagttaagggttcagctccagagattgatccttcatctgatggttcaaattttggatgggagacaaagatcaaagcatggatggatcgatatgaagaagcaaataacaaccagtacagtgagggtgttcagagggaggcacaaagaatagctctgagattaggcaatggaaatgacaaaaaagagatgaataaatccgatttgaataccaacaatttgctcttcaaacctcctgtagagagccatatacaaaagaataagaaaattcttaaatctgcaaaagatttgcctcctgatgcacttatcattgaatacagagggaagtttatgctgagagaacagtttgaagcaaatgggtatttctttaaaagaccatacccttttgtgttattctactctaaatttcatgggctagaaatgtgtgttgatgcaaggacttttgggaatgaggctcgattcatcaggcggtcttgtacacccaatgcagaggtgaggcatgaaattcaagatggaaccatacatctttatatttattctatacacagtattccaaagggaactgaaattactattgcctttgattttgactatggaaattgtaagtacaaggtggactgtgcatgcctcaaagaaaacccagagtgccctgttctaaaacgtagttctgaatccatggaaaatatcaatagtggttatgagaccagacggaaaaaaggaaaaaaagacaaagatatttcaaaagaaaaagatacacaaaatcagaatattactttggattgtgaaggaacgaccaacaaaatgaagagcccagaaactaaacaaagaaagctttctccactgagactatcagtatcaaataatcaggaaccagattttattgatgatatagaagaaaaaactcctattagtaatgaagtagaaatggaatcagaggagcagattgcagaaaggaaaaggaagatgacaagagaagaaagaaaaatggaagcaattttgcaagcttttgccagacttgaaaagagagagaaaagaagagaacaagctttggaaaggatcagcacagccaaaactgaagttaaaactgaatgtaaagatacacagattgtcagtgatgctgaagttattcaggaacaagcaaaagaagaaaatgctagcaagccaacccctgccaaagtaaatagaactaaacagagaaaaagtttttctcggagtaggactcacattggacagcagcgtcggagacacagaactgtcagcatgtgttcagatatccagccatcttctcctgatatagaagttacttcacaacaaaatgatattgaaaatactgtacttacaatagaaccagaaactgaaactgcactagcagaaataattactgaaactgaagttccagcacttaataaatgtcctaccaagtaccccaaaacaaagaagcacttggttaatgaatggttaagtgagaagaatgagaagacaggaaaaccttcagatggcctttcagaaaggcctctacgcataactacagatcctgaagtgttagctacacaactcaattctttaccaggtctcacttacagcccccatgtatactccactcctaagcattatattagatttacttcaccattcctttcagaaaaaaggagaagaaaagaacctactgaaaacatttctggttcatgcaagaagcgatggttgaaacaagctctggaagaagaaaattcagcaattttacatagatttaattcaccctgtcaagaaagatccagaagtcctgcagtcaatgaatatttcttccccagaaagttctccagaaataaagagacgcacttatagtcaagagggatatgacagatcttcaaccatgttaacattggggccttttagaaattctaatttaactgaactgggtctgcaagaaataaagactattggttatacgagccctaggagtaggactgaagtcaacaggcagtgtcctggagaaaaggaacctgtgtcagaccttcagctaggactcgatgcagttgagccaactgccctacataaaaccctggaaacgcctgcacatgacagggctgagcccaacagccaactggactcgactcactctggacggggcacaatgtattcttcctgggtaaagagccctgacagaacaggagttaacttctcagtgaactccaacttgagggacctgacaccctcgcatcagttggaggttggaggaggcttccgaataagtgagtcaaagtgcctgatgcaggatgatactagaggcatgtttatggaaacaactgtgttttgtacttccgaagatgggcttgtatctggtttcggacggactgttaatgacaatttgatcgacgggaattgcacaccccagaatccaccacaaaagaaaaaggtttctctattagaataccgtaagagacaacgtgaagctaggaaaagtggctctaagacagagaactttccactcattagtgtatcaccccatgcaagtggaagcttgagcaacaatggtgatggctgtgccagcagtaatgacaatggggagcaggtggaccacactgctagcctacctttaccaacaccagctacagtttataatgccacttctgaagaaactagcaataactgccctgttaaggatgctactgctagtgagaagaatgaaccagaagttcaatggactgcctcaacttcagtggaacaagtcagagaaaggagttatcagagagctttacttctcagtgatcaccgaaaagataaagatagtgggggagaatcaccatgtgtctcatgttcaccgagtcatgttcagtcttcaccttcatctcattcaaatcacataccccagttgcaagctaagggcccagtcccttctttcagtgaacttatggaagaccctgatcctgaaaatccagaacccacaactacgaatgaatgtccatccccagatacttctcaaaatacttgtaaaagtcctccaaaaatgagcaagcctggttcacctggatctgtaattcctgctcaagcacacgggaaaatattcacaaaaccagatccccaatgggactccacagttagtgcatccgaagctgaaaatggtgttcacctaaaaacagagctccaacaaaaacagctatcaaataacaaccaagcactttcaaagaatcatcctcctcagacacacgttcgtaattcatctgagcaactttcacaaaagctgccttctgtgccaacaaagttgcactgtcctccatcacctcacctagaaaatcctccaaagtcatccacgcctcacacacctgtacagcatggttatctttcaccaaagcctccttcacagcagttaggatctccctacaggcctcatcattcacagtcacctcaagttggaacacctcagcgagagcctcaaagaaacttttatccagcagcacagaaccttccagccaatactcagcaggcaacttctggaacattatttacacagacaccctcaggacaatcttcagcaacatacagtcagtttaaccaacaaagtctgaacagcacggcaccaccccctccacctcctccacctccttcttcgtcttactatcaaaaccagcagccctctgcaaactttcagaattataatcagctcaaaggtagtctttctcaacaaactgtgtttacatcaggaccaaatcaagcacttcctggcaccacaagccagcaaacagttccaggacaccacgtgactccagggcattttttgccctctcagaaccctaccattcaccatcaaactgctgctgccgtagtcccccctcctcctccaccaccacctgctccaggaccgcaccttgtacaacagccgaattcccatcagcaacactctgtagcacatgtagtagggcctgttcatgcggtcacccctgggtcgcatattcattctcaaactgctggacaccacttacccccacccccaccccctcctggtcctgcccctcatcaccatccaccaccccatccatccacaggactccaaggtctacaagcacaacaccagcatgttgtaaattcagcacccccaccaccccctccgccgccaccttccagtgttttggcttctgggcatcataccacatcagctcaagccttacaccacccacctcatcaaggacctccactttttccttcgagtgctcatccaactgtaccaccgtatccctcacaagctacacatcataccactttgggaccgggaccccagcaccagccttctggaacagggccacattgtccattacctgtcacaggtcctcatctccagccccaaggaccaaacagtattccaacacctactgcttcagggttctgtcctcatcctggctctgtggccctgccacatggggttcaaggacctcagcaggcatctccagtgcctggacagattccaattcacagagcacaggtgccaccaacatttcaaaacaattaccatgggtcagggtggcattaaaatggactccaaaaacatttttttaaatgttctgtaagataaactgtatatttcatatgtacctgttaaggtactttttaaagcttgtacatgaacctttgtataaaaaacaccagtgctctttcgttgtatttttctcatttttgctttttaaaattcctttaaaaaatgtgctgttaagccagtattaggtatctttattttgtaagtgaacattccagctgtttttttctggcagatctgatgctgatttgatgctgtatgatcttttttttttttttagttaaattcatttagtgaatgttctattattttatacatacacattaagtactcagctaagtaatggcactatgaggattttttttttctttcctgtcagcagcagttctgtgaatgcatcttaggtataaaaatgcaatacagatttttatattttggtgtggacatggctcattttgttttaccagttatttgcaagcaaaatgtaatttaatgtatagatgatttctaatgtctcctgacaaactgtaaatactgcatttcttttgcgtatataattgcttacagcttttctcatttgatatatagcattgtacatatgacaagtcttttgcaaaactgtgtgatctttgtgaaagtagtacagtatatgacctttaatttcttttttattttaaatatactgtcacactgaagcactggttgggcattttaattcatgttaataaatcacaattatgtcagttttaccagattgtcctgtacaacttctaagatcgggatctgtgtgtttctacagaagttctagttttcaaatatagattgtaaggagccttcaattttctttagcgactactacctcagcaacaggaggcagcaaggggctgttcctgtggtggtttctgtttgcatttttgcaggagccataggaaactactgaaatgattgtgctgggtaaattaaggatctggcatcatacaaaatgaagccagaccactaatgcattacagtagttcttgaataca

SEQ ID NO: 150260 - DNA, 375 bp, Homo sapiens
  Payload ID: 9667
  Gene Symbol: KMT2E
  Gene Name: lysine (K)-specific methyltransferase 2E
  ENST ID: ENST00000473063
  CDS Start-End: 1-375
tggaagcttgagcaacaatggtgatggctgtgccagcagtaatgacaatggggagcaggtggaccacactgctagcctacctttaccaacaccagctacagtttataatgccacttctgaagaaactagcaataactgccctgttaaggatgctactgctagtgagaagaatgaaccagaagttcaatggactgcctcaacttcagtggaacaagtcagagaaaggagttatcagagagctttacttctcagtgatcaccgaaaagataaagatagtgaccctgatcctgaaaatccagaacccacaactacgaatgaatgtccatccccagatacttctcaaaatacttgtaaaagtcctccaaaaatgagcaa

SEQ ID NO: 150261 - DNA, 1759 bp, Homo sapiens
  Payload ID: 9667
  Gene Symbol: KMT2E
  Gene Name: lysine (K)-specific methyltransferase 2E
  ENST ID: ENST00000482560
  CDS Start-End: 189-623
gtctattctggataagcaggttttgtgaagacatttattctttcttggacctcagatttaccagacatctcatgggtttgtggatgcacttagatgtttgcaatgagcactgtggctggcatgccccagtgttttggataccaatgcataggactccatagtaatcgaatttaccagaggcgaacgtcatgagcatagtgatcccattgggggttgatacagcagagacgtcatacttggaaatggctgcaggttcagaaccagaatccgtagaagctagccctgtggtagttgagaaatccaacagttatccccaccagttatataccagcagctcacatcattcacacagttacattggtttgccctatgcggaccataattatggtgctcgtcctcctccgacacctccggcttcccctcctccatcagtccttattagcaaaaatgaagtaggcatatttaccactcctaattttgatgaaacttccagtgctactacaatcagcacatctgaggatggaagttatggtactgatgtaaccaggtgcatatgtggttttacacatgatgatggatacatgatctgttgtgacaaatgcagcactctggagtctccttgaaccagaaccacagtctcccctcccccaaccctggttcagccaccaagaaaggcctcctcccctagagaagcgtttggcaacatattgactgcatggggattgataggcagcatattcctgatacatatctatgtgaacgttgtcagcctaggaatttggataaagagagggcagtgctactacaacgccggaaaagggaaaatatgtcagatggtgataccagtgcaactgagagtggtgatgaggttcctgtggaattatatactgcatttcagcatactccaacatcaattactttaactgcttcaagagtttccaaagttaatgataaaagaaggaaaaaaagcggggagaaagaacaacacatttcaaaatgtaaaaaggcatttcgtgaaggatctaggaagtcatcaagagttaagggttcagctccagagattgatccttcatctgatggttcaaattttggatgggagacaaagatcaaagcatggatggatcgatatgaagaagcaaataacaaccagtacagtgagggtgttcagagggaggcacaaagaatagctctgagattaggcaatggaaatgacaaaaaagagatgaataaatccgatttgaataccaacaatttgctcttcaaacctcctgtagagagccatatacaaaagaataagaaaattcttaaatctgcaaaagatttgcctcctgatgcacttatcattgaatacagagggaagtttatgctgagagaacagtttgaagcaaatgggtatttctttaaaagaccatacccttttgtgttattctactctaaatttcatgggctagaaatgtgtgttgatgcaaggacttttgggaatgaggctcgattcatcaggcggtcttgtacacccaatgcagaggtgaggcatgaaattcaagatggaaccatacatctttatatttattctatacacagtattccaaagggaactgaaattactattgcctttgattttgactatggaaattgtaagtacaaggtggactgtgcatgcctcaaagaaaacccagagtgccctgttctaaaacgtagttctgaatccatggaaaatatcaatagtggttatgagaccagacggaaaaaaggaaaaaaa

SEQ ID NO: 150262 - DNA, 2523 bp, Homo sapiens
  Payload ID: 9667
  Gene Symbol: KMT2E
  Gene Name: lysine (K)-specific methyltransferase 2E
  Uniprot ID: Q8IZD2
  ENST ID: ENST00000476671
  CDS Start-End: 507-2336
gtgacactgagcgggcgcagggggccgagtcggagaccgtgccggagttcgggagcggcaacagagtgggcatagacactccgagcagcctcgccgtcgtctctgcgttcctgttgactgcctggctgccccctcccctactcctcggttcctggtgaagaggctgcgcgctgctgtttggggagggggtgtgtggagccgggtcctgtgtccgcagtggctgctgtcggggggtcgcctgttcgcggaggtgcggagagactccttgggggtcgagcacataacggggttcgggtgtctcgtgtgtgaacatcacaggtctattctggataagcaggttttgtgaagacatttattctttcttggacctcagatttaccagacatctcatgggtttgtggatgcacttagatgtttgcaatgagcactgtggctggcatgccccagtgttttggataccaatgcataggactccatagtaatcgaatttaccagaggcgaacgtcatgagcatagtgatcccattgggggttgatacagcagagacgtcatacttggaaatggctgcaggttcagaaccagaatccgtagaagctagccctgtggtagttgagaaatccaacagttatccccaccagttatataccagcagctcacatcattcacacagttacattggtttgccctatgcggaccataattatggtgctcgtcctcctccgacacctccggcttcccctcctccatcagtccttattagcaaaaatgaagtaggcatatttaccactcctaattttgatgaaacttccagtgctactacaatcagcacatctgaggatggaagttatggtactgatgtaaccaggtgcatatgtggttttacacatgatgatggatacatgatctgttgtgacaaatgcagcgtttggcaacatattgactgcatggggattgataggcagcatattcctgatacatatctatgtgaacgttgtcagcctaggaatttggataaagagagggcagtgctactacaacgccggaaaagggaaaatatgtcagatggtgataccagtgcaactgagagtggtgatgaggttcctgtggaattatatactgcatttcagcatactccaacatcaattactttaactgcttcaagagtttccaaagttaatgataaaagaaggaaaaaaagcggggagaaagaacaacacatttcaaaatgtaaaaaggcatttcgtgaaggatctaggaagtcatcaagagttaagggttcagctccagagattgatccttcatctgatggttcaaattttggatgggagacaaagatcaaagcatggatggatcgatatgaagaagcaaataacaaccagtacagtgagggtgttcagagggaggcacaaagaatagctctgagattaggcaatggaaatgacaaaaaagagatgaataaatccgatttgaataccaacaatttgctcttcaaacctcctgtagagagccatatacaaaagaataagaaaattcttaaatctgcaaaagatttgcctcctgatgcacttatcattgaatacagagggaagtttatgctgagagaacagtttgaagcaaatgggtatttctttaaaagaccatacccttttgtgttattctactctaaatttcatgggctagaaatgtgtgttgatgcaaggacttttgggaatgaggctcgattcatcaggcggtcttgtacacccaatgcagaggtgaggcatgaaattcaagatggaaccatacatctttatatttattctatacacagtattccaaagggaactgaaattactattgcctttgattttgactatggaaattgtaagtacaaggtggactgtgcatgcctcaaagaaaacccagagtgccctgttctaaaacgtagttctgaatccatggaaaatatcaatagtggttatgagaccagacggaaaaaaggaaaaaaagacaaagatatttcaaaagaaaaagatacacaaaatcagaatattactttggattgtgaaggaacgaccaacaaaatgaagagcccagaaactaaacaaagaaagctttctccactgagactatcagtatcaaataatcaggaaccagattttattgatgatatagaagaaaaaactcctattagtaatgaagtagaaatggaatcagaggagcagattgcagaaaggaaaaggaagatggtaagttgggaagccagtagtttgggcttagtgacagctgctctgcatatggtaattgttgctgcctttacatgggcttttacattattctttgaagttagcgaatgatgtgccattgagcatttttatttggtttggtcattgccatttaaataaattccattaatcttgtatttttattggttgttcattagagatttaagaatgtatgacatttaagaaatatgaacattttggaagtaataatattttaataatgccacactgaactattaataaattttaatgccacaat

SEQ ID NO: 150263 - DNA, 597 bp, Homo sapiens
  Payload ID: 9667
  Gene Symbol: KMT2E
  Gene Name: lysine (K)-specific methyltransferase 2E
  ENST ID: ENST00000478079
  CDS Start-End: 1-65
cccagaatccaccacaaaagaaaaagagtccagttggcaactttgtgggaagcaatgtagtatagtggaaagagcacgggctttcaagtaagacctaggttcgaatcccggctccaacactcaccagctgtgtgaccttgagtttctctattagaataccgtaagagacaacgtgaagctaggaaaagtggctctaagacagagaactttccactcattagtgtatcaccccatgcaagtggaagcttgagcaacaatggtgatggctgtgccagcagtaatgacaatggggagcaggtggaccacactgctagcctacctttaccaacaccagctacagtttataatgccacttctgaagaaactagcaataactgccctgttaaggatgctactgctagtgagaagaatgaaccagaagttcaatggactgcctcaacttcagtggaacaagtcagagaaaggagttatcagagagctttacttctcagtgatcaccgaaaagataaagatagtgggggagaatcaccatgtgtctcatgttcaccgagtcatgttcagtcttcaccttcatctcattcaaatcacataccccag

SEQ ID NO: 150264 - DNA, 1500 bp, Homo sapiens
  Payload ID: 9667
  Gene Symbol: KMT2E
  Gene Name: lysine (K)-specific methyltransferase 2E
  ENST ID: ENST00000478990
  CDS Start-End: 445-1500
gagcgagaggcagtgacactgagcgggcgcagggggccgagtcggagaccgtgccggagttcgggagcggcaacagagtgggcatagacactccgagcagcctcgccgtcgtctctgcgttcctgttgactgcctggctgccccctcccctactcctcggttcctggtgaagaggctgcgcgctgctgtttggggagggggtgtgtggagccgggtcctgtgtccgcagtggctgctgtcggggggtcgcctgttcgcggaggtgcggagagactccttgggggtcgagcacataacggggttcgggtgtctcgtgtgtgaacatcacagggtttgtggatgcacttagatgtttgcaatgagcactgtggctggcatgccccagtgttttggataccaatgcataggactccatagtaatcgaatttaccagaggcgaacgtcatgagcatagtgatcccattgggggttgatacagcagagacgtcatacttggaaatggctgcaggttcagagaatttggataaagagagggcagtgctactacaacgccggaaaagggaaaatatgtcagatggtgataccagtgcaactgagagtggtgatgaggttcctgtggaattatatactgcatttcagcatactccaacatcaattactttaactgcttcaagagtttccaaagttaatgataaaagaaggaaaaaaagcggggagaaagaacaacacatttcaaaatgtaaaaaggcatttcgtgaaggatctaggaagtcatcaagagttaagggttcagctccagagattgatccttcatctgatggttcaaattttggatgggagacaaagatcaaagcatggatggatcgatatgaagaagcaaataacaaccagtacagtgagggtgttcagagggaggcacaaagaatagctctgagattaggcaatggaaatgacaaaaaagagatgaataaatccgatttgaataccaacaatttgctcttcaaacctcctgtagagagccatatacaaaagaataagaaaattcttaaatctgcaaaagatttgcctcctgatgcacttatcattgaatacagagggaagtttatgctgagagaacagtttgaagcaaatgggtatttctttaaaagaccatacccttttgtgttattctactctaaatttcatgggctagaaatgtgtgttgatgcaaggacttttgggaatgaggctcgattcatcaggcggtcttgtacacccaatgcagaggtgaggcatgaaattcaagatggaaccatacatctttatatttattctatacacagtattccaaagggaactgaaattactattgcctttgattttgactatggaaattgtaagtacaaggtggactgtgcatgcctcaaagaaaacccagagtgccctgttctaaaacgtagttctgaatccatggaaaatatcaatagtggttatgagaccagacggaaaaaaggaaaaaaa

SEQ ID NO: 150265 - DNA, 617 bp, Homo sapiens
  Payload ID: 9667
  Gene Symbol: KMT2E
  Gene Name: lysine (K)-specific methyltransferase 2E
  ENST ID: ENST00000474203
  CDS Start-End: 405-617
cgcggaggtgcggagagactccttgggggtcgagcacataacggggttcgggtgtctcgtgtgtgaacatcacaggtctattctggataagcaggttttgtgaagacatttattctttcttggacctcagatttaccagacatctcatgacggagtctcgctctgtcaccaggctggagtgcagtggcgcgatcgcagctcactgcagcctctgactccctagttcaagcgattctcctgcctcagcgtcctgagtagctgggattacaggcacatgccaccaagcccagggtttgtggatgcacttagatgtttgcaatgagcactgtggctggcatgccccagtgttttggataccaatgcataggactccatagtaatcgaatttaccagaggcgaacgtcatgagcatagtgatcccattgggggttgatacagcagagacgtcatacttggaaatggctgcaggttcagaaccagaatccgtagaagctagccctgtggtagttgagaaatccaacagttatccccaccagttatataccagcagctcacatcattcacacagttacattggtttgccctatgcggaccataattatggtgctcgtcctcct

SEQ ID NO: 150266 - DNA, 1133 bp, Homo sapiens
  Payload ID: 9667
  Gene Symbol: KMT2E
  Gene Name: lysine (K)-specific methyltransferase 2E
  ENST ID: ENST00000495267
  CDS Start-End: 443-1133
gcgagaggcagtgacactgagcgggcgcagggggccgagtcggagaccgtgccggagttcgggagcggcaacagagtgggcatagacactccgagcagcctcgccgtcgtctctgcgttcctgttgactgcctggctgccccctcccctactcctcggttcctggtgaagaggctgcgcgctgctgtttggggagggggtgtgtggagccgggtcctgtgtccgcagtggctgctgtcggggggtcgcctgttcgcggaggtgcggagagactccttgggggtcgagcacataacggggttcgggtgtctcgtgtgtgaacatcacagggtttgtggatgcacttagatgtttgcaatgagcactgtggctggcatgccccagtgttttggataccaatgcataggactccatagtaatcgaatttaccagaggcgaacgtcatgagcatagtgatcccattgggggttgatacagcagagacgtcatacttggaaatggctgcaggttcagaaccagaatccgtagaagctagccctgtggtagttgagaaatccaacagttatccccaccagttatataccagcagctcacatcattcacacagttacattggtttgccctatgcggaccataattatggtgctcgtcctcctccgacacctccggcttcccctcctccatcagtccttattagcaaaaatgaagtaggcatatttaccactcctaattttgatgaaacttccagtgctactacaatcagcacatctgaggatggaagttatggtactgatgtaaccaggtgcatatgtggttttacacatgatgatggatacatgatctgttgtgacaaatgcagcgtttggcaacatattgactgcatggggattgataggcagcatattcctgatacatatctatgtgaacgttgtcagcctaggaatttggataaagagagggcagtgctactacaacgccggaaaagggaaaatatgtcagatggtgataccagtgcaactgagagtggtgatgaggttcctgtggaattatatactgcatttcagcatactccaacatcaattactttaactgcttcaagagtttccaaagttaatgataaaagaaggaaaaaaa

SEQ ID NO: 150267 - DNA, 883 bp, Homo sapiens
  Payload ID: 9667
  Gene Symbol: KMT2E
  Gene Name: lysine (K)-specific methyltransferase 2E
  ENST ID: ENST00000479838
  CDS Start-End: 1-434
gacttgaaaagagagagaaaagaagagaacaagctttggaaaggatcagcacagccaaaactgaagttaaaactgaatgtaaagatacacagattgtcagtgatgctgaagttattcaggaacaagcaaaagaagaaaatgctagcaagccaacccctgccaaagtaaatagaactaaacagagaaaaagtttttctcggagtaggactcacattggacagcagcgtcggagacacagaactgtcagcatgtgttcagatatccagccatcttctcctgatatagaagttacttcacaacaaaatgatattgaaaatactgtacttacaatagaaccagaaactgaaactgcactagcagaaataattactgaaactgaagttccagcacttaataaatgtcctaccaagtaccccaaaacaaagaaggtatgattctaatgaatgtaagaactgtttttctaacagtttcttatattaattatattgttgttttaaaaattggatttttaagacctcataataataagaggcagtttttatacttgcagattttaaaactaagaatgagaattccaaaactgtaaaattaatataaatgtttgcattactgtgaagataaagttacattcagtttatcaggacttttatggtattgcaattcatgatttctttaaataagtttgtctactttatgtacaaaatatatacttctctgaaactggttttagatgtgttatcctttatatttttataaatttcattgtataggtagattataagaattaaatgtgaagaaattgatttccacagaatgtactatgaaaatttgtaagaaagagtagttttaggtgtaattattaataaaaatctctgaaacacta

SEQ ID NO: 150268 - DNA, 1588 bp, Homo sapiens
  Payload ID: 9667
  Gene Symbol: KMT2E
  Gene Name: lysine (K)-specific methyltransferase 2E
  ENST ID: ENST00000622386
  CDS Start-End: 12-1373
ggaccataattatggtgctcgtcctctccgacacctccgcttcccctcctccatcagtccttattagcaaaaatgaagtaggcatatttaccactcctaattttgatgaaacttccagtgctactacaatcagcacatctgaggatggaagttatggtactgatgtaaccaggtgcatatgtggttttacacatgatgatggatacatgatctgttgtgacaaatgcagcgtttggcaacatattgactgcatggggattgataggcagcatattcctgatacatatctatgtgaacgttgtcagcctaggaatttggataaagagagggcagtgctactacaacgccggaaaagggaaaatatgtcagatggtgataccagtgcaactgagagtggtgatgaggttcctgtggaattatatactgcatttcagcatactccaacatcaattactttaactgcttcaagagtttccaaagttaatgataaaagaaggaaaaaaagcggggagaaagaacaacacatttcaaaatgtaaaaaggcatttcgtgaaggatctaggaagtcatcaagagttaagggttcagctccagagattgatccttcatctgatggttcaaattttggatgggagacaaagatcaaagcatggatggatcgatatgaagaagcaaataacaaccagtacagtgagggtgttcagagggaggcacaaagaatagctctgagattaggcaatggaaatgacaaaaaagagatgaataaatccgatttgaataccaacaatttgctcttcaaacctcctgtagagagccatatacaaaagaataagaaaattcttaaatctgcaaaagatttgcctcctgatgcacttatcattgaatacagagggaagtttatgctgagagaacagtttgaagcaaatgggtatttctttaaaagaccatacccttttgtgttattctactctaaatttcatgggctagaaatgtgtgttgatgcaaggacttttgggaatgaggctcgattcatcaggcggtcttgtacacccaatgcagaggtgaggcatgaaattcaagatggaaccatacatctttatatttattctatacacagtattccaaagggaactgaaattactattgcctttgattttgactatggaaattgtaagtacaaggtggactgtgcatgcctcaaagaaaacccagagtgccctgttctaaaacgtagttctgaatccatggaaaatatcaatagtggttatgagaccagacggaaaaaaggaaaaaagacaaagatatttcaaaagaaaaagatacacaaaatcagaatattactttggattgtgaaggaacgaccaacaaaatgaagagcccagaaactaaacaaagaaagctttctccactgagactatcagtatcaaataatcaggaaccagattttattgatgatatagaagaaaaaactcctattagtaatgaagtagaaatggaatcagaggagcagattgcagaaaggaaaaggaagatgacaagagaagaaagaaaaatggaagcaattttgcaagcttttgccagacttgaa

SEQ ID NO: 150269 - DNA, 1753 bp, Homo sapiens
  Payload ID: 9668
  Gene Symbol: KRCC1
  Gene Name: lysine-rich coiled-coil 1
  Uniprot ID: Q9NPI7
  ENST ID: ENST00000347055
  CDS Start-End: 395-1174
tgttcctgcctctccgccacctccaccgcggcttatcccctggctggcggcgttggcggggcgggggacagtagttgtagacgcccgcccctgcctcagagaagataccacattgaatgaacaaagactgaactttgtttacagataccttttataaaagatgtctgtggagtagtgttacagttcaaataacaaaggattttgcattatgagatgagtgagagtggagaattggacaaaaattgatttttgatctctgaattgtggtttttagctcaccagttattgtgtagtctcactatttgaaaattcatgctgaaaaactgagtgaatatgatcagatttctccaccaaattctcagcctgataaggaaaatcccgttttgtcaacctaatgaagcattcaaagaagacatatgactcttttcaagatgaacttgaagattatattaaagtacagaaagccagaggcttagagccaaagacttgtttcagaaagatgaaaggggactatttggaaacctgtgggtacaaaggagaggttaattccagacccacgtatagaatgtttgaccagagactcccatctgaaaccatccagacctacccaagatcatgcaatattccacaaacagtggaaaatcggttgcctcagtggttaccagcccatgacagcagattgagactagactctctgagctactgtcagttcacgagggactgtttctcagaaaaaccagtacccctgaactttaatcaacaagaatatatttgtggctcacatggtgtagaacatagagtttacaagcacttctcctcagataacagtaccagtactcatcaagccagtcacaaacagatacatcagaagaggaaaaggcacccagaggaaggcagagaaaaatcagaggaggagcggtctaagcataagagaaaaaaaagctgcgaggaaattgacttagacaaacacaagagcatccaaagaaagaaaacagaggtggaaatagaaaccgtacatgtcagtacagaaaagcttaagaatcgaaaggagaaaaaaagccgagatgtagtctctaagaaagaggaacgtaagcgtacaaaaaagaaaaaggaacaaggccaagaaaggacagaggaggaaatgctttgggaccagtctattcttggattttgaagctttcaaagttggttctcccaaagttaaattgaaaaaataggtgagagcttggttttatgatatccgtgttcataccacttttcttatgtgaataggttctttaacttctaacaaaggcctagtaaacaaagtgtttagcatgcttgctctccaacacagaaattgcttttcctcattttctaaaagcattattacattttttgaacatatagtgtaatttcctttaatgaaagtgactctgcttttattcatcaaattgctttgatggtggaaatattttctgttgggaggttatttattttaaattggaggattaatgacctttgcacaatctgtttcttgattgggtttgttatagttttgagttgggtattttatgttcattggtttttctctgtgaagcaatttttttctcctttattagatctaacttgcagtgtattttctaggctggaaagtggaaaatgaaatatattataatcttaggttacataaagtttctaaagtttcaaagagtcttgatacaaaatcagtttatattctgaaaatatttataataaagtattctaatttcta

SEQ ID NO: 150270 - DNA, 6432 bp, Homo sapiens
  Payload ID: 9669
  Gene Symbol: KNOP1
  Gene Name: lysine-rich nucleolar protein 1
  Uniprot ID: Q1ED39
  ENST ID: ENST00000219837
  CDS Start-End: 80-1456
ggccggcgactcgaagtggacttccgggtcacggcggagctggctctcacgtggaggcggggaaatttcgcccaccggaatgatcaccaagacacacaaagtagaccttgggctcccagagaagaaaaagaagaagaaagtggtcaaagaaccagagactcgatactcagttttaaacaatgatgattactttgctgatgtttctcctttaagagctacatccccctctaagagtgtggcccatgggcaggcacctgagatgcctctagtgaagaaaaagaagaagaaaaagaagggtgtcagcaccctttgcgaggagcatgtagaacctgagaccacgctgcctgctagacggacagagaagtcacccagcctcaggaagcaggtgtttggccacttggagttcctcagtggggaaaagaaaaataagaagtcacctctagccatgtcccatgcctctggggtgaaaacctccccagaccctagacagggtgaggaggaaaccagagttggcaagaagctcaaaaaacacaagaaggaaaaaaagggggcccaggaccccacagccttctcggtccaggacccttggttctgtgaggccagggaggccagggatgttggggacacttgctcagtggggaagaaggatgaggaacaggcagccttggggcagaaacggaagcggaagagccccagagaacacaatgggaaggtgaagaagaaaaaaaaaatccaccaggagggagatgccctcccaggccactccaagccctccaggtccatggagagcagccctaggaaaggaagtaaaaagaagccagtcaaagttgaggctccggaatacatccccataagtgatgaccctaaggcctccgcaaagaaaaagatgaagtccaaaaagaaggtagagcagccagtcatcgaggagccagctctgaaaaggaagaaaaagaagaagaggaaagagagtggggtagcaggagacccttggaaggaggaaacagacacggacttagaggtggtgttggaaaaaaaaggcaacatggatgaggcgcacatagaccaggtgaggcgaaaggccttgcaagaagagatcgatcgcgagtcaggcaaaacggaagcttctgaaaccaggaagtggacgggaacccagtttggccagtgggatactgctggttttgagaacgaggaccaaaaactgaaatttctcagacttatgggtggcttcaaaaacctgtccccttcgttcagccgccccgccagcacgattgcaaggcccaacatggccctcggcaagaaggcggctgacagcctgcagcagaatctgcagcgggactacgaccgggccatgagctggaagtacagccggggagccggcctcggcttctccaccgcccccaacaagatcttttacattgacaggaacgcttccaagtcagtcaagctggaagattaaactctagagttttgtccccccaaaactgccacaattgctttgattattccatttatgctggagattacaaattttttttgtgaaaaaatcagatcttggtgaggacctcgagcagtaagatataaataactcccataagcttagcgttccagtaatggaacactaggcataaatggtttattcagttgtgcaaatgaaagccatctgacagttggctcacattgaacacctgtggagattaaggacgaggacaactatattgatgggcttggatgaactggggcagggcagctcatatttcgggagccaggagaacgagtgagtgctaaaacctcctgttttctgtgttaaacattccgtccctgtttgagacatcagtatgtacagttaacttttgttgagtgtttagcaggtactagggacatactagtgttttccttaatgtatttaatcttcataattatgaaatgggtgctattattagccccatcttatagatgaggcaactgaggttcagggataaagtaataaaattgcctggggtcacccagccactaagtgcagggtgttgtacttttgtacccgaagccctaagttcactattcgccactctgaatgtcccctttagggaatttccaccagaatcctcgttggggattgaaatgtctttagatggaggaaaaagttttatgacaagtctgcatctctgataaaaagtggagtgaatgaggaacggagaatcgcaaactccttttccttccttttcctttcccctgtcatagagcagctgtaggcagagaggtgtctgagttgttaccaaacacatgtgactgagctgctgctgctgggaaatgtgcctctaaaccagtcctgccttttccactggtgtcccttcggccctaagtgctgaggtaggatttttgtgctttgactggattctgaacaaggcattttaggaagagtggttagtcccgcaaatgaatcaatggcagatcccagggacgtgtgtgtgtgttttgagataggctctcactctgtcacccaggctggagtgtagtggcatatcacggcttgttgcaaccactacctatccagcttaagtgatcctcccacctcagcctcccaagtagctgggactgtgggtgtgcaccacaacaaccagctagtgtttaaaattttttgtagagatggggtctcactatattgtccaggctagtcccaaactcctggactcaactcatgctcctgcctcagcccccaagagctgggatcacaggtgtgagccactgtgcccagccccagggatgtgtctgatgagattcttttttatcacaaggaagagaatcccaggtgacttctgtaggtggatattgaatgccaggaggagatgaacgtgtggagatgacacgggaagttgcctcatcggctgtggggacagcgtttccaagcctggactctacagcaagcctcaaagagctccaggtccagtggcccaagtcgcatgtgaccatctgtgaccaccttctttccactcacctagctttttgcatcccaaaatacaggttctgactgggacattttcacgatcgtttggcctgaacatgcctcctacagacatcccagcccaggcaggcctcgatggccagaaagttcagtctcacgtggcaggaaggcctgattagggcctggttcaacagctcgccaaggaagcattctctccatcatctccagtgttggcttcatcaaggctagtacaaagatggcagtaacagttccaggcagcatatcaagaccctagaacattccagaggaagaaaagcctttttgtgtctcaaggaaacttccagaagcctccattgctgggcaatgagtcatctgcccatagctgcacccgcccctgtcatgggaaggctggtgattcccttcagtcaagaagagtggatgctggtgaagtggccatggtgtccacagctgcccattgggcagaggtgaggcaggcacttcaggcagtttccctggctctgaaccctgatccgcaagcattggccaggtcaatagttggacaagtatgtgctacaaggacctacttgggccacttccctcaggacgtgaacttgtcctgcctttctttcctggattcaaccttgagatacataatgggagaggccgtggaaagcccaagaggcagtgttctggatttgagtgagtgccttctgggcacctcctcctttgatggagaaacaaatccctcctgaccttgagcaacactacaggaatgtgcctggtgtaaacaggaaccagccgttcgtttctttttttttgagatggagtctcacggtcgcgcaggctggagtgtggtggcgtgatctcggctcattgtaacctctgcttcctgggttcaagcgattcttgtgcctcagtctcctgagtagctggaatcggccgtttactactcatagtttttatcttgccaagaggtcaccctgacgttggcctgccttagctctgttaaaaaggttgtgctctgccaggtgcggtgactcacgcctgtaatcccagcactttgggaggccaaggtgggcggatcacgaggtcaagagttcgagaccagcctgaccaacatggtgaaaccccgtctctactaaaaatacaaaaattagctgggtgggtgtggtgtcacgggcttgtaatcccggctactcaggaggctgacaggagaatcgcttgaacccgggaggtggaggttgtagtgagctgggatggtgccactgcacactctagccccgggcaacagaatgagactctgtctcaaaaacaaacaaaaaaaaactgtctttgggtgattgtggagaggtgatcatatgtccgctgtgttgctcccatccaagccctggtgactggtagctctcatgagggtgtgatggtcaggccttgcccctggtgtaaattctgtctgtaataggctgtgactttctaactcaacatcaccactggcttaggagttccatttgcacagggggagctttattgcttttctatatacataagaactttacgtctcaccagtggaggttgggcagccaagacaccacaatgctgggtgtcttcagaatggacttaatcttgtccttttgctttctgccagtgcagatcaccatctctcagatgagcaggaccccaccctctggcagtcttgtcttgggagaatcactctgagctcccatcctttgtaaattaacattggtttgagcaccaccctccatcacggctgcagtgagccatgattgcaccactgtgttccagcctgggtgacagagcaagaccccattccaaaaaaaaaaaaaaatttgccaaatagacacagtcctcacaaaagaagttggcagaataacaccccttcctaccacatctcctcagaacctgtgtatttgttaggttacgaaacaaaagggaattaagtttgctaatcagctgaccttaaaacaggaagaggatcccgtgtttctgggtgggccggaggaatcacaaagatccctaaatgtggaagaggaaggcaaaaaagagtccacatcaaagagacttaagaaagacttgactagacactgctggttttgaagatgggaagggaagggtcagaagccaaggaatgtgtgtgctgtctagaagctggaaaaggcaaggaagtagattctcccctagagcctcccagaaggagcgtagccctgctgatgccttaattttagctcagtgagaccaggcggacttaagacctatagaaccgtcagatgacaacattatgttttaagccgctacaattgtggcaatttgttaaagtaacaatagaagacctaatgtaagtaagtctcatgtggaagttgccatggttttgtttttctttctttttttttttttgagacagtctcactctcactccacgcccaggctggagtgcagaggcgtgatctcagctcactgcaacctccacctccagggttcaagcgattctcctgcctcagcctcctgagaagctgggattacaggtgagcaccaccacacccagctaatttttttttgtatttttagtagagatggagtttcaccatgttggccaggatggtcttgatctcttggcctcatgatccacctacctcagcctcccaaagtgttggtattacaggcatgagccaccgcacccaggccccatcatttttattttctacaattctggctgacatcttattgctccatccttgctaatgatagacttcatctcacatagaccagtgttttcagagaccggcttattgattcagtaaagggctgggggaaactgcacacacaaggacatataaaatctaagcctctgcctgggccacatgacaggattcagaagcacctttgatataatgggtgcccgacctcatgtgaaagtccaagttcaggtgtaatgtgagagcggtaagaattcactggcctaggcttgggaactaatgctgcccaccacgttcagcctcagaggagaagaaatgacttgaagaacataatttgtgaatttgccaattgtttttcattttatagcatcacacagtaaaagtagataaaataattttaatgaaaatacttctgtgggccaggtgcggtggcttacgcctgtaatcccagcactttgggaggccgaggcggcggatcacctgaggtcaggagttctagaccagcctgaccaacatggagaaaccccatctctactaaaaatacaaaattagctgggtgtggtggcgcactcctgttatcccagctactcaggaggctgaggcaggagaattgcttagactcgggaggcggaggttggggtgagccgagatcacgccattgtactccagcctgggcaacaagagtgaaactgtctcaaaaaaaagaaaaaaaaacagaattttgtgaaataaaggccacttgggagtatctgagccaccccacaa

SEQ ID NO: 150271 - DNA, 1020 bp, Homo sapiens
  Payload ID: 9669
  Gene Symbol: KNOP1
  Gene Name: lysine-rich nucleolar protein 1
  ENST ID: ENST00000564480
  CDS Start-End: 784-1020
ggccggcgcggggtgtggagattgcaccagaggaagtgcgcggcggggaagatggggaaatgcggtccacccacatccctgaatccgacccctccagtcggtgtgcgcccgctccggcctgaggccgccgcctccagaaagttttcccgcctcagagccggccctgggaccccacgtaatccctcccagtctgttgatgcggaggcttgggcccatgggagccttggaggtacggatcttacttcctggctcccgcgcgtcctgctggtgatcctgccgggggagtggggtgttgctgcacaggctttggagtcctgtgggcggaattccagtctccgttttccacttgctggctttggaacctagggcaagtgaattattgtagtctctggagcttgcgaggtcgggtattcacaaagatcttcacaaggctgtccctggaatttaaaagcggttttggagaaagcgtttgcgtttgcaggagatgcactgtaacgttcttttcctttctccttgaaagagtgaatgcatttggtcgcagggctaaagaggaggatgctatacttttctaaatggcaagagatggggagagaaggggattaagagttgacccgcaacctcccggtggattctttgttcttaccagatctcttggccactcccctattctgaagtcgtcttggctctcttgactgctcccctattctgaagtcgtcttggctctcttgactgctcccctattctgaagtcgtcttggctctcctgactacactatttcaaggaatgatcaccaagacacacaaagtagaccttgggctcccagagaagaaaaagaagaagaaagtggtcaaagaaccagagactcgatactcagttttaaacaatgatgattactttgctgatgtttctcctttaagagctacatccccctctaagagtgtggcccatgggcaggcacctgagatgcctctagtgaagaaaaagaagaagaaaaagaagggtgtcagcaccctttgcgag

SEQ ID NO: 150272 - DNA, 1311 bp, Homo sapiens
  Payload ID: 9669
  Gene Symbol: KNOP1
  Gene Name: lysine-rich nucleolar protein 1
  ENST ID: ENST00000568230
  CDS Start-End: 344-757
cacagcagcccacccagtccagcaaatgcacatgtgttgcaggcctggatgagtgatgggaatggagagggcttccagggtcatcacacacgtgacgctaggtgccaggcacagcacacttctcaagtgaggacgcatgaaatgtcagcatttgtcgttactgaagaaccccaagaaagtggccggcctgaggtctcgctgttggagggtgtcttcagggccaaggcgggtgggagagcatggtgcatgttagtgtggtccttggcctctgtcctgtagtttggtgtcaccgtaggaggaaacagacacggacttagaggtggtgttggaaaaaaaaggcaacatggatgaggcgcacatagaccaggtgaggcgaaaggccttgcaagaagagatcgatcgcgagtcaggcaaaacggaagcttctgaaaccaggaagtggacgggaacccagtttggccagtgggatactgctggttttgagaacgaggaccaaaaactgaaatttctcagacttatgggtggcttcaaaaacctgtccccttcgttcagccgccccgccagcacgattgcaaggcccaacatggccctcggcaagaaggcggctgacagcctgcagcagaatctgcagcgggactacgaccgggccatgagctggaagtacagccggggagccggcctcggcttctccaccgcccccaacaagatcttttacattgacaggaacgcttccaagtcagtcaagctggaagattaaactctagagttttgtccccccaaaactgccacaattgctttgattattccatttatgctggagattacaaattttttttgtgaaaaaatcagatcttggtgaggacctcgagcagtaagatataaataactcccataagcttagcgttccagtaatggaacactaggcataaatggtttattcagttgtgcaaatgaaagccatctgacagttggctcacattgaacacctgtggagattaaggacgaggacaactatattgatgggcttggatgaactggggcagggcagctcatatttcgggagccaggagaacgagtgagtgctaaaacctcctgttttctgtgttaaacattccgtccctgtttgagacatcagtatgtacagttaacttttgttgagtgtttagcaggtactagggacatactagtgttttccttaatgtatttaatcttcataattatgaaatgggtgctattattagccccatcttatagatgaggcaactgaggttcagggataaagtaataaaattgcctggggtcacccagcca

SEQ ID NO: 150273 - DNA, 595 bp, Homo sapiens
  Payload ID: 9669
  Gene Symbol: KNOP1
  Gene Name: lysine-rich nucleolar protein 1
  ENST ID: ENST00000567367
  CDS Start-End: 1-595
ggaaaaaaagggggcccaggaccccacagccttctcggtccaggacccttggttctgtgaggccagggaggccagggatgttggggacacttgctcagtggggaagaaggatgaggaacaggcagccttggggcagaaacggaagcggaagagccccagagaacacaatgggaaggtgaagaagaaaaaaaaaatccaccaggagggagatgccctcccaggccactccaagccctccaggtccatggagagcagccctaggaaaggaagtaaaaagaagccagtcaaagttgaggctccggaatacatccccataagtgatgaccctaaggcctccgcaaagaaaaagatgaagtccaaaaagaaggtagagcagccagtcatcgaggagccagctctgaaaaggaagaaaaagaagaagaggaaagagagtggggtagcaggagacccttggaaggaggtgaggcgaaaggccttgcaagaagagatcgatcgcgagtcaggcaaaacggaagcttctgaaaccaggaagtggacgggaacccagtttggccagtgggatactgctggttttgagaacgaggaccaaaaactg

SEQ ID NO: 150274 - DNA, 2479 bp, Homo sapiens
  Payload ID: 9670
  Gene Symbol: LYSMD1
  Gene Name: LysM, putative peptidoglycan-binding, domain containing 1
  Uniprot ID: Q96S90
  ENST ID: ENST00000368908
  CDS Start-End: 662-1345
cttttgggaaatgaagtcttttctcaaagaccttgccgctcaactggatccaggcccttgcatcttggcggatctgaggcgtttggagggacaacaacctagatgtggagccgaaatttgagggtgtgacctatcttatgcggagcggacctttgaggatctctgagtggaaggtgtactacaaattcttgcaatcctcacgctcttcgtctgcggcgacagttcacctggggtgggcctgatttgttcctgactctagcaaacaaaccccgggaccggggagagctgggatgttggagcgccctgaggccaggctacttgggggcaaactgaggaaagagtgttgaggattatttctagagttcaaaggtcagaggtcaatgtagcgaggagttgtgggggagtccaaagtcggaggggtgcttaggggagaattagggagggactgaatactcaagggacagatttgtggataagtagcttggagggaggagaaaccgggagggggcagatggcgtagtgctggggaggcggggacacaggggaagagagagggggaaaggaatcccctgaatattcattcccagacttcaggcctgtcagtcgcagtctcggtcgtacctcccctagttgcaaccttagctgttggcagggtgaagagatggcttccccgtctagacagcccccgccaggggggtcaggactgcttcaagggagccgggctcgttcatatggaagcctggtgcaatcggcctgctccccagtgagggaaagacgcctggagcatcagttggagcccggagacaccctggctggactagcactcaaatatggggtgacgatggaacagattaaacgtgcaaaccgcctttatactaatgactccatcttcctgaagaaaaccctctacatccccatcctgacagagcccagagacctgttcaatggtttggactctgaggaagagaaagatggagaggaaaaagtacacccaagtaacagtgaagtttggccacactcaactgagaggaagaaacaagagacaggagcaggacgtgccaatggtgaagtcctccccacacctggccaggaaacccccacgcccatccatgacctctctgcctctgatttccttaagaagcttgattcacagatcagcctgtccaagaaggctgctgctcagaagctgaaaaaaggggaaaatggggtacctggggaggatgcaggtctccacctgagctccccttggatgcagcaacgagcagtcctaggtcctgtgccgctgacccgtacctctcggacccggacactacgggaccaggaggatgaaatcttcaaactctgatgtccccagaactgactgagagaagcaagatgttgaaagagaaacttcagggggagaggagcctgaggtgaggctcaagaacatggcttatgagcctgcctccctccactccagccatcctccccagcctccttgtctgccaaaaattccttggcctggggcagttttattggcaagattagggaatgggaactggacctttcccagttcttgggctgaatctagagttgagtcctttagactcaaaaggctctttttatatccttgttgcctttcctatcctttttacctttccctggccttagaacagggaagcagagactccccctcagcttcttcctcatctccaactatgtgacataatttatttggtgctaatattgaagtaatatttatttgctatattttatttcttcccactcttagctgaaaaatggaatttctatagccctggggtgaggagaacccgggaacagtgagccagtgactgctggttctccactttccccaccttgttagccaaacatgttattgaggatgaggcaatcggtgatatagcccaccacagagaatggatgactgttggccttttctccaatctcaaagtgacagatttgggctgattctttttttttttttttttggtaccccattcctgttgaatgggctcagtcttgacaaaccaattccctgtaactttttcacaattcttgactctgagaaaaagcagcactgtagggacctgaactctccattctaccagttcacccttctgacctgttctgctcagcctgtggtgaggggaacagatggaagaaggctttccttggggtttgaagaggaagccagttgtgggagtctctttgttacaccccctcccctccagaccctctctctctatgccttcctcctcactgcatatttatttgcgatttgtagcactgatctatggtacagttgttttgtttcttaaacagaagtaggtaagggaacctcagtaataatggaaatctgcctcagtctcctgtttggaaatgatgagaggtgagataagtaatgtttatatacctcctttcttctgtgatgattataaggtatacgaagctggacagattaaacattgagccctgtgca

SEQ ID NO: 150275 - DNA, 1003 bp, Homo sapiens
  Payload ID: 9670
  Gene Symbol: LYSMD1
  Gene Name: LysM, putative peptidoglycan-binding, domain containing 1
  Uniprot ID: Q96S90
  ENST ID: ENST00000440902
  CDS Start-End: 167-706
ggtgccctgcgactccgcagacgcggagccttttgggaaatgaagtcttttctcaaagaccttgccgctcaactggatccaggcccttgcatcttggcggatctgaggcgtttggagggacaacaacctagatgtggagccgaaatttgagggtgtgacctatcttatgcggagcggacctttgaggatctctgagtggaagatggaacagattaaacgtgcaaaccgcctttatactaatgactccatcttcctgaagaaaaccctctacatccccatcctgacagagcccagagacctgttcaatggtttggactctgaggaagagaaagatggagaggaaaaagtacacccaagtaacagtgaagtttggccacactcaactgagaggaagaaacaagagacaggagcaggacgtgccaatggtgaagtcctccccacacctggccaggaaacccccacgcccatccatgacctctctgcctctgatttccttaagaagcttgattcacagatcagcctgtccaagaaggctgctgctcagaagctgaaaaaaggggaaaatggggtacctggggaggatgcaggtctccacctgagctccccttggatgcagcaacgagcagtcctaggtcctgtgccgctgacccgtacctctcggacccggacactacgggaccaggaggatgaaatcttcaaactctgatgtccccagaactgactgagagaagcaagatgttgaaagagaaacttcagggggagaggagcctgaggtgaggctcaagaacatggcttatgagcctgcctccctccactccagccatcctccccagcctccttgtctgccaaaaattccttggcctggggcagttttattggcaagattagggaatgggaactggacctttcccagttcttgggctgaatctagagttgagtcctttagactcaaaaggctctttttatatccttgttgcctttcctatcctttttacctttccct

SEQ ID NO: 150276 - DNA, 1759 bp, Homo sapiens
  Payload ID: 9671
  Gene Symbol: LYSMD2
  Gene Name: LysM, putative peptidoglycan-binding, domain containing 2
  Uniprot ID: Q8IV50
  ENST ID: ENST00000267838
  CDS Start-End: 516-1163
ggaagtacccttggcattggcagagctggaaggtctgtgcaagctggctcctgctggggaatcaataaaggaggcagagcaacgctttttttttttttcgccgtggccagggcagggttctgccagggctctatcgccaatggagcaggggtccacctggggcctaggacgcctgcagatagccctctcttagccccaacggccgcgggcttcagcgctccccggctccctcgctctgcagggtcttcccggtaccggcaggccgcggcgggagctgctttcgctcttaaccttgcaggtgcgtgtgccgcgggcgcccggggcaggcaggacgcagaggaggaggcgcccgccatgcccggcctgcggctccccgcctcggcttcccgtccgccgcccccgcggaacggcctgctgcagcccctgtgaagaggaagaggcggcggcggcggcggaggaggaggaggcgccgcccccttggcaagctccccgacccggcggcctcggcaggacccatggcggattcctcgcccgcactgtccctgcgggaaggcggcccccgcgcgccgcggccctcggccccctcgccgccgccgcgctcgcgctccggctccgagtccgaggaggccgagctgtcgctgagcctggcccgcaccaagacccgctcgtacggcagcaccgccagcgtgcgggcgccgctgggcgccggcgtcatcgagcgccatgtggagcaccgggtccgcgcgggcgacacgctgcagggcatcgcgctcaagtacggtgtcacgatggaacagattaaaagggccaataaactgtttaccaatgattgtatatttctgaagaaaactttgaacatcccagttatatcagagaagcctttgttgtttaatggacttaactccattgattctccagaaaatgaaactgctgataacagtttttctcaggaagaggagccagtggtggccggggaagacctccctcctcccagtcctcaagaatctgatgttcagcctgtgcagcctgaggaagtgtcagccagagatttcctgcagagacttgacttgcagattaagttatcaacacaggcagccaagaagctaaaagaagagagcagagatgaagaaagtccctatgcaacttccctctatcacagttaggtgatttgggggcataactctaaccaaaattaagatatgtttggaccataaagaatccaacaactgaagattcaaaaacatcccttctggattcctatagtgtccatcttaaaatcataactaggtagttctacctgctgcagttgcactgaagtgattagttccctctggctttctataattttaagtctttattatggcatgatggcaaggttgtagcctaaagctcatcacttttgtaggtggtgttagtttttagactagcttttataaatactaattgacataaagcatcaaagattatttatatatttaggctaaaaataatgtttatctccttatgcaatcctgattatgtgaaaatatggttgctgtttaagtgatgctgaatttgctgtgtgtttataacttaagtgctatatatatatttcgatatgtcttacatattctctattaatataaagaaccaaattttgtctgctattttgtaaaaataaactacaaaagcctgaatgagaaaataaactatgttttcaaacttgagtctcctttttttttttaacaaatgagaaaataaaattgacttttaaattata

SEQ ID NO: 150277 - DNA, 1228 bp, Homo sapiens
  Payload ID: 9671
  Gene Symbol: LYSMD2
  Gene Name: LysM, putative peptidoglycan-binding, domain containing 2
  Uniprot ID: Q8IV50
  ENST ID: ENST00000454181
  CDS Start-End: 316-690
ggccgggcgcggcgccggggcgcgcggctgcagcggagcaggctgggaagcgtagttcccggctgagcctcgccgcggccccgcagtcccccagccccgcccttccccgacaggtgtcctctcccggaatcggggtctgaaccccgccacagctctgcaggggaggaagcacctgggtcggggagaagcctgggcaggctctttggagacgctcggggctccggagagcgtggatggcaaaggctttcaagcctgtgatgagcattcctgtgagcgagcatcctgacacggaagccgcgttgagagcggtctcagatggaacagattaaaagggccaataaactgtttaccaatgattgtatatttctgaagaaaactttgaacatcccagttatatcagagaagcctttgttgtttaatggacttaactccattgattctccagaaaatgaaactgctgataacagtttttctcaggaagaggagccagtggtggccggggaagacctccctcctcccagtcctcaagaatctgatgttcagcctgtgcagcctgaggaagtgtcagccagagatttcctgcagagacttgacttgcagattaagttatcaacacaggcagccaagaagctaaaagaagagagcagagatgaagaaagtccctatgcaacttccctctatcacagttaggtgatttgggggcataactctaaccaaaattaagatatgtttggaccataaagaatccaacaactgaagattcaaaaacatcccttctggattcctatagtgtccatcttaaaatcataactaggtagttctacctgctgcagttgcactgaagtgattagttccctctggctttctataattttaagtctttattatggcatgatggcaaggttgtagcctaaagctcatcacttttgtaggtggtgttagtttttagactagcttttataaatactaattgacataaagcatcaaagattatttatatatttaggctaaaaataatgtttatctccttatgcaatcctgattatgtgaaaatatggttgctgtttaagtgatgctgaatttgctgtgtgtttataacttaagtgctatatatatatttcgatatgtcttacatattctctattaatataaagaaccaaattttgtctgctattttgtaaaaataaactacaaaagcctgaatgagaaaataaactatgttttcaaa

SEQ ID NO: 150278 - DNA, 775 bp, Homo sapiens
  Payload ID: 9671
  Gene Symbol: LYSMD2
  Gene Name: LysM, putative peptidoglycan-binding, domain containing 2
  ENST ID: ENST00000558126
  CDS Start-End: 86-412
acagctctgcaggggaggaagcacctgggtcggggagaagcctgggcaggctctttggagacgctcggggctccggagagcgtggatggcaaaggctttcaagcctgtgatgagcattcctgtgagcgagcatcctgacacggaagccgcgttgagagcggtctcagaaaatgaaactgctgataacagtttttctcaggaagaggagccagtggtggccggggaagacctccctcctcccagtcctcaagaatctgatgttcagcctgtgcagcctgaggaagtgtcagccagagatttcctgcagagacttgacttgcagattaagttatcaacacaggcagccaagaagctaaaagaagagagcagagatgaagaaagtccctatgcaacttccctctatcacagttaggtgatttgggggcataactctaaccaaaattaagatatgtttggaccataaagaatccaacaactgaagattcaaaaacatcccttctggattcctatagtgtccatcttaaaatcataactaggtagttctacctgctgcagttgcactgaagtgattagttccctctggctttctataattttaagtctttattatggcatgatggcaaggttgtagcctaaagctcatcacttttgtaggtggtgttagtttttagactagcttttataaatactaattgacataaagcatcaaagattatttatatatttaggctaaaaataatgtttatctccttatgcaatcctgattatgtgaaaa

SEQ ID NO: 150279 - DNA, 1026 bp, Homo sapiens
  Payload ID: 9671
  Gene Symbol: LYSMD2
  Gene Name: LysM, putative peptidoglycan-binding, domain containing 2
  Uniprot ID: Q8IV50
  ENST ID: ENST00000560491
  CDS Start-End: 283-657
ttggcagagctggaaggtctgtgcaagctggctcctgctggggaatcaataaaggaggcagagcaacgctttttttttttttcgccgtggccagggcagggttctgccagggctctatcgccaatggagcaggggtccacctggggcctaggacgcctgcagatagccctctcttagccccaacggccgcgggcttcagcgctccccggctccctcgctctgcagggtcttcccggtaccggcaggccgcggcgggagctgctttcgctcttaaccttgcagatggaacagattaaaagggccaataaactgtttaccaatgattgtatatttctgaagaaaactttgaacatcccagttatatcagagaagcctttgttgtttaatggacttaactccattgattctccagaaaatgaaactgctgataacagtttttctcaggaagaggagccagtggtggccggggaagacctccctcctcccagtcctcaagaatctgatgttcagcctgtgcagcctgaggaagtgtcagccagagatttcctgcagagacttgacttgcagattaagttatcaacacaggcagccaagaagctaaaagaagagagcagagatgaagaaagtccctatgcaacttccctctatcacagttaggtgatttgggggcataactctaaccaaaattaagatatgtttggaccataaagaatccaacaactgaagattcaaaaacatcccttctggattcctatagtgtccatcttaaaatcataactaggtagttctacctgctgcagttgcactgaagtgattagttccctctggctttctataattttaagtctttattatggcatgatggcaaggttgtagcctaaagctcatcacttttgtaggtggtgttagtttttagactagcttttataaatactaattgacataaagcatcaaagattatttatatatttaggctaaaaataatgtttatctccttatgcaatcctgattatgtgaaaatatggt

SEQ ID NO: 150280 - DNA, 4259 bp, Homo sapiens
  Payload ID: 9672
  Gene Symbol: LYSMD3
  Gene Name: LysM, putative peptidoglycan-binding, domain containing 3
  Uniprot ID: Q7Z3D4
  ENST ID: ENST00000315948
  CDS Start-End: 146-1066
gacgttggcggcagaggcggaggcggacggggtcagcccaaagcagaggctcggccatgaacttacccgggacagcggcggcggcggaccttttggccatcttctcgcagagtgctccctgctaacggggacagattttaacattatggcagggaggcatcagaatcgtagttttcctcttccaggagttcagtcaagtggtcaagtacatgcatttggaaattgttcagacagtgatattttggaggaggatgctgaagtgtatgaacttcgatccagaggaaaagagaaagtccgaagaagtacatcaagagatagacttgacgacattatagtattaacaaaagatatacaagaaggagatacattaaatgcaatagcccttcagtactgttgtacggtagcagatatcaagagagttaacaatctcatcagtgatcaagacttttttgcccttaggtctatcaaaattccagtaaaaaagttcagttccttgaccgaaacactttgtcctccaaaaggaagacagacttcacgtcattcatctgttcaatactcttccgaacaacaggaaattttgccagctaatgattctcttgcttacagtgactcagctggtagctttttaaaagaagtagaccgagacatagaacaaatagtaaagtgtacagacaataagagagagaacctcaatgaggtagtatcggccttaacagcacaacaaatgcgttttgaacctgataacaaaaacactcaacgtaaagacccctattatggagcagactggggaatagggtggtggacagctgtagtgataatgttgatagtaggtataataacaccagtgttttatttgttgtattatgaaattttagctaaggtggatgttagtcatcattcaacagtggactcttcacatttacattcaaaaatcacacccccatcacagcagagagaaatggaaaatggaattgtgccaactaaaggaatacatttcagccaacaagatgatcataaactgtatagtcaagattctcagtcacctgctgctcaacaggaaacatagcaattagctcataatcaaatgttagtggtcacatgtgcatctggaatgtggtgaatcagttatatccaataatagcttcaaaggcagaatttagagagattgaggatgcttttgtttttaacaaaagggtttcacactttgaaaattttttgagcaactagttgttgatgttgagagcagttgatccataaatctggtgtgtgaatgtttcaagcagaaattaatttaaatgtgtgtttaggaagtacttaacttggaagatgtatcatttttcttaaaatgcatgtttaaattttatttttttaagtaatttttaaaaagtttattaatgttaaatttatgatgcagaatgatagcatcagatgtctgcagctgaaaaaaatttactactatgaacccccaaaatattcagttgcaagaaaatttgattctaaaattattcatggtaggatacgtaacacaccccttcaaaacttttaaaaaatacatttagcacatgtgctatgaaagcatacgtacaaagagaaaggggaaagtgatttataattcctacaacagaggccaagaaatagattaaaatattttcaagaccccaaaataatgtattatggttgggaagtcagtagaacactggaataggtgaagacctgacagtaatttttgtcttaagaatgctttctttaggacagaccctttaacctcacctctgtgcatctgtttttaaaatgattatatttgcctctgatatttgaaagcacttttgtagttttgatgatgaaaaatatattaaacgtgcatattaccattatttaggaaataattccttatatactgtgataaatcattgctgttacatacagtaacatgccttaattacatttaatgccttactgctttatgtaagtaaatccaagtttcagaattaaaaataagcattatttcatatggtccaatcagattcgttacataggctatataaatttgtctccattttcaccatcaagcacaaataattgggtcaaaactgcctttgaggtctgttgaagaaaatggttcattaagcaaaaaagagtagaggtattttatattagcagtaacagacaaattatttagtaatcccttaacctctgtttttcaaagagaaaatatccaatttagacttttttcctgatctctatatatagcatcaaattgggaaacaaaggccaaaggtgtatagattgcttgaaagggggtggtagtgcctctttttaagatctgttgagtcggctacagtctggctaagtaagaagcatttgcatactgattccatcatttaatctttaaaagtatgtgttttaaaaatgtaaccagaatgattcttcaatagaaatgagatttggtggagtctggattgcctgttttgtatataatatatacttaagatatataataccacctcattttctgggcattatttcctaattgttgatgtttcaggcttttgataagtcattttatatatttcaaatttaactcagaataagtaaatatttatggcaaatgcagttttatgtactttcaggagaagaccatcaggaaaagacaggacaaagaagtcaaacattaaagcccttgcaaatattagaggaccttagacaattaccaaaaagtgtttaatagggaagttgcaaatgattctcttagtaaattaaacatttaaaaagtagttttaatgtgccttgggcatcttgaaaagaagagtgtgatataatttatgcttagtgttaactggtcattttacattgtatttattaagtctgctgaaaaatgaggttttaaggaagaaaatgcagattattttagggtaaacaggccaggtgtcctttgaagaactttgtttacatcaaattgatgaaattacagtcagtgattccttactttttttgctagttgtactttgaaattgttatgggttcgatttccaaaatatgtaacttattttttaaaggaataaggtgtgctgtgtatttgttgattaaaaatcatttgtcttgcagagtatccttttttgaaggaaatatacatccttataacacatcaggtagttttcttttttctgtatttaaattatatatttgaattaattgaatataatttgagttacatataattctatataaaggttacatattgaattatggttctaatctgtttaggaaagaaatgaattttctaagcatttaatacatttggaataattttagtttctaaaaagtactaatgtaagttaagtttatatcaaatgcaaattaccttgtataactaacaagcacagttattgtttaacattatggattttaattgtgttgacacccttctttgaatttgttgctttacatgtgtgtctgtgtgtgtgtctgcatgtgtgcacgcatgtacttgtatgcaatgtaaaagtaacagcagaatcattgcatttggtttacttaaaattttggagttagcaagtaaacaaaaagctgatagttttatgaagtctcggttaaaataaaatttctttgctatctcactcctaggaagttatggagttcatattttcaaaagatatgttaaaaatggttacacactctgctggccacattaaaaattagaagactcatgttaaattatctcctccaaaggactttttatttacagcttttcttttcctggactctacctgcttggttcagtgtcctgaagagttatttaaatgaaccactacttagtaattagttcttttttaaagtatctacttctaaaattacctagttgaaaatatgaaggatatgcttagttttagaaatatcatgaagcaaggatctagtcagtgttacagggtaaaggtggagttttttaaagtctgtatttaaatggtgcactgatggattcatttttaatttgcattacaaaaatgttgctcaggtaatcagtattttcttccacgtatgtgcatattgcactgttagatcatagaaatatctgaatgctttaatttttatgtatgcaaaatctataaatcttttgtataatgtattttatacaaatgtaactgtagaacattgttagcatgtgtatctgtaaaaccagtttttaaaattttttgccccttatttttcatattttgaaagatctccaacatgtaataaagtttctcttattcaatctaaaa

SEQ ID NO: 150281 - DNA, 553 bp, Homo sapiens
  Payload ID: 9672
  Gene Symbol: LYSMD3
  Gene Name: LysM, putative peptidoglycan-binding, domain containing 3
  ENST ID: ENST00000453259
  CDS Start-End: 149-421
ggagacgttggcggcagaggcggaggcggacggggtcagcccaaagcagaggctcggccatgaacttacccgggacagcggcggcggcggaccttttggccatcttctcgcagagtgctccctgctaacggggacagattttaacattatggcagggaggcatcagaatcgtagttttcctcttccaggagttcagtcaagtggtcaagtacatgcatttggaaattgttcagacagtgatattttggaggaggatgctgaagtgtatgaacttcgatccagaggaaaagagaaagtccgaagaagtacatcaagagatagacttgacgacattatagtattaacaaaagatatacaagaaggagatacattaaatgcaatagcccttcagtactgttgtacgtgttccatttctcaatgaatgccatcgtccatcaagttgaccaaaccagaaatctaagcttcatactagacccactttatctctctgacatgaatcaggtagcagatatcaagagagttaacaatctcatcagtgatcaagacttttttg

SEQ ID NO: 150282 - DNA, 3863 bp, Homo sapiens
  Payload ID: 9672
  Gene Symbol: LYSMD3
  Gene Name: LysM, putative peptidoglycan-binding, domain containing 3
  Uniprot ID: Q7Z3D4
  ENST ID: ENST00000500869
  CDS Start-End: 210-662
aggcggacggggtcagcccaaagcagaggctcggccatgaacttacccgggacagcggcggcggcggaccttttggccatcttctcgcagagtgctccctgctaacggggacaggctgatttcctttcaccaagatactgaattttggacttcttcaaggctcagtcttggaccctcttctttttctatactctctagattttaacattatggcagggaggcatcagaatcgtagttttcctcttccaggagttcagtcaagtggtcaagtacatgcatttggaaattgttcagacagtgatattttggaggaggatgctgaagtgtatgaacttcgatccagaggaaaagagaaagtccgaagaagtacatcaagagatagacttgacgacattatagtattaacaaaagatatacaagaaggagatacattaaatgcaatagcccttcagtactgttgtacgctaaggtggatgttagtcatcattcaacagtggactcttcacatttacattcaaaaatcacacccccatcacagcagagagaaatggaaaatggaattgtgccaactaaaggaatacatttcagccaacaagatgatcataaactgtatagtcaagattctcagtcacctgctgctcaacaggaaacatagcaattagctcataatcaaatgttagtggtcacatgtgcatctggaatgtggtgaatcagttatatccaataatagcttcaaaggcagaatttagagagattgaggatgcttttgtttttaacaaaagggtttcacactttgaaaattttttgagcaactagttgttgatgttgagagcagttgatccataaatctggtgtgtgaatgtttcaagcagaaattaatttaaatgtgtgtttaggaagtacttaacttggaagatgtatcatttttcttaaaatgcatgtttaaattttatttttttaagtaatttttaaaaagtttattaatgttaaatttatgatgcagaatgatagcatcagatgtctgcagctgaaaaaaatttactactatgaacccccaaaatattcagttgcaagaaaatttgattctaaaattattcatggtaggatacgtaacacaccccttcaaaacttttaaaaaatacatttagcacatgtgctatgaaagcatacgtacaaagagaaaggggaaagtgatttataattcctacaacagaggccaagaaatagattaaaatattttcaagaccccaaaataatgtattatggttgggaagtcagtagaacactggaataggtgaagacctgacagtaatttttgtcttaagaatgctttctttaggacagaccctttaacctcacctctgtgcatctgtttttaaaatgattatatttgcctctgatatttgaaagcacttttgtagttttgatgatgaaaaatatattaaacgtgcatattaccattatttaggaaataattccttatatactgtgataaatcattgctgttacatacagtaacatgccttaattacatttaatgccttactgctttatgtaagtaaatccaagtttcagaattaaaaataagcattatttcatatggtccaatcagattcgttacataggctatataaatttgtctccattttcaccatcaagcacaaataattgggtcaaaactgcctttgaggtctgttgaagaaaatggttcattaagcaaaaaagagtagaggtattttatattagcagtaacagacaaattatttagtaatcccttaacctctgtttttcaaagagaaaatatccaatttagacttttttcctgatctctatatatagcatcaaattgggaaacaaaggccaaaggtgtatagattgcttgaaagggggtggtagtgcctctttttaagatctgttgagtcggctacagtctggctaagtaagaagcatttgcatactgattccatcatttaatctttaaaagtatgtgttttaaaaatgtaaccagaatgattcttcaatagaaatgagatttggtggagtctggattgcctgttttgtatataatatatacttaagatatataataccacctcattttctgggcattatttcctaattgttgatgtttcaggcttttgataagtcattttatatatttcaaatttaactcagaataagtaaatatttatggcaaatgcagttttatgtactttcaggagaagaccatcaggaaaagacaggacaaagaagtcaaacattaaagcccttgcaaatattagaggaccttagacaattaccaaaaagtgtttaatagggaagttgcaaatgattctcttagtaaattaaacatttaaaaagtagttttaatgtgccttgggcatcttgaaaagaagagtgtgatataatttatgcttagtgttaactggtcattttacattgtatttattaagtctgctgaaaaatgaggttttaaggaagaaaatgcagattattttagggtaaacaggccaggtgtcctttgaagaactttgtttacatcaaattgatgaaattacagtcagtgattccttactttttttgctagttgtactttgaaattgttatgggttcgatttccaaaatatgtaacttattttttaaaggaataaggtgtgctgtgtatttgttgattaaaaatcatttgtcttgcagagtatccttttttgaaggaaatatacatccttataacacatcaggtagttttcttttttctgtatttaaattatatatttgaattaattgaatataatttgagttacatataattctatataaaggttacatattgaattatggttctaatctgtttaggaaagaaatgaattttctaagcatttaatacatttggaataattttagtttctaaaaagtactaatgtaagttaagtttatatcaaatgcaaattaccttgtataactaacaagcacagttattgtttaacattatggattttaattgtgttgacacccttctttgaatttgttgctttacatgtgtgtctgtgtgtgtgtctgcatgtgtgcacgcatgtacttgtatgcaatgtaaaagtaacagcagaatcattgcatttggtttacttaaaattttggagttagcaagtaaacaaaaagctgatagttttatgaagtctcggttaaaataaaatttctttgctatctcactcctaggaagttatggagttcatattttcaaaagatatgttaaaaatggttacacactctgctggccacattaaaaattagaagactcatgttaaattatctcctccaaaggactttttatttacagcttttcttttcctggactctacctgcttggttcagtgtcctgaagagttatttaaatgaaccactacttagtaattagttcttttttaaagtatctacttctaaaattacctagttgaaaatatgaaggatatgcttagttttagaaatatcatgaagcaaggatctagtcagtgttacagggtaaaggtggagttttttaaagtctgtatttaaatggtgcactgatggattcatttttaatttgcattacaaaaatgttgctcaggtaatcagtattttcttccacgtatgtgcatattgcactgttagatcatagaaatatctgaatgctttaatttttatgtatgcaaaatctataaatcttttgtataatgtattttatacaaatgtaactgtagaacattgttagcatgtgtatctgtaaaaccagtttttaaaattttttgccccttatttttcatattttgaaagatctccaacatgtaataaagtttctcttattcaatctaaaatggaagccagtgaat

SEQ ID NO: 150283 - DNA, 1538 bp, Homo sapiens
  Payload ID: 9672
  Gene Symbol: LYSMD3
  Gene Name: LysM, putative peptidoglycan-binding, domain containing 3
  Uniprot ID: Q7Z3D4
  ENST ID: ENST00000509384
  CDS Start-End: 149-532
ggagacgttggcggcagaggcggaggcggacggggtcagcccaaagcagaggctcggccatgaacttacccgggacagcggcggcggcggaccttttggccatcttctcgcagagtgctccctgctaacggggacagattttaacattatggcagggaggcatcagaatcgtagttttcctcttccaggagttcagtcaagtggtcaagtacatgcatttggaaattgttcagacagtgatattttggaggaggatgctgaagtgtatgaacttcgatccagaggaaaagagaaagtccgaagaagtacatcaagagatagacttgacgacattatagtattaacaaaagatatacaagaaggagatacattaaatgcaatagcccttcagtactgttgtacggtctatcaaaattccagtaaaaaagttcagttccttgaccgaaacactttgtcctccaaaaggaagacagacttcacgtcattcatctgttcaatactcttccgaacaacaggaaattttgccagctaatgattctcttgcttacagtgactcagctggtagctttttaaaagaagtagaccgagacatagaacaaatagtaaagtgtacagacaataagagagagaacctcaatgaggtagtatcggccttaacagcacaacaaatgcgttttgaacctgataacaaaaacactcaacgtaaagacccctattatggagcagactggggaatagggtggtggacagctgtagtgataatgttgatagtaggtataataacaccagtgttttatttgttgtattatgaaattttagctaaggtggatgttagtcatcattcaacagtggactcttcacatttacattcaaaaatcacacccccatcacagcagagagaaatggaaaatggaattgtgccaactaaaggaatacatttcagccaacaagatgatcataaactgtatagtcaagattctcagtcacctgctgctcaacaggaaacatagcaattagctcataatcaaatgttagtggtcacatgtgcatctggaatgtggtgaatcagttatatccaataatagcttcaaaggcagaatttagagagattgaggatgcttttgtttttaacaaaagggtttcacactttgaaaattttttgagcaactagttgttgatgttgagagcagttgatccataaatctggtgtgtgaatgtttcaagcagaaattaatttaaatgtgtgtttaggaagtacttaacttggaagatgtatcatttttcttaaaatgcatgtttaaattttatttttttaagtaatttttaaaaagtttattaatgttaaatttatgatgcagaatgatagcatcagatgtctgcagctgaaaaaaatttactactatgaacccccaaaatattcagttgcaagaaaatttgattctaaaattattcatggtaggatacgtaacacaccccttcaaaacttttaaaaaatacatttagcacatgtgctatgaaagcatacgtacaaagagaaa

SEQ ID NO: 150284 - DNA, 2847 bp, Homo sapiens
  Payload ID: 9673
  Gene Symbol: LYSMD4
  Gene Name: LysM, putative peptidoglycan-binding, domain containing 4
  ENST ID: ENST00000332728
  CDS Start-End: 613-1125
gatgttcgtagccaatccgcaggcgcggtggcagctgcgggtcgcgggtcgcgggtcgcgagtcgccggtcgccggtcgcggcggagcctgggcgctgagaagggacttggagggaagcgggcctggagctgctgccgccgcccctgagctcggacgcgaaggctggccccgtccccgggctgccgccgtggtcctgcagtgaagaaaatgaggcacgaggaattgttaaccaagaccttccaaggcccagctgttgtgtgtgggactccgaccagccacgtatacatgtttaagaatggcagtggggactcgggggactcttctgaagaagagtctcaccgtgtggttttgcggccccggggcaaggagcgccacaagagcggtgtccaccagcctccccaggcgggagcaggtgacgtggtgctgctgcagcgggagctggcccaggaggacagcctcaacaagctggcgctgcagtatggctgcaaacattcagagtgattaacaatggcaaagttgcagatatcaagaaagtcaacaacttcatcagagaacaagacttatatgctttgaaatctgttaagattccagtgagaaaccatgggatcctgatggagacccacaaagaactgaaaccccttctgagcccgtcttccgagaccacagtgaccgtggaactgccagaggcagacagagcaggcgcgggcaccggtgcccaggccggccaactgatgggcttctttaaggggattgaccaggatattgagcgtgcagtgcagtcagaaatctttctacatgaaagttactgcatggacacctcccatcagccactgctcccggcacctccgaagacgcctatggatggtgcagattgtggcattcagtggtggaatgctgttttcatcatgctgctgattggtattgtcttgcctgtcttttatttggtctactttaaaatacaagctagtggtgagacccctaatagcttgaacacaactgtcatccccaatggctcgatggcaatgggtacagttccagggcaagcccccagactagcagttgcagtgccagccgtcacttctgcagacagccagttcagtcagaccacccaagcggggagctaagctttgtttttaaagactaggcccagctttagcaattggctgttgatgtgcctcagctgtcactggcgatgtcctaggggtgctgcattttgcttccggggaaggatggacacttttcagaagtcactgcagtattcccaattgcactggccctgggcatggccttacccagtctaagctggcaggatctaaaacagcagcgacctcggcccctatccagagaggtgcagcaagagagccatttccctgtgacatttagtggactggccagttcatagcagcactgtgaggacccccaagttggacgtgctcggagggaaagatttatggcctctgtcgagggacctgcagcgtgagagccagtggcatctgcgcggcttgcctggctcttgctgtatcctcacttcctgtggagcggggattggctctgagaaggagtgttctctgtctgcctggcaaaggtgctgtggaataggcttggcatgccaccctgttttagagagtgacagttacagttgtaacaagcctacttcatattggccccctcagttagcctttttgaggcaatgccatttctagagttgaaaaagccctggacccaaactgcggcactgttgaataaagggcagtcctactcctgtccttttagagtggcttagtgtgacacacaggcatctcccaggccaagcacacacaggctgcgcccagttccgcaggagccgtcccacagcgtggctctctggattctcccacttgtcctccttggaaggagctcttgctggccagtgtttggaggggaggatgagtgcctgtcactgaggcctcactatggttggcgtctgaagctgggcggtcgtcaggcctgtgctgagagccgcagcccctgtgcacacctaacacagggcgctccccctgctgcttccctggctcagttcttcggagctccagagtgagaaggccgcttcgtcctttttctctgggtgatgcccttagaataacactatatgcaatgtaactcacaatgttccaggaccaaagacttgatggaggggctagaggcgacccttgttgtaaaaggcgatcagaacacctgagggaggaaggggcttgcagttttcccagcccttctcgctgccaaggcagcagtggtgctgtggatgggctggggactgcgggacagagcctgctactacttgggagttggtgctgccctgtggcatggaggggtgggaggggctgagatggctgctggcccggcctccaagagttctggacaggaggcagacactgcccagatgctcggtggagggacagtgatggcctttgactcatgaggcctggagaaaagtatcaaaggtctcaccatgtaagagtgatttccgatttctctcctttcagttgtgtgaaaaaacagctggcctgggttccattagcaaattaaatcatcttcaatcttaaattagaaaccagaatgatcttcaggataaaaagaacttctgaatctctgcaataggaaatgtttcgatcatgcaagtgctttcccagccaaatgtctgtgctctctgtgtcactgagggccacaggttcctctaacatctgtcactgtcacttcaccaggcaggccttggagttccatgacaaaatcacttttgtcagacaaagaatgtatcctttacttttctcaaatggaataaaattatttcttctgtggaggaaaattga

SEQ ID NO: 150285 - DNA, 2885 bp, Homo sapiens
  Payload ID: 9673
  Gene Symbol: LYSMD4
  Gene Name: LysM, putative peptidoglycan-binding, domain containing 4
  Uniprot ID: Q5XG99
  ENST ID: ENST00000344791
  CDS Start-End: 274-1167
cgcggtggcagctgcgggtcgcgggtcgcgggtcgcgagtcgccggtcgccggtcgcggcggagcctgggcgctgagaagggacttggagggaagcgggcctggagctgctgccgccgcccctgagctcggacgcgaaggctggccccgtccccgggctgccgccgtggtcctgcagtgaagaaaatgaggcacgaggaattgttaaccaagaccttccaaggcccagctgttgtgtgtgggactccgaccagccacgtatacatgtttaagaatggcagtggggactcgggggactcttctgaagaagagtctcaccgtgtggttttgcggccccggggcaaggagcgccacaagagcggtgtccaccagcctccccaggcgggagcaggtgacgtggtgctgctgcagcgggagctggcccaggaggacagcctcaacaagctggcgctgcagtatggctgcaaacacattttattttagacctaatggggctggagataccaggcagaatttaattccggatttctatgcattcagagtgattaacaatggcaaagttgcagatatcaagaaagtcaacaacttcatcagagaacaagacttatatgctttgaaatctgttaagattccagtgagaaaccatgggatcctgatggagacccacaaagaactgaaaccccttctgagcccgtcttccgagaccacagtgaccgtggaactgccagaggcagacagagcaggcgcgggcaccggtgcccaggccggccaactgatgggcttctttaaggggattgaccaggatattgagcgtgcagtgcagtcagaaatctttctacatgaaagttactgcatggacacctcccatcagccactgctcccggcacctccgaagacgcctatggatggtgcagattgtggcattcagtggtggaatgctgttttcatcatgctgctgattggtattgtcttgcctgtcttttatttggtctactttaaaatacaagctagtggtgagacccctaatagcttgaacacaactgtcatccccaatggctcgatggcaatgggtacagttccagggcaagcccccagactagcagttgcagtgccagccgtcacttctgcagacagccagttcagtcagaccacccaagcggggagctaagctttgtttttaaagactaggcccagctttagcaattggctgttgatgtgcctcagctgtcactggcgatgtcctaggggtgctgcattttgcttccggggaaggatggacacttttcagaagtcactgcagtattcccaattgcactggccctgggcatggccttacccagtctaagctggcaggatctaaaacagcagcgacctcggcccctatccagagaggtgcagcaagagagccatttccctgtgacatttagtggactggccagttcatagcagcactgtgaggacccccaagttggacgtgctcggagggaaagatttatggcctctgtcgagggacctgcagcgtgagagccagtggcatctgcgcggcttgcctggctcttgctgtatcctcacttcctgtggagcggggattggctctgagaaggagtgttctctgtctgcctggcaaaggtgctgtggaataggcttggcatgccaccctgttttagagagtgacagttacagttgtaacaagcctacttcatattggccccctcagttagcctttttgaggcaatgccatttctagagttgaaaaagccctggacccaaactgcggcactgttgaataaagggcagtcctactcctgtccttttagagtggcttagtgtgacacacaggcatctcccaggccaagcacacacaggctgcgcccagttccgcaggagccgtcccacagcgtggctctctggattctcccacttgtcctccttggaaggagctcttgctggccagtgtttggaggggaggatgagtgcctgtcactgaggcctcactatggttggcgtctgaagctgggcggtcgtcaggcctgtgctgagagccgcagcccctgtgcacacctaacacagggcgctccccctgctgcttccctggctcagttcttcggagctccagagtgagaaggccgcttcgtcctttttctctgggtgatgcccttagaataacactatatgcaatgtaactcacaatgttccaggaccaaagacttgatggaggggctagaggcgacccttgttgtaaaaggcgatcagaacacctgagggaggaaggggcttgcagttttcccagcccttctcgctgccaaggcagcagtggtgctgtggatgggctggggactgcgggacagagcctgctactacttgggagttggtgctgccctgtggcatggaggggtgggaggggctgagatggctgctggcccggcctccaagagttctggacaggaggcagacactgcccagatgctcggtggagggacagtgatggcctttgactcatgaggcctggagaaaagtatcaaaggtctcaccatgtaagagtgatttccgatttctctcctttcagttgtgtgaaaaaacagctggcctgggttccattagcaaattaaatcatcttcaatcttaaattagaaaccagaatgatcttcaggataaaaagaacttctgaatctctgcaataggaaatgtttcgatcatgcaagtgctttcccagccaaatgtctgtgctctctgtgtcactgagggccacaggttcctctaacatctgtcactgtcacttcaccaggcaggccttggagttccatgacaaaatcacttttgtcagacaaagaatgtatcctttacttttctcaaatggaataaaattatttcttctgtggaggaaaa

SEQ ID NO: 150286 - DNA, 2122 bp, Homo sapiens
  Payload ID: 9673
  Gene Symbol: LYSMD4
  Gene Name: LysM, putative peptidoglycan-binding, domain containing 4
  ENST ID: ENST00000378904
  CDS Start-End: 1028-1423
agctgcgtttgctttggttagctagaaagcaggcccatcatgcatctgtaagaaagtgactggagtgtaggccctggcgtctaagccgagtaagatgccctgtcaatctgggtcctctgggaagcaagactgatgaaatgaggagcaccaaagctttacaccccagctatgtgcatttggggctggggctgcctgggaagagctcgtcctcagcccaaagcctgcaacagctgggatcagggcttacctctcacagacggggctcagcaactttctgcgggatgaggacacaagcccacttgacctggaacgtctgaaacctcctggccccgtggaagatgggaagaaacactcctcttcctctcagttttacaaccgagtggtcctcgggctgcttgtgagcaccggacgaccgaccgagcaggctgcagccaatcagctggcacagggctccgactgaaaatcatcttggctggtgccacagaatcggcctgaaaacaggatactgcctagagcaaggcacccaggggagccaagcaggaaaatgtaatgaattgactttaagtagctgcagctgtgattagagtatttttagccacaggactcaaccagctttcaaaacctgctaataagagccccaccgtagccagcgcaaaaatttagttttcagtttaacaccaggaatctgcttagctaggagctggcttagaaggcacatcaggagagaacatcttctactgaaagttgaagatttttcattttctagctgaattatgacaaagggagatgaccattaagtgcctgccagcatactgggacgtacacctaacactctgaaaactcaattcatgccagcacatctgtcttctgctgcatctagctcagcatcatgtatgtattttgggcaaaactaatcatttcacaccctagactttaaagagacccagaatctaatgatagctaacatacccaccccctctaacaggctttggcgtatttcctgtgagaagcagttactggaggccgaatggattccactcatccacagcactgtgcatgcaacagccagattaggccccggtgggactgcgtggcccactgcttcctatgggctccagggctgcccagcagggatgacccgggagccgacaagggggaggccagtgggggcgttgggacggtttccttgaccctgtctcaacccagagaaagaagcctgcaggtgaaaaaggtcttcgtgaaaggaatgaaaaaggagagggctttaggggaaggggctgcctggtggcaaagccagcgccttgtgtccccaggcaaacatgacagagtctcgacgcacaggaagagccagtccgtctttactggagtgagtgcgggagacaaacagtttacaacaacctttagcattgtcttcaccatttgataaaaagttcactattatatttattgtataatgaagaaaaacaacacattcagggaaaaattgagattaacttatttttcttaaaaggttcatctcaaggatggcaacaaagtccagcttgtgccgccaaacggttttacatgatcaaaccgtgtacagcttcttgtgtgaactgttgactacaaacatttaccaaatacataaatctcttttaaaaaagccattttaaatatagcaaagcagtgtcttcttgcacagcaaagtgaagaaagtttctacagagaaatagaagttttacatttgtaaaatctttttcacattctaatcatctagcttaagatccaatgccaggagttttcagcttccttatttactatgtatttcttgtgcgcatgatggttaatacagaaattatgttgatgcattactagttatccttctagttaaaggaaagggtaaaacatgtattgttcttgtagaacaaacccctgatttagtctataacaaaatggacataattgggctcaaaagatggagttttgattgggaccacctgtgtacacacaacagtgacttccactcgcggtggagtggccattagagtactgaggaaggacagctgttggaaactgtactttaaccagtgcaatttaagctttttttgcttttgttctttagtaataaaatacttctggaggg

SEQ ID NO: 150287 - DNA, 2672 bp, Homo sapiens
  Payload ID: 9673
  Gene Symbol: LYSMD4
  Gene Name: LysM, putative peptidoglycan-binding, domain containing 4
  Uniprot ID: Q5XG99
  ENST ID: ENST00000409796
  CDS Start-End: 64-954
ggggcctggacgagggggccgcggtctggctagggagccgcgcgggctcatggcgtgaagaaaatgaggcacgaggaattgttaaccaagaccttccaaggcccagctgttgtgtgtgggactccgaccagccacgtatacatgtttaagaatggcagtggggactcgggggactcttctgaagaagagtctcaccgtgtggttttgcggccccggggcaaggagcgccacaagagcggtgtccaccagcctccccaggcgggagcaggtgacgtggtgctgctgcagcgggagctggcccaggaggacagcctcaacaagctggcgctgcagtatggctgcaaagttgcagatatcaagaaagtcaacaacttcatcagagaacaagacttatatgctttgaaatctgttaagattccagtgagaaaccatgggatcctgatggagacccacaaagaactgaaaccccttctgagcccgtcttccgagaccacagtgaccgtggaactgccagaggcagacagagcaggcgcgggcaccggtgcccaggccggccaactgatgggcttctttaaggggattgaccaggatattgagcgtgcagtgcagtcagaaatctttctacatgaaagttactgcatggacacctcccatcagccactgctcccggcacctccgaagacgcctatggatggtgcagattgtggcattcagtggtggaatgctgttttcatcatgctgctgattggtattgtcttgcctgtcttttatttggtctactttaaaatacaagctagtggtgagacccctaatagcttgaacacaactgtcatccccaatggctcgatggcaatgggtacagttccagggcaagcccccagactagcagttgcagtgccagccgtcacttctgcagacagccagttcagtcagaccacccaagcggggagctaagctttgtttttaaagactaggcccagctttagcaattggctgttgatgtgcctcagctgtcactggcgatgtcctaggggtgctgcattttgcttccggggaaggatggacacttttcagaagtcactgcagtattcccaattgcactggccctgggcatggccttacccagtctaagctggcaggatctaaaacagcagcgacctcggcccctatccagagaggtgcagcaagagagccatttccctgtgacatttagtggactggccagttcatagcagcactgtgaggacccccaagttggacgtgctcggagggaaagatttatggcctctgtcgagggacctgcagcgtgagagccagtggcatctgcgcggcttgcctggctcttgctgtatcctcacttcctgtggagcggggattggctctgagaaggagtgttctctgtctgcctggcaaaggtgctgtggaataggcttggcatgccaccctgttttagagagtgacagttacagttgtaacaagcctacttcatattggccccctcagttagcctttttgaggcaatgccatttctagagttgaaaaagccctggacccaaactgcggcactgttgaataaagggcagtcctactcctgtccttttagagtggcttagtgtgacacacaggcatctcccaggccaagcacacacaggctgcgcccagttccgcaggagccgtcccacagcgtggctctctggattctcccacttgtcctccttggaaggagctcttgctggccagtgtttggaggggaggatgagtgcctgtcactgaggcctcactatggttggcgtctgaagctgggcggtcgtcaggcctgtgctgagagccgcagcccctgtgcacacctaacacagggcgctccccctgctgcttccctggctcagttcttcggagctccagagtgagaaggccgcttcgtcctttttctctgggtgatgcccttagaataacactatatgcaatgtaactcacaatgttccaggaccaaagacttgatggaggggctagaggcgacccttgttgtaaaaggcgatcagaacacctgagggaggaaggggcttgcagttttcccagcccttctcgctgccaaggcagcagtggtgctgtggatgggctggggactgcgggacagagcctgctactacttgggagttggtgctgccctgtggcatggaggggtgggaggggctgagatggctgctggcccggcctccaagagttctggacaggaggcagacactgcccagatgctcggtggagggacagtgatggcctttgactcatgaggcctggagaaaagtatcaaaggtctcaccatgtaagagtgatttccgatttctctcctttcagttgtgtgaaaaaacagctggcctgggttccattagcaaattaaatcatcttcaatcttaaattagaaaccagaatgatcttcaggataaaaagaacttctgaatctctgcaataggaaatgtttcgatcatgcaagtgctttcccagccaaatgtctgtgctctctgtgtcactgagggccacaggttcctctaacatctgtcactgtcacttcaccaggcaggccttggagttccatgacaaaatcacttttgtcagacaaagaatgtatcctttacttttctcaaatggaataaaattatttcttctgtggaggaaaa

SEQ ID NO: 150288 - DNA, 559 bp, Homo sapiens
  Payload ID: 9673
  Gene Symbol: LYSMD4
  Gene Name: LysM, putative peptidoglycan-binding, domain containing 4
  ENST ID: ENST00000450512
  CDS Start-End: 190-559
gtagccaatccgcaggcgcggtggcagctgcgggtcgcgggtcgcgggtcgcgagtcgccggtcgccggtcgcggcggagcctgggcgctgagtgaagaaaatgaggcacgaggaattgttaaccaagaccttccaaggcccagctgttgtgtgtgggactccgaccagccacgtatacatgtttaagaatggcagtggggactcgggggactcttctgaagaagagtctcaccgtgtggttttgcggccccggggcaaggagcgccacaagagcggtgtccaccagcctccccaggcgggagcaggtgacgtggtgctgctgcagcgggagctggcccaggaggacagcctcaacaagctggcgctgcagtatggctgcaaaacctaatggggctggagataccaggcagaatttaattccggatttctatgcattcagagtgattaacaatggcaaagttgcagatatcaagaaagtcaacaacttcatcagagaacaagacttatatgctttgaaatctgttaagattccagtgagaaaccatgggatcctgatgg

SEQ ID NO: 150289 - DNA, 2431 bp, Homo sapiens
  Payload ID: 9673
  Gene Symbol: LYSMD4
  Gene Name: LysM, putative peptidoglycan-binding, domain containing 4
  ENST ID: ENST00000545021
  CDS Start-End: 2-709
gatgttcgtagccaatccgcaggcgcggtggcagctgcgggtcgcgggtcgcgggtcgcgagtcgccggtcgccggtcgcggcggagcctgggcgctgaggttgcagatatcaagaaagtcaacaacttcatcagagaacaagacttatatgctttgaaatctgttaagattccagtgagaaaccatgggatcctgatggagacccacaaagaactgaaaccccttctgagcccgtcttccgagaccacagtgaccgtggaactgccagaggcagacagagcaggcgcgggcaccggtgcccaggccggccaactgatgggcttctttaaggggattgaccaggatattgagcgtgcagtgcagtcagaaatctttctacatgaaagttactgcatggacacctcccatcagccactgctcccggcacctccgaagacgcctatggatggtgcagattgtggcattcagtggtggaatgctgttttcatcatgctgctgattggtattgtcttgcctgtcttttatttggtctactttaaaatacaagctagtggtgagacccctaatagcttgaacacaactgtcatccccaatggctcgatggcaatgggtacagttccagggcaagcccccagactagcagttgcagtgccagccgtcacttctgcagacagccagttcagtcagaccacccaagcggggagctaagctttgtttttaaagactaggcccagctttagcaattggctgttgatgtgcctcagctgtcactggcgatgtcctaggggtgctgcattttgcttccggggaaggatggacacttttcagaagtcactgcagtattcccaattgcactggccctgggcatggccttacccagtctaagctggcaggatctaaaacagcagcgacctcggcccctatccagagaggtgcagcaagagagccatttccctgtgacatttagtggactggccagttcatagcagcactgtgaggacccccaagttggacgtgctcggagggaaagatttatggcctctgtcgagggacctgcagcgtgagagccagtggcatctgcgcggcttgcctggctcttgctgtatcctcacttcctgtggagcggggattggctctgagaaggagtgttctctgtctgcctggcaaaggtgctgtggaataggcttggcatgccaccctgttttagagagtgacagttacagttgtaacaagcctacttcatattggccccctcagttagcctttttgaggcaatgccatttctagagttgaaaaagccctggacccaaactgcggcactgttgaataaagggcagtcctactcctgtccttttagagtggcttagtgtgacacacaggcatctcccaggccaagcacacacaggctgcgcccagttccgcaggagccgtcccacagcgtggctctctggattctcccacttgtcctccttggaaggagctcttgctggccagtgtttggaggggaggatgagtgcctgtcactgaggcctcactatggttggcgtctgaagctgggcggtcgtcaggcctgtgctgagagccgcagcccctgtgcacacctaacacagggcgctccccctgctgcttccctggctcagttcttcggagctccagagtgagaaggccgcttcgtcctttttctctgggtgatgcccttagaataacactatatgcaatgtaactcacaatgttccaggaccaaagacttgatggaggggctagaggcgacccttgttgtaaaaggcgatcagaacacctgagggaggaaggggcttgcagttttcccagcccttctcgctgccaaggcagcagtggtgctgtggatgggctggggactgcgggacagagcctgctactacttgggagttggtgctgccctgtggcatggaggggtgggaggggctgagatggctgctggcccggcctccaagagttctggacaggaggcagacactgcccagatgctcggtggagggacagtgatggcctttgactcatgaggcctggagaaaagtatcaaaggtctcaccatgtaagagtgatttccgatttctctcctttcagttgtgtgaaaaaacagctggcctgggttccattagcaaattaaatcatcttcaatcttaaattagaaaccagaatgatcttcaggataaaaagaacttctgaatctctgcaataggaaatgtttcgatcatgcaagtgctttcccagccaaatgtctgtgctctctgtgtcactgagggccacaggttcctctaacatctgtcactgtcacttcaccaggcaggccttggagttccatgacaaaatcacttttgtcagacaaagaatgtatcctttacttttctcaaatggaataaaattatttcttctgtggaggaaaattga

SEQ ID NO: 150290 - DNA, 5060 bp, Homo sapiens
  Payload ID: 9674
  Gene Symbol: LCLAT1
  Gene Name: lysocardiolipin acyltransferase 1
  Uniprot ID: Q6UWP7
  ENST ID: ENST00000309052
  CDS Start-End: 210-1454
ggccggacgcctccgcgttacgggatgaattaacggcgggttccgcacggaggttgtgacccctacggagccccagcttgcccacgcaccccactcggcgtcgcgcggcgtgccctgcttgtcacaggtgggaggctggaactatcaggctgaaaaacagagtgggtactctcttctgggaagctggcaacaaatggatgatgtgatatatgcattccaggggaagggaaattgtggtgcttctgaacccatggtcaattaacgaggcagtttctagctactgcacgtacttcataaagcaggactctaaaagctttggaatcatggtgtcatggaaagggatttactttatactgactctgttttggggaagcttttttggaagcattttcatgctgagtccctttttacctttgatgtttgtaaacccatcttggtatcgctggatcaacaaccgccttgtggcaacatggctcaccctacctgtggcattattggagaccatgtttggtgtaaaagtgattataactggggatgcatttgttcctggagaaagaagtgtcattatcatgaaccatcggacaagaatggactggatgttcctgtggaattgcctgatgcgatatagctacctcagattggagaaaatttgcctcaaagcgagtctcaaaggtgttcctggatttggttgggccatgcaggctgctgcctatatcttcattcataggaaatggaaggatgacaagagccatttcgaagacatgattgattacttttgtgatattcacgaaccacttcaactcctcatattcccagaagggactgatctcacagaaaacagcaagtctcgaagtaatgcatttgctgaaaaaaatggacttcagaaatatgaatatgttttacatccaagaactacaggctttacttttgtggtagaccgtctaagagaaggtaagaaccttgatgctgtccatgatatcactgtggcgtatcctcacaacattcctcaatcagagaagcacctcctccaaggagactttcccagggaaatccactttcacgtccaccggtatccaatagacaccctccccacatccaaggaggaccttcaactctggtgccacaaacggtgggaagagaaagaagagaggctgcgttccttctatcaaggggagaagaatttttattttaccggacagagtgtcattccaccttgcaagtctgaactcagggtccttgtggtcaaattgctctctatactgtattggaccctgttcagccctgcaatgtgcctactcatatatttgtacagtcttgttaagtggtattttataatcaccattgtaatctttgtgctgcaagagagaatatttggtggactggagatcatagaacttgcatgttaccgacttttacacaaacagccacatttaaattcaaagaaaaatgagtaagattataaggtttgccatgtgaaaacctagagcatattttggaaatgttctaaacctttctaagctcagatgcatttttgcatgactatgtcgaatatttcttactgccatcattatttgttaaagatattttgcacttaattttgtgggaaaaatattgctacaattttttttaatctctgaatgtaatttcgatactgtgtacatagcagggagtgatcggggtgaaataacttgggccagaatattattaaacaatcatcaggcttttagcgacaaggaacacacacatttttcttaaaggcccaatcctaacagactccccgtaccagaggcagatctggaactcgtcaacaacagcccggatcacatgctgttactggactgcccaggtcacctcattgaggtgagcgctgtccctccaggtactcaggcaggtggtgcccaggctccctcccttggcgtccttcttcctgcgccaaacccatctcatccttaagatcagaaaatggaaccccctttgtcgtgaaaccgatcaagcattttgacaggaagcccttcattattcataacattgtatgctgaccaagacgtcagaagaccacctgtgcccttttctctcgtggaagataaaacctggactcagggagcaaccacaggctctccactttgaaactttagtttgaattttaaaagataggaagtaatacagtttaagttcctttctcacactcagtattgcatgcttagtgctggttttcttacaacattttggcaggtgtagctttttctgttaaaaatggtatacatgaagtcacatacttttttaaaggaacactcagaacattctgtcattccagtcagaaactgtcttttgaaatatttctttacaacctaccaaaaaaggaaggttgttttttctacatgtgcttgggtatctaacatctaccattaaaacaacaaatggcttgcagacagggcagtaatggtttatcctaaattactcaaccccttgtagccttgacaaattttaccttaaaaccaaaatgaaacacaaaaattaatccttaataatgatagcaagtgatctttctttttagttttagccttcctttttcaatagtaatatttaaacccacttttgaccaattgtttgcccaaatattcttgtcatttggagtcagtggaaaatccagcacaccaagcaccagtcttcttctgaggcaaaagaaaagtgttgtcattttcactctgttggagctgcacacttttttttctttttttttttctttttttttttgtcgtgtaagaaggatgctggtcagagctgcagaaaatatgaggcaattaaaagtctttagctgttagcaaacctgttagttttacttctgcattgaaccagcctcagaagctacttactgctttatgtactctttgggcattaatgccttctctgtaattatatctcgtttttgcttgacagtgacctacccaataattgcatcgtgcattgccatgaaaggtaaacacattgtgaactgaacttaccaagcagattctgtgagaaagcactggttgaggctgaacactgttgacacatcatttttattggaagagtattaactggtgcctcttctgaaacacaccaacccatattcctctgctcccccaaagctgtttctgatcctgctgggagcaactaactagttattatgcacatctgctccagacccagctctttaacttcatggttttacagcttgttttttctttttcttttctttttttttttttttttttaaaaaagcacctttttttgttgtttccccttaataaaagaggtttctaatttatgtttctctaagatttcctttggttgtatttagaaacacaaatagttttataatcaggattgcatttgtgctgggtaaaagaggagagctgtgctttctaccccaaagttgttggtaatggagccggtctgcccttcctacaaactcaagaggctcattgttcaaggtgtaacaacatttaattgcatgtcctctaacgctttgaaacctttagagggaagatcctcattttttacaattttgttccttttcatcatagaaaacatgtttaagataaaatacaaactttacctaccccaaattcataaagtacatttagtgctgtatagcactaaaacttagagatacagacactgtacttactttttaagaattagagacagtaactccaaaaataattgtccttttttctttctttctttttttacaataaggctcttgaaaattgtcattacttgtgttttcctatacattcatctgtgtgaaagcctttttcttctttgatttaaaaaaattaactatacagttaatggtttagaacttagaactacttagaattaatgctaaagtgtcaggaagaaattaatttagcttcaataattgtgactggcctcaggaattctcccttccacacctgcccacctcacctcactgcaccgcaccgcaccagagccagagcagctgcttgtctgcagcaggacacagttcctacatacgtttcagttctttcatggtaagctcaatggactttgaattgtttacagtgctgtatgtccaattgttaaatgtaccattctgaacgatgttaaagcaagtgtggtttatttatggcatgaaccatgtaacttgaaatatgaacttacaaggaggggcactcattaggtaacaagttcttacaccaaacttccttgatgaaataagccaaaataatcctaaaattcattagaagaacttgataaaagactcaaataaatgttagaaagagcccgtaattttaggactcctataaaattcttccttgtttgttaatgctattaaaactcagattcaagggaaataccagcttccacttgagtcactttgaaatagttaattcaacagcaccatgttagaaatatattggcagccaagactctgaactctgcagaaacatttgtttcacccagacttcaaactctagccctgactatgatgcccctgtgtgcatttacaataaagactccaacggagggagcctgttggtgttaaattgtttacatttctttatacaaataatgtgctttcagtgccttagttacagctccctttctgtttcttgttccaaggattctgtagtatgtagtgtgtttcttaggtaaagtctctttttgctactgaaagggaaatggtctctaaacactggtcactgtagcaggtaaacactactctaacgtggagaaatgagcttcatgctgaggtagtggttgccttagagctgttatttatgctgtagaaaacgaaaatggttttgctacctgataagcttcagattagatatagccctaaagttatcctgtacctgcattaaattttcattttagaagagaatcttggttttggtaattcatttttttttaagatcattatgtgcaaaacaccaagttttaaaaataactcacagaatggccttagttttcaatgtctgatggtatatttgtgagttgtgttatctgtaatatacatcccagaataaaggagtgaattaaatagttta

SEQ ID NO: 150291 - DNA, 4888 bp, Homo sapiens
  Payload ID: 9674
  Gene Symbol: LCLAT1
  Gene Name: lysocardiolipin acyltransferase 1
  Uniprot ID: Q6UWP7
  ENST ID: ENST00000379509
  CDS Start-End: 153-1283
gggacgcattactagggcgacggccggacgcctccgcgttacgggatgaattaacggcgggttccgcacggaggttgtgacccctacggagccccagcttgcccacgcaccccactcggcgtcgcgcggcgtgccctgcttgtcacagaatcatggtgtcatggaaagggatttactttatactgactctgttttggggaagcttttttggaagcattttcatgctgagtccctttttacctttgatgtttgtaaacccatcttggtatcgctggatcaacaaccgccttgtggcaacatggctcaccctacctgtggcattattggagaccatgtttggtgtaaaagtgattataactggggatgcatttgttcctggagaaagaagtgtcattatcatgaaccatcggacaagaatggactggatgttcctgtggaattgcctgatgcgatatagctacctcagattggagaaaatttgcctcaaagcgagtctcaaaggtgttcctggatttggttgggccatgcaggctgctgcctatatcttcattcataggaaatggaaggatgacaagagccatttcgaagacatgattgattacttttgtgatattcacgaaccacttcaactcctcatattcccagaagggactgatctcacagaaaacagcaagtctcgaagtaatgcatttgctgaaaaaaatggacttcagaaatatgaatatgttttacatccaagaactacaggctttacttttgtggtagaccgtctaagagaaggtaagaaccttgatgctgtccatgatatcactgtggcgtatcctcacaacattcctcaatcagagaagcacctcctccaaggagactttcccagggaaatccactttcacgtccaccggtatccaatagacaccctccccacatccaaggaggaccttcaactctggtgccacaaacggtgggaagagaaagaagagaggctgcgttccttctatcaaggggagaagaatttttattttaccggacagagtgtcattccaccttgcaagtctgaactcagggtccttgtggtcaaattgctctctatactgtattggaccctgttcagccctgcaatgtgcctactcatatatttgtacagtcttgttaagtggtattttataatcaccattgtaatctttgtgctgcaagagagaatatttggtggactggagatcatagaacttgcatgttaccgacttttacacaaacagccacatttaaattcaaagaaaaatgagtaagattataaggtttgccatgtgaaaacctagagcatattttggaaatgttctaaacctttctaagctcagatgcatttttgcatgactatgtcgaatatttcttactgccatcattatttgttaaagatattttgcacttaattttgtgggaaaaatattgctacaattttttttaatctctgaatgtaatttcgatactgtgtacatagcagggagtgatcggggtgaaataacttgggccagaatattattaaacaatcatcaggcttttagcgacaaggaacacacacatttttcttaaaggcccaatcctaacagactccccgtaccagaggcagatctggaactcgtcaacaacagcccggatcacatgctgttactggactgcccaggtcacctcattgaggtgagcgctgtccctccaggtactcaggcaggtggtgcccaggctccctcccttggcgtccttcttcctgcgccaaacccatctcatccttaagatcagaaaatggaaccccctttgtcgtgaaaccgatcaagcattttgacaggaagcccttcattattcataacattgtatgctgaccaagacgtcagaagaccacctgtgcccttttctctcgtggaagataaaacctggactcagggagcaaccacaggctctccactttgaaactttagtttgaattttaaaagataggaagtaatacagtttaagttcctttctcacactcagtattgcatgcttagtgctggttttcttacaacattttggcaggtgtagctttttctgttaaaaatggtatacatgaagtcacatacttttttaaaggaacactcagaacattctgtcattccagtcagaaactgtcttttgaaatatttctttacaacctaccaaaaaaggaaggttgttttttctacatgtgcttgggtatctaacatctaccattaaaacaacaaatggcttgcagacagggcagtaatggtttatcctaaattactcaaccccttgtagccttgacaaattttaccttaaaaccaaaatgaaacacaaaaattaatccttaataatgatagcaagtgatctttctttttagttttagccttcctttttcaatagtaatatttaaacccacttttgaccaattgtttgcccaaatattcttgtcatttggagtcagtggaaaatccagcacaccaagcaccagtcttcttctgaggcaaaagaaaagtgttgtcattttcactctgttggagctgcacacttttttttctttttttttttctttttttttttgtcgtgtaagaaggatgctggtcagagctgcagaaaatatgaggcaattaaaagtctttagctgttagcaaacctgttagttttacttctgcattgaaccagcctcagaagctacttactgctttatgtactctttgggcattaatgccttctctgtaattatatctcgtttttgcttgacagtgacctacccaataattgcatcgtgcattgccatgaaaggtaaacacattgtgaactgaacttaccaagcagattctgtgagaaagcactggttgaggctgaacactgttgacacatcatttttattggaagagtattaactggtgcctcttctgaaacacaccaacccatattcctctgctcccccaaagctgtttctgatcctgctgggagcaactaactagttattatgcacatctgctccagacccagctctttaacttcatggttttacagcttgttttttctttttcttttctttttttttttttttttttaaaaaagcacctttttttgttgtttccccttaataaaagaggtttctaatttatgtttctctaagatttcctttggttgtatttagaaacacaaatagttttataatcaggattgcatttgtgctgggtaaaagaggagagctgtgctttctaccccaaagttgttggtaatggagccggtctgcccttcctacaaactcaagaggctcattgttcaaggtgtaacaacatttaattgcatgtcctctaacgctttgaaacctttagagggaagatcctcattttttacaattttgttccttttcatcatagaaaacatgtttaagataaaatacaaactttacctaccccaaattcataaagtacatttagtgctgtatagcactaaaacttagagatacagacactgtacttactttttaagaattagagacagtaactccaaaaataattgtccttttttctttctttctttttttacaataaggctcttgaaaattgtcattacttgtgttttcctatacattcatctgtgtgaaagcctttttcttctttgatttaaaaaaattaactatacagttaatggtttagaacttagaactacttagaattaatgctaaagtgtcaggaagaaattaatttagcttcaataattgtgactggcctcaggaattctcccttccacacctgcccacctcacctcactgcaccgcaccgcaccagagccagagcagctgcttgtctgcagcaggacacagttcctacatacgtttcagttctttcatggtaagctcaatggactttgaattgtttacagtgctgtatgtccaattgttaaatgtaccattctgaacgatgttaaagcaagtgtggtttatttatggcatgaaccatgtaacttgaaatatgaacttacaaggaggggcactcattaggtaacaagttcttacaccaaacttccttgatgaaataagccaaaataatcctaaaattcattagaagaacttgataaaagactcaaataaatgttagaaagagcccgtaattttaggactcctataaaattcttccttgtttgttaatgctattaaaactcagattcaagggaaataccagcttccacttgagtcactttgaaatagttaattcaacagcaccatgttagaaatatattggcagccaagactctgaactctgcagaaacatttgtttcacccagacttcaaactctagccctgactatgatgcccctgtgtgcatttacaataaagactccaacggagggagcctgttggtgttaaattgtttacatttctttatacaaataatgtgctttcagtgccttagttacagctccctttctgtttcttgttccaaggattctgtagtatgtagtgtgtttcttaggtaaagtctctttttgctactgaaagggaaatggtctctaaacactggtcactgtagcaggtaaacactactctaacgtggagaaatgagcttcatgctgaggtagtggttgccttagagctgttatttatgctgtagaaaacgaaaatggttttgctacctgataagcttcagattagatatagccctaaagttatcctgtacctgcattaaattttcattttagaagagaatcttggttttggtaattcatttttttttaagatcattatgtgcaaaacaccaagttttaaaaataactcacagaatggccttagttttcaatgtctgatggtatatttgtgagttgtgttatctgtaatatacatcccagaataaaggagtgaattaaatagttt

SEQ ID NO: 150292 - DNA, 2774 bp, Homo sapiens
  Payload ID: 9674
  Gene Symbol: LCLAT1
  Gene Name: lysocardiolipin acyltransferase 1
  Uniprot ID: Q6UWP7
  ENST ID: ENST00000319406
  CDS Start-End: 203-1129
attactagggcgacggccggacgcctccgcgttacgggatgaattaacggcgggttccgcacggaggttgtgacccctacggagccccagcttgcccacgcaccccactcggcgtcgcgcggcgtgccctgcttgtcacaggctgaaaaacagagtgggtactctcttctgggaagctggcaacaaatggatgatgtgatatatgcattccaggggaagggaaattgtggtgcttctgaacccatggtcaattaacgaggcagtttctagctactgcacgtacttcataaagcaggactctaaaagctttggaatcatggtgtcatggaaagggatttactttatactgactctgttttggggaagcttttttggaagcattttcatgctgagtccctttttacctttgatgtttgtaaacccatcttggtatcgctggatcaacaaccgccttgtggcaacatggctcaccctacctgtggcattattggagaccatgtttggtgtaaaagtgattataactggggatgcatttgttcctggagaaagaagtgtcattatcatgaaccatcggacaagaatggactggatgttcctgtggaattgcctgatgcgatatagctacctcagattggagaaaatttgcctcaaagcgagtctcaaaggtgttcctggatttggttgggccatgcaggctgctgcctatatcttcattcataggaaatggaaggatgacaagagccatttcgaagacatgattgattacttttgtgatattcacgaaccacttcaactcctcatattcccagaagggactgatctcacagaaaacagcaagtctcgaagtaatgcatttgctgaaaaaaatggacttcagaaatatgaatatgttttacatccaagaactacaggctttacttttgtggtagaccgtctaagagaaggcaggaggcagagcgagggaagtaaaggaccacttcaaggagaactacaaatcactgctcaaggaaatcagagaggacacaaacaaatggaaaaacactccatgctcatggattggaagaatcaatatcgtgaaattggccatactgcccaaagcaatttacagattcaatgctattcccattaaactgccgttgacattcttcatagaattagaaaaaactcttaaaattcatatggaaccaacaaaaagcccatatagccaagacaatcttaagcaaaaagaacacagctggaggcatcacattacctgacttcaaactatactacagggctacagtaaccaaaatagcatggtactgttacaaaaacagacacatagaccaatggaacagaatagagaactcagaaataagtccgtgcaactacagccatctgatctttgacaaacctgacaaaaacaagcaatggggaaaggattccctatttaataaatggtgctgggagaactggctagccatatgcagaaaactgaaactggaccccttccttacaccttatgcaaaaattaactcaagatggattaaagacttaaatgaaaaacccaaaactataaaaaccctagaaaaaaatctaggcaataccattcaggacataagcatgggcaaagatttcatgatgaagatgacaaaagcaattgcaaccaaagcaaaaattgacaaatgggatctgattaaactaaagggcttctgcacaggaaaagaaactatcatcagagcaaacagacattctacagaaagggagaaaatttttgcaatctatccatctgacaaaggtctaatattcagagtcaacaagaaactaaaacaaatttacaagaaaaaacaaccccattaaaaaagtgggcaagggacatgaacagacacttctcaaaagaagacatttatatggctaataaacttatgaaaaaaagctcaacatcactgatcatcagagaaatgcaaatcaaaaccacaatgagataccatctcacaccagtccaaatggcaattatttaaaagtcatgaaacaacagatgctggcaaggctgtggagcgagaggaatgcttttacattgttggtgggaatgtatattagttcaaccattgtgtagctgggactacaggcgtccactaccacgcccggctaatttttttgtatttttagtagagacagggtttcaccatgttagccaggatggtctcgatctcctgacctcatgatccacccgcctcagcttcccaaagtgctgggattacaggcatgagccaccgcgcccagccaaggaaatatctttatagatgtcttcttgtgtacctgtgtaagaattcctttgggatatacagtcatgcaacacataatgacgttctagttagtggcaaaccacatatatgatggcagtctcataagatcataatggagctagaaaattcctatcacctggtgacatcatcacatgtttgtgatgatgctgatgtaaaccactatgctaccagttgtgtaaaacagtagcacataaaattatataccgtaatgataatgactatgttactgatttacatagttactgtactatactttttattgttacttgagtgtattccttctgcttatagtaaaagcagtaaaacagccccaggcaggtccttcaggaggtattccagaagaaggcattgctgtcataggacatgacagctccatgcttgttattacctctgaagaccttgcagtgagacaagatgtggaggtgaagacagtgatattgatgatcctgaccctgtgtaggcctaggc

SEQ ID NO: 150293 - DNA, 560 bp, Homo sapiens
  Payload ID: 9674
  Gene Symbol: LCLAT1
  Gene Name: lysocardiolipin acyltransferase 1
  ENST ID: ENST00000465538
  CDS Start-End: 192-560
cggccggacgcctccgcgttacgggatgaattaacggcgggttccgcacggaggttgtgacccctacggagccccagcttgcccacgcaccccactcggcgtcgcgcggcgtgccctgcttgtcacagataggaccatctagtctcaggaaaacaagctcagaacgctcgccgattctaccattatgaatcatggtgtcatggaaagggatttactttatactgactctgttttggggaagcttttttggaagcattttcatgctgagtccctttttacctttgatgtttgtaaacccatcttggtatcgctggatcaacaaccgccttgtggcaacatggctcaccctacctgtggcattattggagaccatgtttggtgtaaaagtgattataactggggatgcatttgttcctggagaaagaagtgtcattatcatgaaccatcggacaagaatggactggatgttcctgtggaattgcctgatgcgatatagctacctcagattggagaaaatttgcctcaaagcgagtctcaaaggtgttcctggatttggtagg

SEQ ID NO: 150294 - DNA, 658 bp, Homo sapiens
  Payload ID: 9674
  Gene Symbol: LCLAT1
  Gene Name: lysocardiolipin acyltransferase 1
  ENST ID: ENST00000497423
  CDS Start-End: 198-658
gaggctggaactatcaggtggggttacggcgcgaggaaaatggcggcggccgggggatctcagaggtgcaggaaggggagctgcagcccgggcttttcctcctgagccatggaccttccccgggccgcgacctcgggctgaaaaacagagtgggtactctcttctgggaagctggcaacaaatggatgatgtgatatatgcattccaggggaagggaaattgtggtgcttctgaacccatggtcaattaacgaggcagtttctagctactgcacgtacttcataaagcaggactctaaaagctttggaatcatggtgtcatggaaagggatttactttatactgactctgttttggggaagcttttttggaagcattttcatgctgagtccctttttacctttgatgtttgtaaacccatcttggtatcgctggatcaacaaccgccttgtggcaacatggctcaccctacctgtggcattattggagaccatgtttggtgtaaaagtgattataactggggatgcatttgttcctggagaaagaagtgtcattatcatgaaccatcggacaagaatggactggatgttcctgtggaattgcctgatgcgatatagctacctcagattggagaaaatttgcctcaaagcgagtctcaa

SEQ ID NO: 150295 - DNA, 536 bp, Homo sapiens
  Payload ID: 9674
  Gene Symbol: LCLAT1
  Gene Name: lysocardiolipin acyltransferase 1
  ENST ID: ENST00000488144
  CDS Start-End: 221-536
agggcgacggccggacgcctccgcgttacgggatgaattaacggcgggttccgcacggaggttgtgacccctacggagccccagcttgcccacgcaccccactcggcgtcgcgcggcgtgccctgcttgtcacagatgtagttctgatagcagcattcccctctccaccattgtaccatacaagtgagtgggcttggagaatacagttctcaagataatcatggtgtcatggaaagggatttactttatactgactctgttttggggaagcttttttggaagcattttcatgctgagtccctttttacctttgatgtttgtaaacccatcttggtatcgctggatcaacaaccgccttgtggcaacatggctcaccctacctgtggcattattggagaccatgtttggtgtaaaagtgattataactggggatgcatttgttcctggagaaagaagtgtcattatcatgaaccatcggacaagaatggactggatgttcctgtggaattgcctgatgcgatatagctacctcagat

SEQ ID NO: 150296 - DNA, 537 bp, Homo sapiens
  Payload ID: 9674
  Gene Symbol: LCLAT1
  Gene Name: lysocardiolipin acyltransferase 1
  ENST ID: ENST00000476535
  CDS Start-End: 126-537
aggtggggttacggcgcgaggaaaatggcggcggccgggggatctcagaggtgcaggaaggggagctgcagcccgggcttttcctcctgagccatggaccttccccgggccgcgacctcggaatcatggtgtcatggaaagggatttactttatactgactctgttttggggaagcttttttggaagcattttcatgctgagtccctttttacctttgatgtttgtaaacccatcttggtatcgctggatcaacaaccgccttgtggcaacatggctcaccctacctgtggcattattggagaccatgtttggtgtaaaagtgattataactggggatgcatttgttcctggagaaagaagtgtcattatcatgaaccatcggacaagaatggactggatgttcctgtggaattgcctgatgcgatatagctacctcagattggagaaaatttgcctcaaagcgagtctcaaaggtgttcctggatttggttgggccatgcaggctgctgcctatatcttcattcataggaaatgga

SEQ ID NO: 150297 - DNA, 584 bp, Homo sapiens
  Payload ID: 9674
  Gene Symbol: LCLAT1
  Gene Name: lysocardiolipin acyltransferase 1
  ENST ID: ENST00000476038
  CDS Start-End: 113-584
acgggatgaattaacggcgggttccgcacggaggttgtgacccctacggagccccagcttgcccacgcaccccactcggcgtcgcgcggcgtgccctgcttgtcacagaatcatggtgtcatggaaagggatttactttatactgactctgttttggggaagcttttttggaagcattttcatgctgagtccctttttacctttgatgtttgtaaacccatcttggtatcgctggatcaacaaccgccttgtggcaacatggctcaccctacctgtggcattattggagaccatgtttggtgtaaaagtgattataactggggatgcatttgttcctggagaaagaagtgtcattatcatgaaccatcggacaagaatggactggatgttcctgtggaattgcctgatgcgatatagctacctcagattggagaaaatttgcctcaaagcgagtctcaaaggtgttcctggatttgaaaacagcaagtctcgaagtaatgcatttgctgaaaaaaatggacttcagaaatatgaatatgttttacatccaagaactacaggctttacttttgtggtagaccgtc

SEQ ID NO: 150298 - DNA, 1862 bp, Homo sapiens
  Payload ID: 9674
  Gene Symbol: LCLAT1
  Gene Name: lysocardiolipin acyltransferase 1
  ENST ID: ENST00000478015
  CDS Start-End: 173-373
gttacgggatgaattaacggcgggttccgcacggaggttgtgacccctacggagccccagcttgcccacgcaccccactcggcgtcgcgcggcgtgccctgcttgtcacaggctgaaaaacagagtgggtactctcttctgggaagctggcaacaaatggatgatgtgatatatgcattccaggggaagggaaattgtggtgcttctgaacccatggtcaattaacgaggcagtttctagctactgcacgtacttcataaagcaggactctaaaagctttggccactccacatcacttgaattatctcctgatttccacctctgctcagatccgccactgcattcgattcttacaggaacgcaggccctataactgtgcttgcaggggatctaggttgcatgttccttaggagaatctaatgcctgatgatctgtcactgtctcctatcatccccagataggaccatctagtctcaggaaaacaagctcagaacgctcgccgattctaccattatgaatcatggtgtcatggaaagggatttactttatactgactctgttttggggaagcttttttggaagcattttcatgctgagtccctttttacctttgatgtttgtaaacccatcttggtatcgctggatcaacaaccgccttgtggcaacatggctcaccctacctgtggcattattggagaccatgtttggtgtaaaagtgattataactggggatgcatttgttcctggagaaagaagtgtcattatcatgaaccatcggacaagaatggactggatgttcctgtggaattgcctgatgcgatatagctacctcagattggagaaaatttgcctcaaagcgagtctcaaaggtgttcctggatttggttgggccatgcaggctgctgcctatatcttcattcataggaaatggaaggatgacaagagccatttcgaagacatgattgattacttttgtgatattcacgaaccacttcaactcctcatattcccagaagggactgatctcacagaaaacagcaagtctcgaagtaatgcatttgctgaaaaaaatggacttcagaaatatgaatatgttttacatccaagaactacaggctttacttttgtggtagaccgtctaagagaaggtaagaaccttgatgctgtccatgatatcactgtggcgtatcctcacaacattcctcaatcagagaagcacctcctccaaggagactttcccagggaaatccactttcacgtccaccggtatccaatagacaccctccccacatccaaggaggaccttcaactctggtgccacaaacggtgggaagagaaagaagagaggctgcgttccttctatcaaggggagaagaatttttattttaccggacagagtgtcattccaccttgcaagtctgaactcagggtccttgtggtcaaattgctctctatactgtattggaccctgttcagccctgcaatgtgcctactcatatatttgtacagtcttgttaagtggtattttataatcaccattgtaatctttgtgctgcaagagagaatatttggtggactggagatcatagaacttgcatgttaccgacttttacacaaacagccacatttaaattcaaagaaaaatgagtaagattataaggtttgccatgtgaaaacctagagcatattttggaaatgttctaaacctttctaagctcagatgcatttttgcatgactatgtcgaatatttcttactgccatcattatttgttaaagatattttgcacttaattttgtgggaaaaatattgctacaattttttttaatctctgaatgtaatttcgatactgtgtacatagca

SEQ ID NO: 150299 - DNA, 583 bp, Homo sapiens
  Payload ID: 9674
  Gene Symbol: LCLAT1
  Gene Name: lysocardiolipin acyltransferase 1
  ENST ID: ENST00000466477
  CDS Start-End: 163-583
gtagccttccgggacgcattactagggcgacggccggacgcctccgcgttacgggatgaattaacggcgggttccgcacggaggttgtgacccctacggagccccagcttgcccacgcaccccactcggcgtcgcgcggcgtgccctgcttgtcacagaatcatggtgtcatggaaagggatttactttatactgactctgttttggggaagcttttttggaagcattttcatgctgagtccctttttacctttgatgtttgtaaacccatcttggtatcgctggatcaacaaccgccttgtggcaacatggctcaccctacctgtggcattattggagaccatgtttggtgtaaaagtgattataactggggatgcatttgttcctggagaaagaagtgtcattatcatgaaccatcggacaagaatggactggatgttcctgtggaattgcctgatgcgatatagctacctcagattggagaaaatttgcctcaaagcgagtctcaaaggtgttcctggatttgcacagtcacatttgaaacctaatgatacaggcatactacaacaggattgttgctgca

SEQ ID NO: 150300 - DNA, 582 bp, Homo sapiens
  Payload ID: 9674
  Gene Symbol: LCLAT1
  Gene Name: lysocardiolipin acyltransferase 1
  ENST ID: ENST00000465200
  CDS Start-End: 174-582
gggacgcattactagggcgacggccggacgcctccgcgttacgggatgaattaacggcgggttccgcacggaggttgtgacccctacggagccccagcttgcccacgcaccccactcggcgtcgcgcggcgtgccctgcttgtcacaggtgggaggctggaactatcagaatcatggtgtcatggaaagggatttactttatactgactctgttttggggaagcttttttggaagcattttcatgctgagtccctttttacctttgatgtttgtaaacccatcttggtatcgctggatcaacaaccgccttgtggcaacatggctcaccctacctgtggcattattggagaccatgtttggtgtaaaagtgattataactggggatgcatttgttcctggagaaagaagtgtcattatcatgaaccatcggacaagaatggactggatgttcctgtggaattgcctgatgcgatatagctacctcagattggagaaaatttgcctcaaagcgagtctcaaaggtgttcctggatttggttgggccatgcaggctgctgcctatatcttcattcataggaaat

SEQ ID NO: 150301 - DNA, 2687 bp, Homo sapiens
  Payload ID: 9675
  Gene Symbol: LPAR1
  Gene Name: lysophosphatidic acid receptor 1
  Uniprot ID: Q92633
  ENST ID: ENST00000358883
  CDS Start-End: 349-1443
acggcgcgctgggctcacactgtcccgccgcggacgggctttgtggttgggggcgcgcgtgcgagtgccagtgagagtgtgggtgcgcgctgtgggccgcggcgcgggtgggtggccgtgcgttcttgcgagccggcctgcaggaggcgaggctcccctggcctcccgcacccagcggcggaccgagcccctggagggaagttgccgcagccgcccgggccgccggccctcctgtcccgcgccaggtacacagcttctcctagcatgacttcgatctgatcagcaaacaagaaaatttgtctcccgtagttctggggcgtgttcaccacctacaaccacagagctgtcatggctgccatctctacttccatccctgtaatttcacagccccagttcacagccatgaatgaaccacagtgcttctacaacgagtccattgccttcttttataaccgaagtggaaagcatcttgccacagaatggaacacagtcagcaagctggtgatgggacttggaatcactgtttgtatcttcatcatgttggccaacctattggtcatggtggcaatctatgtcaaccgccgcttccattttcctatttattacctaatggctaatctggctgctgcagacttctttgctgggttggcctacttctatctcatgttcaacacaggacccaatactcggagactgactgttagcacatggctccttcgtcagggcctcattgacaccagcctgacggcatctgtggccaacttactggctattgcaatcgagaggcacattacggttttccgcatgcagctccacacacggatgagcaaccggcgggtagtggtggtcattgtggtcatctggactatggccatcgttatgggtgctatacccagtgtgggctggaactgtatctgtgatattgaaaattgttccaacatggcacccctctacagtgactcttacttagtcttctgggccattttcaacttggtgacctttgtggtaatggtggttctctatgctcacatctttggctatgttcgccagaggactatgagaatgtctcggcatagttctggaccccggcggaatcgggataccatgatgagtcttctgaagactgtggtcattgtgcttggggcctttatcatctgctggactcctggattggttttgttacttctagacgtgtgctgtccacagtgcgacgtgctggcctatgagaaattcttccttctccttgctgaattcaactctgccatgaaccccatcatttactcctaccgcgacaaagaaatgagcgccacctttaggcagatcctctgctgccagcgcagtgagaaccccaccggccccacagaaggctcagaccgctcggcttcctccctcaaccacaccatcttggctggagttcacagcaatgaccactctgtggtttagaacggaaactgagatgaggaaccagccgtcctctcttggaggataaacagcctccccctacccaattgccagggcaaggtggggtgtgagagaggagaaaagtcaactcatgtacttaaacactaaccaatgacagtatttgttcctggaccccacaagacttgatatatattgaaaattagcttatgtgacaaccctcatcttgatccccatcccttctgaaagtaggaagttggagctcttgcaatggaattcaagaacagactctggagtgtccatttagactacactaactagacttttaaaagattttgtgtggtttggtgcaagtcagaataaattctggctagttgaatccacaacttcatttatatacaggcttcccttttttatttttaaaggatacgtttcacttaataaacacgtttatgcctatcagcatgtttgtgatggatgagactatggactgcttttaaactaccataattccattttttcccttacataggaaaactgtaagttggaattatcttttgtttagaaagcatgcatgtaatgtatgtatgcagtatgccttacttaaaaagattaaaaggatactaatgttaaatcttctaggaaatagaacctagacttcaaagccagtatttgtttaggtcatgaagcaaacaatgctctaatcacaatattaactgtttaattaaaatgttgtaacaagtataaaacagggaatgtaagtttattaccaaagtgatatgtattccaaaaaagtcatagaagatgaagcactataatattgttcccatatatttaaaatacccaagtacattctaattaccagtatatcagaggaaaattttcgtagtctttgtaaaataatatactcatcatagaaaacttgaaaaatgcagaaatgtataaaaaagcaaaaatgattactgataatatcacaacccagaagtaaccacctttaaaaagcaacccccatgtatgcctatatgtgtattgtatactttttttacataattggagtcatactgtaaacagttttataagtagatctttttcattgcaaaattgccacattttcttatggcattaaaaattttacaaaaacataattttaatggctatattatattccatttaatggatgcaactcagtttatttaaccattcccatgttgttaactatttaggttgtttctaattttcattattataaagttgcagaaatttggtgt

SEQ ID NO: 150302 - DNA, 2993 bp, Homo sapiens
  Payload ID: 9675
  Gene Symbol: LPAR1
  Gene Name: lysophosphatidic acid receptor 1
  Uniprot ID: Q92633
  ENST ID: ENST00000374430
  CDS Start-End: 256-1350
agaaagcagggctgcatggtgtggggatgctgctgctactcattcctgctcattccagtgttctggaaaatgaggtggacgtctgatttatgaagctccccatccacctatctgagtacctgacttctcaggactgacacctacagcatcaggtacacagcttctcctagcatgacttcgatctgatcagcaaacaagaaaatttgtctcccgtagttctggggcgtgttcaccacctacaaccacagagctgtcatggctgccatctctacttccatccctgtaatttcacagccccagttcacagccatgaatgaaccacagtgcttctacaacgagtccattgccttcttttataaccgaagtggaaagcatcttgccacagaatggaacacagtcagcaagctggtgatgggacttggaatcactgtttgtatcttcatcatgttggccaacctattggtcatggtggcaatctatgtcaaccgccgcttccattttcctatttattacctaatggctaatctggctgctgcagacttctttgctgggttggcctacttctatctcatgttcaacacaggacccaatactcggagactgactgttagcacatggctccttcgtcagggcctcattgacaccagcctgacggcatctgtggccaacttactggctattgcaatcgagaggcacattacggttttccgcatgcagctccacacacggatgagcaaccggcgggtagtggtggtcattgtggtcatctggactatggccatcgttatgggtgctatacccagtgtgggctggaactgtatctgtgatattgaaaattgttccaacatggcacccctctacagtgactcttacttagtcttctgggccattttcaacttggtgacctttgtggtaatggtggttctctatgctcacatctttggctatgttcgccagaggactatgagaatgtctcggcatagttctggaccccggcggaatcgggataccatgatgagtcttctgaagactgtggtcattgtgcttggggcctttatcatctgctggactcctggattggttttgttacttctagacgtgtgctgtccacagtgcgacgtgctggcctatgagaaattcttccttctccttgctgaattcaactctgccatgaaccccatcatttactcctaccgcgacaaagaaatgagcgccacctttaggcagatcctctgctgccagcgcagtgagaaccccaccggccccacagaaggctcagaccgctcggcttcctccctcaaccacaccatcttggctggagttcacagcaatgaccactctgtggtttagaacggaaactgagatgaggaaccagccgtcctctcttggaggataaacagcctccccctacccaattgccagggcaaggtggggtgtgagagaggagaaaagtcaactcatgtacttaaacactaaccaatgacagtatttgttcctggaccccacaagacttgatatatattgaaaattagcttatgtgacaaccctcatcttgatccccatcccttctgaaagtaggaagttggagctcttgcaatggaattcaagaacagactctggagtgtccatttagactacactaactagacttttaaaagattttgtgtggtttggtgcaagtcagaataaattctggctagttgaatccacaacttcatttatatacaggcttcccttttttatttttaaaggatacgtttcacttaataaacacgtttatgcctatcagcatgtttgtgatggatgagactatggactgcttttaaactaccataattccattttttcccttacataggaaaactgtaagttggaattatcttttgtttagaaagcatgcatgtaatgtatgtatgcagtatgccttacttaaaaagattaaaaggatactaatgttaaatcttctaggaaatagaacctagacttcaaagccagtatttgtttaggtcatgaagcaaacaatgctctaatcacaatattaactgtttaattaaaatgttgtaacaagtataaaacagggaatgtaagtttattaccaaagtgatatgtattccaaaaaagtcatagaagatgaagcactataatattgttcccatatatttaaaatacccaagtacattctaattaccagtatatcagaggaaaattttcgtagtctttgtaaaataatatactcatcatagaaaacttgaaaaatgcagaaatgtataaaaaagcaaaaatgattactgataatatcacaacccagaagtaaccacctttaaaaagcaacccccatgtatgcctatatgtgtattgtatactttttttacataattggagtcatactgtaaacagttttataagtagatctttttcattgcaaaattgccacattttcttatggcattaaaaattttacaaaaacataattttaatggctatattatattccatttaatggatgcaactcagtttatttaaccattcccatgttgttaactatttaggttgtttctaattttcattattataaagttgcagaaatttggtgtacataaaactgtctccatataattgattattaggatatattcccatgaaggattctttttttaaaaaaatgtgaaatgtcatcttgtacttacacctttcatgaaaagggatttcctgcttttgtactgcatgggtggcagttgtgaggaaaagccagtcaaatgacctttttacaaaagaaatgcagtggtcacttcagttgagagtgactttttaatacaacaagatcaactagaagaattcaactgtctcaagaatcaaggtaccccaatatatctcgcaattccaaactttgtttgagggactcgttatccagctcttggtagccacacctgcaatgtaaaatggaagaaaatgcaaagaaaccaaatgtgccgagtgaataaaggattgtcata

SEQ ID NO: 150303 - DNA, 3637 bp, Homo sapiens
  Payload ID: 9675
  Gene Symbol: LPAR1
  Gene Name: lysophosphatidic acid receptor 1
  Uniprot ID: Q92633
  ENST ID: ENST00000374431
  CDS Start-End: 385-1479
gtggttgggggcgcgcgtgcgagtgccagtgagagtgtgggtgcgcgctgtgggccgcggcgcgggtgggtggccgtgcgttcttgcgagccggcctgcaggaggcgaggctcccctggcctcccgcacccagcggcggaccgagcccctggagggaagttgccgcagccgcccgggccgccggccctcctgtcccgcgccaggtggacgtctgatttatgaagctccccatccacctatctgagtacctgacttctcaggactgacacctacagcatcaggtacacagcttctcctagcatgacttcgatctgatcagcaaacaagaaaatttgtctcccgtagttctggggcgtgttcaccacctacaaccacagagctgtcatggctgccatctctacttccatccctgtaatttcacagccccagttcacagccatgaatgaaccacagtgcttctacaacgagtccattgccttcttttataaccgaagtggaaagcatcttgccacagaatggaacacagtcagcaagctggtgatgggacttggaatcactgtttgtatcttcatcatgttggccaacctattggtcatggtggcaatctatgtcaaccgccgcttccattttcctatttattacctaatggctaatctggctgctgcagacttctttgctgggttggcctacttctatctcatgttcaacacaggacccaatactcggagactgactgttagcacatggctccttcgtcagggcctcattgacaccagcctgacggcatctgtggccaacttactggctattgcaatcgagaggcacattacggttttccgcatgcagctccacacacggatgagcaaccggcgggtagtggtggtcattgtggtcatctggactatggccatcgttatgggtgctatacccagtgtgggctggaactgtatctgtgatattgaaaattgttccaacatggcacccctctacagtgactcttacttagtcttctgggccattttcaacttggtgacctttgtggtaatggtggttctctatgctcacatctttggctatgttcgccagaggactatgagaatgtctcggcatagttctggaccccggcggaatcgggataccatgatgagtcttctgaagactgtggtcattgtgcttggggcctttatcatctgctggactcctggattggttttgttacttctagacgtgtgctgtccacagtgcgacgtgctggcctatgagaaattcttccttctccttgctgaattcaactctgccatgaaccccatcatttactcctaccgcgacaaagaaatgagcgccacctttaggcagatcctctgctgccagcgcagtgagaaccccaccggccccacagaaggctcagaccgctcggcttcctccctcaaccacaccatcttggctggagttcacagcaatgaccactctgtggtttagaacggaaactgagatgaggaaccagccgtcctctcttggaggataaacagcctccccctacccaattgccagggcaaggtggggtgtgagagaggagaaaagtcaactcatgtacttaaacactaaccaatgacagtatttgttcctggaccccacaagacttgatatatattgaaaattagcttatgtgacaaccctcatcttgatccccatcccttctgaaagtaggaagttggagctcttgcaatggaattcaagaacagactctggagtgtccatttagactacactaactagacttttaaaagattttgtgtggtttggtgcaagtcagaataaattctggctagttgaatccacaacttcatttatatacaggcttcccttttttatttttaaaggatacgtttcacttaataaacacgtttatgcctatcagcatgtttgtgatggatgagactatggactgcttttaaactaccataattccattttttcccttacataggaaaactgtaagttggaattatcttttgtttagaaagcatgcatgtaatgtatgtatgcagtatgccttacttaaaaagattaaaaggatactaatgttaaatcttctaggaaatagaacctagacttcaaagccagtatttgtttaggtcatgaagcaaacaatgctctaatcacaatattaactgtttaattaaaatgttgtaacaagtataaaacagggaatgtaagtttattaccaaagtgatatgtattccaaaaaagtcatagaagatgaagcactataatattgttcccatatatttaaaatacccaagtacattctaattaccagtatatcagaggaaaattttcgtagtctttgtaaaataatatactcatcatagaaaacttgaaaaatgcagaaatgtataaaaaagcaaaaatgattactgataatatcacaacccagaagtaaccacctttaaaaagcaacccccatgtatgcctatatgtgtattgtatactttttttacataattggagtcatactgtaaacagttttataagtagatctttttcattgcaaaattgccacattttcttatggcattaaaaattttacaaaaacataattttaatggctatattatattccatttaatggatgcaactcagtttatttaaccattcccatgttgttaactatttaggttgtttctaattttcattattataaagttgcagaaatttggtgtacataaaactgtctccatataattgattattaggatatattcccatgaaggattctttttttaaaaaaatgtgaaatgtcatcttgtacttacacctttcatgaaaagggatttcctgcttttgtactgcatgggtggcagttgtgaggaaaagccagtcaaatgacctttttacaaaagaaatgcagtggtcacttcagttgagagtgactttttaatacaacaagatcaactagaagaattcaactgtctcaagaatcaaggtaccccaatatatctcgcaattccaaactttgtttgagggactcgttatccagctcttggtagccacacctgcaatgtaaaatggaagaaaatgcaaagaaaccaaatgtgccgagtgaataaaggattgtcatatcaattagtgtgggtccatctgtagcaaatgggttgagtgtgtcagtatgtggttggttactgtgtattcgccaggaatcaccccgataggctgccaccctattaggtgatacctgtttaatatgttgtccaggtagactagtagttgcatcagtttgctgtaacaagtaaccagtgaggtaacacagtggtgaagcaggtcaggggaggtcaggaggatgtctgagagaaagaagtccgggagatgaatggctgtctaggaaggaggatgtcagtgcacggttagtgtttgagcagagggcagacttgtaaagtacctgtagtgaaaagaatgtggggacccgattagcagaaaggtgtttgcacgtactttatacaaaatacagaatactttatattggaagtgaaagaaatgaacgtggacttttacacatgtgcatatttttctggaggctatatggattatttgaaatgaaaagcatactaattggactttaataaatcattttcaatca

SEQ ID NO: 150304 - DNA, 1019 bp, Homo sapiens
  Payload ID: 9675
  Gene Symbol: LPAR1
  Gene Name: lysophosphatidic acid receptor 1
  ENST ID: ENST00000441240
  CDS Start-End: 474-1019
ctggcggctgacgctccctgagtggcgactccgtctccagccccgctgcggagcgcgggccggatctggggcggccagggcccggagccgcggagccctccccgccgcccggccgagcacgggaccccggcggggtgggcgcagggggcggccccgctctgggcgactgccgaggggcgggcggagggccgggctcggctggcggtggggcgggggccgccgggactgggcgcgcggcctgaagccagcccgggggcggcaggagagggacgcgcggcggcagcgagcgcaggtggacgtctgatttatgaagctccccatccacctatctgagtacctgacttctcaggactgacacctacagcatcaggtacacagcttctcctagcatgacttcgatctgatcagcaaacaagaaaatttgtctcccgtagttctggggcgtgttcaccacctacaaccacagagctgtcatggctgccatctctacttccatccctgtaatttcacagccccagttcacagccatgaatgaaccacagtgcttctacaacgagtccattgccttcttttataaccgaagtggaaagcatcttgccacagaatggaacacagtcagcaagctggtgatgggacttggaatcactgtttgtatcttcatcatgttggccaacctattggtcatggtggcaatctatgtcaaccgccgcttccattttcctatttattacctaatggctaatctggctgctgcagacttctttgctgggttggcctacttctatctcatgttcaacacaggacccaatactcggagactgactgttagcacatggctccttcgtcagggcctcattgacaccagcctgacggcatctgtggccaacttactggctattgcaatcgagaggcacattacggttttccgcatgcagctccacacacggatgagcaaccggcgggtagtggtggtcattgtggtcatctggactatggccatcgttatgggtgctataccc

SEQ ID NO: 150305 - DNA, 2490 bp, Homo sapiens
  Payload ID: 9675
  Gene Symbol: LPAR1
  Gene Name: lysophosphatidic acid receptor 1
  ENST ID: ENST00000541779
  CDS Start-End: 350-1390
ctcaagggaacagctcctgcccaggtctgtgggcactcagcatggatttcagtctccctgtgagtgatgggaaagaactaacagaggtggacgtctgatttatgaagctccccatccacctatctgagtacctgacttctcaggactgacacctacagcatcaggtacacagcttctcctagcatgacttcgatctgatcagcaaacaagaaaatttgtctcccgtagttctggggcgtgttcaccacctacaaccacagagctgtcatggctgccatctctacttccatccctgtaatttcacagccccagtgggaggtgatttcttctttggcgagagttcacagccatgaatgaaccacagtgcttctacaacgagtccattgccttcttttataaccgaagtggaaagcatcttgccacagaatggaacacagtcagcaagctggtgatgggacttggaatcactgtttgtatcttcatcatgttggccaacctattggtcatggtggcaatctatgtcaaccgccgcttccattttcctatttattacctaatggctaatctggctgctgcagacttctttgctgggttggcctacttctatctcatgttcaacacaggacccaatactcggagactgactgttagcacatggctccttcgtcagggcctcattgacaccagcctgacggcatctgtggccaacttactggctattgcaatcgagaggcacattacggttttccgcatgcagctccacacacggatgagcaaccggcgggtagtggtggtcattgtggtcatctggactatggccatcgttatgggtgctatacccagtgtgggctggaactgtatctgtgatattgaaaattgttccaacatggcacccctctacagtgactcttacttagtcttctgggccattttcaacttggtgacctttgtggtaatggtggttctctatgctcacatctttggctatgttcgccagaggactatgagaatgtctcggcatagttctggaccccggcggaatcgggataccatgatgagtcttctgaagactgtggtcattgtgcttggggcctttatcatctgctggactcctggattggttttgttacttctagacgtgtgctgtccacagtgcgacgtgctggcctatgagaaattcttccttctccttgctgaattcaactctgccatgaaccccatcatttactcctaccgcgacaaagaaatgagcgccacctttaggcagatcctctgctgccagcgcagtgagaaccccaccggccccacagaaggctcagaccgctcggcttcctccctcaaccacaccatcttggctggagttcacagcaatgaccactctgtggtttagaacggaaactgagatgaggaaccagccgtcctctcttggaggataaacagcctccccctacccaattgccagggcaaggtggggtgtgagagaggagaaaagtcaactcatgtacttaaacactaaccaatgacagtatttgttcctggaccccacaagacttgatatatattgaaaattagcttatgtgacaaccctcatcttgatccccatcccttctgaaagtaggaagttggagctcttgcaatggaattcaagaacagactctggagtgtccatttagactacactaactagacttttaaaagattttgtgtggtttggtgcaagtcagaataaattctggctagttgaatccacaacttcatttatatacaggcttcccttttttatttttaaaggatacgtttcacttaataaacacgtttatgcctatcagcatgtttgtgatggatgagactatggactgcttttaaactaccataattccattttttcccttacataggaaaactgtaagttggaattatcttttgtttagaaagcatgcatgtaatgtatgtatgcagtatgccttacttaaaaagattaaaaggatactaatgttaaatcttctaggaaatagaacctagacttcaaagccagtatttgtttaggtcatgaagcaaacaatgctctaatcacaatattaactgtttaattaaaatgttgtaacaagtataaaacagggaatgtaagtttattaccaaagtgatatgtattccaaaaaagtcatagaagatgaagcactataatattgttcccatatatttaaaatacccaagtacattctaattaccagtatatcagaggaaaattttcgtagtctttgtaaaataatatactcatcatagaaaacttgaaaaatgcagaaatgtataaaaaagcaaaaatgattactgataatatcacaacccagaagtaaccacctttaaaaagcaacccccatgtatgcctatatgtgtattgtatactttttttacataattggagtcatactgtaaacagttttataagtagatctttttcattgcaaaattgccacattttcttatggcatt

SEQ ID NO: 150306 - DNA, 1791 bp, Homo sapiens
  Payload ID: 9676
  Gene Symbol: LPAR2
  Gene Name: lysophosphatidic acid receptor 2
  Uniprot ID: Q9HBW0
  ENST ID: ENST00000407877
  CDS Start-End: 149-1204
agaccccgcctcccgcgccctctcagcaacccgcacagggcgcacccggacgctctaccgctcccgccgcagtcgccgggccatgggcctcgagcccgccccgaacccccgcgagcccgccttgtctgcggcgtgactggaggcccagatggtcatcatgggccagtgctactacaacgagaccatcggcttcttctataacaacagtggcaaagagctcagctcccactggcggcccaaggatgtggtcgtggtggcactggggctgaccgtcagcgtgctggtgctgctgaccaatctgctggtcatagcagccatcgcctccaaccgccgcttccaccagcccatctactacctgctcggcaatctggccgcggctgacctcttcgcgggcgtggcctacctcttcctcatgttccacactggtccccgcacagcccgactttcacttgagggctggttcctgcggcagggcttgctggacacaagcctcactgcgtcggtggccacactgctggccatcgccgtggagcggcaccgcagtgtgatggccgtgcagctgcacagccgcctgccccgtggccgcgtggtcatgctcattgtgggcgtgtgggtggctgccctgggcctggggctgctgcctgcccactcctggcactgcctctgtgccctggaccgctgctcacgcatggcacccctgctcagccgctcctatttggccgtctgggctctgtcgagcctgcttgtcttcctgctcatggtggctgtgtacacccgcattttcttctacgtgcggcggcgagtgcagcgcatggcagagcatgtcagctgccacccccgctaccgagagaccacgctcagcctggtcaagactgttgtcatcatcctgggggcgttcgtggtctgctggacaccaggccaggtggtactgctcctggatggtttaggctgtgagtcctgcaatgtcctggctgtagaaaagtacttcctactgttggccgaggccaactccctggtcaatgctgctgtgtactcttgccgagatgctgagatgcgccgcaccttccgccgccttctctgctgcgcgtgcctccgccagtccacccgcgagtctgtccactatacatcctctgcccagggaggtgccagcactcgcatcatgcttcccgagaacggccacccactgatggactccaccctttagctaccttgaacttcagcggtacgcggcaagcaacaaatccacagcccctgatgacttgtgggtgctcctggctcaacccaaccaacaggactgactgactggcaggacaaggtctggcatggcacagcaccactgccaggcctccccaggcacaccactctgcccagggaatgggggctttgggtcatctcccactgcctgggggagtcagatggggtgcaggaatctggctcttcagccatctcaggtttagggggtttgtaacagacattattctgttttcactgcgtatccttggtaagccctgtggactggttcctgctgtgtgatgctgagggttttaaggtggggagagataagggctctctcgggccatgctacccggtatgactgggtaatgaggacagactgtggacaccccatctacctgagtctgattctttagcagcagagactgaggggtgcagagtgtgagctgggaaaggtttgtggctccttgcagcctccagggactggcctgtccccgatagaattgaagcagtccacggggaggggatgatacaaggagtaaacctttctttacactc

SEQ ID NO: 150307 - DNA, 2546 bp, Homo sapiens
  Payload ID: 9676
  Gene Symbol: LPAR2
  Gene Name: lysophosphatidic acid receptor 2
  Uniprot ID: Q9HBW0
  ENST ID: ENST00000542587
  CDS Start-End: 904-1959
ataacaaagtaccgataaccgggacaatggggctgtgtgctccggaccgtgggagcccggggccgccgcagggaggccgagggaggaagccacagggcagggcagggcagggccgggctttgcagggggcagcgctgtcccagggtgaggggtacgggggcgggattgcaaaaccctagcgtgcgcccgatgatcagctggggccgcagaggtgggcctcgcacaggaggccgcggctcgctgatactgcgagctggcaaagccgaagctgggcgggggtccgggcggtgggagccaagtcggatcagggagtggcttgtaactcggcggccgattggacacgaagaagagagcggggtggggctgggagggttgggggtccggagcgggggcgcggacccaagaccacctggagctccgcccgggcagcgcggggtcacggcgggaattttcgggtcgccgagtgactcagccccgcaggctcgaaactgcgggcgcatgagtcgccgggccatgggcctcgagcccgccccgaacccccgcgagcccgccttgtctgcggcgtgactggaggcccagtctggagacgcctggaggcccggccatccatcccttccccaaccgctgtctttgtcccggagaccgccagtgtcctccgtcccacccggaacagcctattgccccgcccgcttgggaagcactcgcgcccaaatcccgccgactaacttctggggccgcctctctgtccactccgatcacctccacgcctcggcaccgccccctcgcagggttctagtcttattagtaggtaagaaacagctgctcctccacctccaccccagccccatggagcttgctttttccaggccaccgtagtcctcaccactgccactttgcttcgagatggtcatcatgggccagtgctactacaacgagaccatcggcttcttctataacaacagtggcaaagagctcagctcccactggcggcccaaggatgtggtcgtggtggcactggggctgaccgtcagcgtgctggtgctgctgaccaatctgctggtcatagcagccatcgcctccaaccgccgcttccaccagcccatctactacctgctcggcaatctggccgcggctgacctcttcgcgggcgtggcctacctcttcctcatgttccacactggtccccgcacagcccgactttcacttgagggctggttcctgcggcagggcttgctggacacaagcctcactgcgtcggtggccacactgctggccatcgccgtggagcggcaccgcagtgtgatggccgtgcagctgcacagccgcctgccccgtggccgcgtggtcatgctcattgtgggcgtgtgggtggctgccctgggcctggggctgctgcctgcccactcctggcactgcctctgtgccctggaccgctgctcacgcatggcacccctgctcagccgctcctatttggccgtctgggctctgtcgagcctgcttgtcttcctgctcatggtggctgtgtacacccgcattttcttctacgtgcggcggcgagtgcagcgcatggcagagcatgtcagctgccacccccgctaccgagagaccacgctcagcctggtcaagactgttgtcatcatcctgggggcgttcgtggtctgctggacaccaggccaggtggtactgctcctggatggtttaggctgtgagtcctgcaatgtcctggctgtagaaaagtacttcctactgttggccgaggccaactccctggtcaatgctgctgtgtactcttgccgagatgctgagatgcgccgcaccttccgccgccttctctgctgcgcgtgcctccgccagtccacccgcgagtctgtccactatacatcctctgcccagggaggtgccagcactcgcatcatgcttcccgagaacggccacccactgatggactccaccctttagctaccttgaacttcagcggtacgcggcaagcaacaaatccacagcccctgatgacttgtgggtgctcctggctcaacccaaccaacaggactgactgactggcaggacaaggtctggcatggcacagcaccactgccaggcctccccaggcacaccactctgcccagggaatgggggctttgggtcatctcccactgcctgggggagtcagatggggtgcaggaatctggctcttcagccatctcaggtttagggggtttgtaacagacattattctgttttcactgcgtatccttggtaagccctgtggactggttcctgctgtgtgatgctgagggttttaaggtggggagagataagggctctctcgggccatgctacccggtatgactgggtaatgaggacagactgtggacaccccatctacctgagtctgattctttagcagcagagactgaggggtgcagagtgtgagctgggaaaggtttgtggctccttgcagcctccagggactggcctgtccccgatagaattgaagcagtccacggggaggggatgatacaaggagtaaacctttctttacactc

SEQ ID NO: 150308 - DNA, 480 bp, Homo sapiens
  Payload ID: 9676
  Gene Symbol: LPAR2
  Gene Name: lysophosphatidic acid receptor 2
  ENST ID: ENST00000592061
  CDS Start-End: 405-480
actccgatcacctccacgcctcggcaccgccccctcgcagggttctagcaagtgacctcacccttgtgtgcacacgctcccgggtctctgctccctacactgactccggcaccaaagtgatcctccctcatctcttcccgcagctcacacccctttgtctttccctaaccctcctctccccacaacccaaaccgggtcacacattggcggcaggtgggctgggattcgaccatagatgggttttgtttcacttctggttcaaaaacctattgacttgggtgatgtcttgcacacaggtcttattagtaggtaagaaacagctgctcctccacctccaccccagccccatggagcttgctttttccaggccaccgtagtcctcaccactgccactttgcttcgagatggtcatcatgggccagtgctactacaacgagaccatcggcttcttctataacaacagtggcaaagagctcagct

SEQ ID NO: 150309 - DNA, 1823 bp, Homo sapiens
  Payload ID: 9676
  Gene Symbol: LPAR2
  Gene Name: lysophosphatidic acid receptor 2
  Uniprot ID: Q9HBW0
  ENST ID: ENST00000586703
  CDS Start-End: 180-1235
cgcacagggcgcacccggacgctctaccgctcccgccgcagtcgccgggccatgggcctcgagcccgccccgaacccccgcgagcccgccttgtctgcggcgtgactggaggcccagctgccgcccctccctgtgtccttccaagaagtgccacatgcactgatctcttgtgtccccagatggtcatcatgggccagtgctactacaacgagaccatcggcttcttctataacaacagtggcaaagagctcagctcccactggcggcccaaggatgtggtcgtggtggcactggggctgaccgtcagcgtgctggtgctgctgaccaatctgctggtcatagcagccatcgcctccaaccgccgcttccaccagcccatctactacctgctcggcaatctggccgcggctgacctcttcgcgggcgtggcctacctcttcctcatgttccacactggtccccgcacagcccgactttcacttgagggctggttcctgcggcagggcttgctggacacaagcctcactgcgtcggtggccacactgctggccatcgccgtggagcggcaccgcagtgtgatggccgtgcagctgcacagccgcctgccccgtggccgcgtggtcatgctcattgtgggcgtgtgggtggctgccctgggcctggggctgctgcctgcccactcctggcactgcctctgtgccctggaccgctgctcacgcatggcacccctgctcagccgctcctatttggccgtctgggctctgtcgagcctgcttgtcttcctgctcatggtggctgtgtacacccgcattttcttctacgtgcggcggcgagtgcagcgcatggcagagcatgtcagctgccacccccgctaccgagagaccacgctcagcctggtcaagactgttgtcatcatcctgggggcgttcgtggtctgctggacaccaggccaggtggtactgctcctggatggtttaggctgtgagtcctgcaatgtcctggctgtagaaaagtacttcctactgttggccgaggccaactccctggtcaatgctgctgtgtactcttgccgagatgctgagatgcgccgcaccttccgccgccttctctgctgcgcgtgcctccgccagtccacccgcgagtctgtccactatacatcctctgcccagggaggtgccagcactcgcatcatgcttcccgagaacggccacccactgatggactccaccctttagctaccttgaacttcagcggtacgcggcaagcaacaaatccacagcccctgatgacttgtgggtgctcctggctcaacccaaccaacaggactgactgactggcaggacaaggtctggcatggcacagcaccactgccaggcctccccaggcacaccactctgcccagggaatgggggctttgggtcatctcccactgcctgggggagtcagatggggtgcaggaatctggctcttcagccatctcaggtttagggggtttgtaacagacattattctgttttcactgcgtatccttggtaagccctgtggactggttcctgctgtgtgatgctgagggttttaaggtggggagagataagggctctctcgggccatgctacccggtatgactgggtaatgaggacagactgtggacaccccatctacctgagtctgattctttagcagcagagactgaggggtgcagagtgtgagctgggaaaggtttgtggctccttgcagcctccagggactggcctgtccccgatagaattgaagcagtccacggggaggggatgatacaaggagtaaacctttctttacactct

SEQ ID NO: 150310 - DNA, 558 bp, Homo sapiens
  Payload ID: 9676
  Gene Symbol: LPAR2
  Gene Name: lysophosphatidic acid receptor 2
  ENST ID: ENST00000588233
  CDS Start-End: 335-558
aaaaccctagcgtgcgcccgatgatcagctggggccgcagaggtgggcctcgcacaggaggccgcggctcgctgatactgcgagctggcaaagccgaagctgggcgggggtccgggcggtgggagccaagtcggatcagggagtggcttgtaactcggcggccgattggacacgaagaagagagcggggtggggctgggagggttgggggtccggagcgggggcgcggacccaagaccacctggagctccgcccgggcagcgcggggtcacggcgggaattttcgggtcgccgagtgactcagccccgcaggctcgaaactgcgggcgcatgagatggtcatcatgggccagtgctactacaacgagaccatcggcttcttctataacaacagtggcaaagagctcagctcccactggcggcccaaggatgtggtcgtggtggcactggggctgaccgtcagcgtgctggtgctgctgaccaatctgctggtcatagcagccatcgcctccaaccgccgcttccaccagcccatctactacctgctcggcaatctggc

SEQ ID NO: 150311 - DNA, 609 bp, Homo sapiens
  Payload ID: 9676
  Gene Symbol: LPAR2
  Gene Name: lysophosphatidic acid receptor 2
  ENST ID: ENST00000588461
  CDS Start-End: 549-609
aagaccacctggagctccgcccgggcagcgcggggtcacggcgggaattttcgggtcgccgagtgactcagccccgcaggctcgaaactgcgggcgcatgagcaacccgcacagggcgcacccggacgctctaccgctcccgccgcagtcgccgggccatgggcctcgagcccgccccgaacccccgcgagcccgccttgtctgcggcgtgactggaggcccagtctggagacgcctggaggcccggccatccatcccttccccaaccgctgtctttgtcccggagaccgccagtgtcctccgtcccacccggaacagcctattgccccgcccgcttgggaagcactcgcgcccaaatcccgccgactaacttctggggccgcctctctgtccactccgatcacctccacgcctcggcaccgccccctcgcagggttctagtcttattagtaggtaagaaacagctgctcctccacctccaccccagccccatggagcttgctttttccaggccaccgtagtcctcaccactgccactttgcttcgagatggtcatcatgggccagtgctactacaacgagaccatcggcttcttctataacaacagtg

SEQ ID NO: 150312 - DNA, 585 bp, Homo sapiens
  Payload ID: 9676
  Gene Symbol: LPAR2
  Gene Name: lysophosphatidic acid receptor 2
  ENST ID: ENST00000591042
  CDS Start-End: 345-585
agcaacccgcacagggcgcacccggacgctctaccgctcccgccgcagtcgccgggccatgggcctcgagcccgccccgaacccccgcgagcccgccttgtctgcggcgtgactggaggcccaggtcttattagtaggtaagaaacagctgctcctccacctccaccccagccccatggagcttgctttttccaggccaccgtagtcctcaccactgccactttgcttcgaggtatctgaatttgagacccttgtccttcctgcgctgaccctcctctgcagctgccgcccctccctgtgtccttccaagaagtgccacatgcactgatctcttgtgtccccagatggtcatcatgggccagtgctactacaacgagaccatcggcttcttctataacaacagtggcaaagagctcagctcccactggcggcccaaggatgtggtcgtggtggcactggggctgaccgtcagcgtgctggtgctgctgaccaatctgctggtcatagcagccatcgcctccaaccgccgcttccaccagcccatctactacctgctcggcaatctggccgcggctgacctcttcg

SEQ ID NO: 150313 - DNA, 1720 bp, Homo sapiens
  Payload ID: 9677
  Gene Symbol: LPAR3
  Gene Name: lysophosphatidic acid receptor 3
  Uniprot ID: Q9UBY5
  ENST ID: ENST00000370611
  CDS Start-End: 217-1278
aaactttcctttggctctggacgcgtcgcaggggtcgctggagaggaggcgctccgcccgcccgccgcgtcctccgctgcttctccgcgcccggctggagcccggcgcccggtcgccccgtcgcgctcgaccccgagggcatgcggcagccgcaggggcccccgctcccgggctcggcggcgcgggtgaacgtgagcggatgttcacttctccacaatgaatgagtgtcactatgacaagcacatggactttttttataataggagcaacactgatactgtcgatgactggacaggaacaaagcttgtgattgttttgtgtgttgggacgtttttctgcctgtttatttttttttctaattctctggtcatcgcggcagtgatcaaaaacagaaaatttcatttccccttctactacctgttggctaatttagctgctgccgatttcttcgctggaattgcctatgtattcctgatgtttaacacaggcccagtttcaaaaactttgactgtcaaccgctggtttctccgtcaggggcttctggacagtagcttgactgcttccctcaccaacttgctggttatcgccgtggagaggcacatgtcaatcatgaggatgcgggtccatagcaacctgaccaaaaagagggtgacactgctcattttgcttgtctgggccatcgccatttttatgggggcggtccccacactgggctggaattgcctctgcaacatctctgcctgctcttccctggcccccatttacagcaggagttaccttgttttctggacagtgtccaacctcatggccttcctcatcatggttgtggtgtacctgcggatctacgtgtacgtcaagaggaaaaccaacgtcttgtctccgcatacaagtgggtccatcagccgccggaggacacccatgaagctaatgaagacggtgatgactgtcttaggggcgtttgtggtatgctggaccccgggcctggtggttctgctcctcgacggcctgaactgcaggcagtgtggcgtgcagcatgtgaaaaggtggttcctgctgctggcgctgctcaactccgtcgtgaaccccatcatctactcctacaaggacgaggacatgtatggcaccatgaagaagatgatctgctgcttctctcaggagaacccagagaggcgtccctctcgcatcccctccacagtcctcagcaggagtgacacaggcagccagtacatagaggatagtattagccaaggtgcagtctgcaataaaagcacttcctaaactctggatgcctctcggcccacccaggcctcctctgggaaaagagctgttaagaatgattacctgtctctaacaaagcccatgtacagtgttatttgaggtctccattaatcactgctagatttctttaaaaaattttttttcatagtttaaaagcatgggcagtaaagagaggacctgctgcatttagagaaagcacagaaacgggagaggttcggcgggtccctgcttgtcctatgaactgctcagagctcctgtcagtccagctgggccttctgggttctggcaccatttcgtagccattctctttgtattttaaaaggacgttatgaaagggcttagaccaaaataaatcataatgttacttgagccaccttatatagctgcttggagagtctatgtagttctttctgcatgcattaaaaatgtttagaaatgcttc

SEQ ID NO: 150314 - DNA, 3345 bp, Homo sapiens
  Payload ID: 9677
  Gene Symbol: LPAR3
  Gene Name: lysophosphatidic acid receptor 3
  Uniprot ID: Q9UBY5
  ENST ID: ENST00000440886
  CDS Start-End: 40-1101
cttctttaaatttctttctaggatgttcacttctccacaatgaatgagtgtcactatgacaagcacatggactttttttataataggagcaacactgatactgtcgatgactggacaggaacaaagcttgtgattgttttgtgtgttgggacgtttttctgcctgtttatttttttttctaattctctggtcatcgcggcagtgatcaaaaacagaaaatttcatttccccttctactacctgttggctaatttagctgctgccgatttcttcgctggaattgcctatgtattcctgatgtttaacacaggcccagtttcaaaaactttgactgtcaaccgctggtttctccgtcaggggcttctggacagtagcttgactgcttccctcaccaacttgctggttatcgccgtggagaggcacatgtcaatcatgaggatgcgggtccatagcaacctgaccaaaaagagggtgacactgctcattttgcttgtctgggccatcgccatttttatgggggcggtccccacactgggctggaattgcctctgcaacatctctgcctgctcttccctggcccccatttacagcaggagttaccttgttttctggacagtgtccaacctcatggccttcctcatcatggttgtggtgtacctgcggatctacgtgtacgtcaagaggaaaaccaacgtcttgtctccgcatacaagtgggtccatcagccgccggaggacacccatgaagctaatgaagacggtgatgactgtcttaggggcgtttgtggtatgctggaccccgggcctggtggttctgctcctcgacggcctgaactgcaggcagtgtggcgtgcagcatgtgaaaaggtggttcctgctgctggcgctgctcaactccgtcgtgaaccccatcatctactcctacaaggacgaggacatgtatggcaccatgaagaagatgatctgctgcttctctcaggagaacccagagaggcgtccctctcgcatcccctccacagtcctcagcaggagtgacacaggcagccagtacatagaggatagtattagccaaggtgcagtctgcaataaaagcacttcctaaactctggatgcctctcggcccacccaggcctcctctgggaaaagagctgttaagaatgattacctgtctctaacaaagcccatgtacagtgttatttgaggtctccattaatcactgctagatttctttaaaaaattttttttcatagtttaaaagcatgggcagtaaagagaggacctgctgcatttagagaaagcacagaaacgggagaggttcggcgggtccctgcttgtcctatgaactgctcagagctcctgtcagtccagctgggccttctgggttctggcaccatttcgtagccattctctttgtattttaaaaggacgttatgaaagggcttagaccaaaataaatcataatgttacttgagccaccttatatagctgcttggagagtctatgtagttctttctgcatgcattaaaaatgtttagaaatgcttcagcaatggtgtttttttcctcaaagaaaccatggccagtagctaggtgttcagtaggaatcaaagaaaaatcagtaagagctccagattaaacctgatttttaactgaaggaacattctgaggaaaaatacttaaaagtaaaaaaggtcaatgtgaaaaccctttttgacctgaaaaaggccttagtatggtcctccatgcatgtgtgtgtatatgcatgtgtgtgtgtgtgtgtgtgtgtgtctatatatatatatatatatatatatatatatattcctgtttttactgatttttattgattttgttcaaagatatctggggattggattggggaatgcttaatctgactattgaaagaaacatggatccctggagtatttcagatacggggttaccgccccagactgcctcccgccagtccacattagttctcattttccctcatgatggtgaaaaacagtggagagctagtaaagggtttatgcagaaaacaaggagaagagaatgtgaagtttgaagtgcctatggaacatccagctgataatcttgcctagtaagagcaaaagaagccaagagaacaccaacgtttaaggagcaggtagagaaaacccagcaaaaggacagaggaataagaggaccaaagaacaatgttaagaatcaaggagagaggtcaggcacgctggctcatgcctgtaatcccagcactttgggaggctgaggcaggtggatcacttgaggccaggagtatgagaccagcctgggcaatgtggtgaaattgcatctttactaaaaatacaaaaactagccaggcatggtggcacatgcctgtaataccaggtacttgggaagctgaggcataagaatcacttgaacccgggaggtggaggttgcagagtgagccaagatcgcagcactgcactctagtctgggtgacagagcaagactctgtctcaaaaaaaaaaaaaaaaaaaaaaaaagactagagaatgtcagggaacacatgtgtatatttaaacaacttcactttgcatttaaaaactcgaaggacagcgaaggtgaaatcaattcacgggccacctagactttccagtctaggactagagctgtagcaatgatctgttgtgctgtacaagaaaagagaaagaggtgttcatttgagaacagatgtttttatacatcagagtaaaagctgtattgaagagcaggctgaatcccttccatatagaatgaaatatgagcttgaccccagtccttatcttcagttacctccataccaactggtggcatgttggatttagcatgtagaataatttcccatctcttatttttcccaaggttaatggcatccttctggtacctggcttacatgtgaactgaattttgatctgggttctattttgaatttttctccttcagagacctaagtaggcaacatgaaagacaagtagttaagaaagaaaaaatgatgtttcatacacacaggctaccaacgagagttttctatgtaaaacatttagagtgtattctgatttaaaatgagaataacttcaaggtagatattatagtatttatgtagtttgcaaaagaagtttacatttttttgctattgtgatataacatttatgtgcaagaactacttgtaataaaaggatttgagatgtcatgcttctaaatataatagcctaaaatagagaatattatgatttgaaagtgtagatttcacaaactctgtatagtatgtgggtctatctgaagcttttatcgaagctacctataaaataaaattttaaaagatctgt

SEQ ID NO: 150315 - DNA, 2611 bp, Homo sapiens
  Payload ID: 9678
  Gene Symbol: LPAR4
  Gene Name: lysophosphatidic acid receptor 4
  Uniprot ID: Q99677
  ENST ID: ENST00000435339
  CDS Start-End: 387-1499
gtcctgtttgctaaaggcatgcgggctacagcattcaagagagggagtcgttaacaaagggaaagagataaatgtaaataagctcacatttacagaatgagcggtttgcagtaaaaagctgcggcagcccagagtctgctactttaggctgggctaacctttccctgtaaaaaaaaaaaaaaaaaaaaaaaaaaaaaaatggataaaaatatgcacttccaaagggcgagttgcccatttacatgtttattagctaattatctacaggcatcagcacattctctcatctagcacactctttcttggggaggaaaatatttcctaccggtccatagtgtcagagtggtgaacccctgcagccagcaggcctcctgaaaaaaaagtccatgggtgacagaagattcattgacttccaattccaagattcaaattcaagcctcagacccaggttgggcaatgctactgccaataatacttgcattgttgatgattccttcaagtataatctcaatggtgctgtctacagtgttgtattcatcttgggtctgataaccaacagtgtctctctgtttgtcttctgtttccgcatgaaaatgagaagtgagactgctatttttatcaccaatctagctgtctctgatttgctttttgtctgtacactaccttttaaaatattttacaacttcaaccgccactggccttttggtgacaccctctgcaagatctctggaactgcattccttaccaacatctatgggagcatgctctttctcacctgtattagtgtggatcgtttcctggccattgtctatccttttcgatctcgtactattaggactaggaggaattctgccattgtgtgtgctggtgtctggatcctagtcctcagtggcggtatttcagcctctttgttttccaccactaatgtcaacaatgcaaccaccacctgctttgaaggcttctccaaacgtgtctggaagacttatttatccaagatcacaatatttattgaagttgttgggtttatcattcctctaatattgaatgtctcttgctcttctgtggtgctgagaactcttcgcaagcctgctactctgtctcaaattgggaccaataagaaaaaagtactgaaaatgatcacagtacatatggcagtctttgtggtatgctttgtaccctacaactctgtcctcttcttgtatgccctggtgcgctcccaagctattactaattgctttttggaaagatttgcaaagatcatgtacccaatcaccttgtgccttgcaactctgaactgttgttttgaccctttcatctattacttcacccttgaatcctttcagaagtccttctacatcaatgcccacatcagaatggagtccctgtttaagactgaaacacctttgaccacaaagccttcccttccagctattcaagaggaagtgagtgatcaaacaacaaataatggtggtgaattaatgctagaatccaccttttaggtatgagaaatgtgttcaggtccagatatggtttctcctataatttttcctatgctataaactaaagatttgaagctaatgatactgagaataatgcaccaaatccagtcagatacatttgtttgaaggtatactgtagagtttttattgctgttttgttcagtaattataggtcaaatctaattacaacaaccaagatggattgccaaactcttctgcttggttggaatttcattgtatcgcattatccaggtggctagtggcatttgataatatagagatgactttgaaactttcaaaaaggtatttctattccaatgatatttggtaattaggttgggcctataaatatagaacaaattcagggatttttaaaaaattgtgttactactgatatatgctagttttattttatttttttgaactgtcattgagtttattttagcacaagaatatttttagcctaacattattaataagaaatgtgtcaaatttttaacattggtaaaatatgttatgtgcattttgaaaacagaaaacaaattgcgttggcatgtacgtgggtgggaagaaaaagaaaattaacaggatttacacaattataatcaccagcagtgtgagtttaaaaaacttcgttgtttttacaccaaattaaaattttcatgtcaaacttcaaagccagaaagctgctaaatacgtgtctggcaggtaaaagctggaaaattacttaaaacaggaaagtgtcaataaaaaaacttgagcaacaccaacatattttttcttaaaatgtcacgttatcttcattttgggaaactaggttctataaaatatttatcctccctgttatactttggagcacagcacagccagaaaggggctgcatttgtgcccaggtcaggagcaaattgaaaaaaaaaataaagtaatacaaaaaaatcaaactataaagcaaaaacatttattaaaacctgaattaatcctttttggagggaggagtagagatatataacctgaaaatacttattctttcttatcgaattttggagcctaatatagccaggagctgctgaatttgtgcccctggattggaagcaaataaaaaaaaaaaacaa

SEQ ID NO: 150316 - DNA, 672 bp, Homo sapiens
  Payload ID: 9678
  Gene Symbol: LPAR4
  Gene Name: lysophosphatidic acid receptor 4
  ENST ID: ENST00000514744
  CDS Start-End: 536-672
ctgtttgctaaaggcatgcgggctacagcattcaagagagggagtcgttaacaaagggaaagagataaatgtaaataagctcacatttacagaatgagcggtttgcagtaaaaagctgcggcagcccagagtctgctactttaggctgggctaacctttccctgtaaaaaaaaaaaaaaaaaaaaaaaaaaaaaaatggataaaaatatgcacttccaaagggcgagttgcccatttacatgtttattagctaattatctacaggcatcagcacattctctcatctagcacactctttcttggggaagacagatttctggaggagtgtgaaaatcaactctccttaatattaagcacccattggaggaaatctctaactacagtgcctccaggaaactcattggttattccagtcttagataaaattggtgccaggatttggttcgaactaatgtggaggaaaatatttcctaccggtccatagtgtcagagtggtgaacccctgcagccagcaggcctcctgaaaaaaaagtccatgggtgacagaagattcattgacttccaattccaagattcaaattcaagcctcagacccaggttgggcaatgctactgccaataatacttgcattgttgatgattccttcaagtataatctcaatggtgctgtcta

SEQ ID NO: 150317 - DNA, 2155 bp, Homo sapiens
  Payload ID: 9678
  Gene Symbol: LPAR4
  Gene Name: lysophosphatidic acid receptor 4
  Uniprot ID: Q99677
  ENST ID: ENST00000614823
  CDS Start-End: 621-1733
ggacttcaggcctttttgtgtcctgtttgctaaaggcatgcgggctacagcattcaagagagggagtcgttaacaaagggaaagagataaatgtaaataagctcacatttacagaatgagcggtttgcagtaaaaagctgcggcagcccagagtctgctactttaggctgggctaacctttccctgtaaaaaaaaaaaaaaaaaaaaaaaaaaaaaaatggataaaaatatgcacttccaaagggcgagttgcccatttacatgtttattagctaattatctacaggcatcagcacattctctcatctagcacactctttcttggggaagacagatttctggaggagtgtgaaaatcaactctccttaatattaaggaccctgcccaatggtaacagttgttgccaagaaaagaaaaaaagaaaaaaaaaagacccaatcacccattggaggaaatctctaactacagtgcctccaggaaactcattggttattccagtcttagataaaattggtgccaggatttggttcgaactaatgtggaggaaaatatttcctaccggtccatagtgtcagagtggtgaacccctgcagccagcaggcctcctgaaaaaaaagtccatgggtgacagaagattcattgacttccaattccaagattcaaattcaagcctcagacccaggttgggcaatgctactgccaataatacttgcattgttgatgattccttcaagtataatctcaatggtgctgtctacagtgttgtattcatcttgggtctgataaccaacagtgtctctctgtttgtcttctgtttccgcatgaaaatgagaagtgagactgctatttttatcaccaatctagctgtctctgatttgctttttgtctgtacactaccttttaaaatattttacaacttcaaccgccactggccttttggtgacaccctctgcaagatctctggaactgcattccttaccaacatctatgggagcatgctctttctcacctgtattagtgtggatcgtttcctggccattgtctatccttttcgatctcgtactattaggactaggaggaattctgccattgtgtgtgctggtgtctggatcctagtcctcagtggcggtatttcagcctctttgttttccaccactaatgtcaacaatgcaaccaccacctgctttgaaggcttctccaaacgtgtctggaagacttatttatccaagatcacaatatttattgaagttgttgggtttatcattcctctaatattgaatgtctcttgctcttctgtggtgctgagaactcttcgcaagcctgctactctgtctcaaattgggaccaataagaaaaaagtactgaaaatgatcacagtacatatggcagtctttgtggtatgctttgtaccctacaactctgtcctcttcttgtatgccctggtgcgctcccaagctattactaattgctttttggaaagatttgcaaagatcatgtacccaatcaccttgtgccttgcaactctgaactgttgttttgaccctttcatctattacttcacccttgaatcctttcagaagtccttctacatcaatgcccacatcagaatggagtccctgtttaagactgaaacacctttgaccacaaagccttcccttccagctattcaagaggaagtgagtgatcaaacaacaaataatggtggtgaattaatgctagaatccaccttttaggtatgagaaatgtgttcaggtccagatatggtttctcctataatttttcctatgctataaactaaagatttgaagctaatgatactgagaataatgcaccaaatccagtcagatacatttgtttgaaggtatactgtagagtttttattgctgttttgttcagtaattataggtcaaatctaattacaacaaccaagatggattgccaaactcttctgcttggttggaatttcattgtatcgcattatccaggtggctagtggcatttgataatatagagatgactttgaaactttcaaaaaggtatttctattccaatgatatttggtaattaggttgggcctataaatatagaacaaattcagggatttttaaaaaattgtgttactactgatatatgctagttttattttatttttttg

SEQ ID NO: 150318 - DNA, 3171 bp, Homo sapiens
  Payload ID: 9679
  Gene Symbol: LPAR5
  Gene Name: lysophosphatidic acid receptor 5
  Uniprot ID: Q9H1C0
  ENST ID: ENST00000329858
  CDS Start-End: 758-1876
agtgggaggcaggacctagcagagcactgtcatgaagagggccccgggcagggtggggcacaagccacgagtggcatggactaagccacgagtagcatggactaaaccacctggcagacctaggaaaggaagacagacacccagggggaaccggtgaggacagcgagaggctggtgggttagtcatctggcatcagacggtgggtgtgccaggaagagttcccagacacagcaggaatatctgaacgatgggtgggggcagttcctagtcggggctggattaagtatccttagctgctggggtttcttctctggccagtccgtgaaggcctctgagggcaatgcttcctcttcactctctccttggcccgtgtggggttgggtgagtgcactgagctgggagggatgggctgagatctgctgaggtgggtgtgtcccctcccgccctgggagcaggtcctaccagcccagcccagcccagcccagcccagagcaggcagcggaagccagcttggggcagcgcagagcaacacggagcacaggtctctgctgctgatgaagctgtgaccaaacgcacccaacccttggcagccatctgtccctgcagccatagcccacattcccatgacctccctctgcttgttttgggaccatgtctgtacagcctctaggccccagccccggaggtgaatgccatgccatgattctggtgtgctccatggcatccccagcctagctcccaatcccactttggcacgatgttagccaacagctcctcaaccaacagttctgttctcccgtgtcctgactaccgacctacccaccgcctgcacttggtggtctacagcttggtgctggctgccgggctccccctcaacgcgctagccctctgggtcttcctgcgcgcgctgcgcgtgcactcggtggtgagcgtgtacatgtgtaacctggcggccagcgacctgctcttcaccctctcgctgcccgttcgtctctcctactacgcactgcaccactggcccttccccgacctcctgtgccagacgacgggcgccatcttccagatgaacatgtacggcagctgcatcttcctgatgctcatcaacgtggaccgctacgccgccatcgtgcacccgctgcgactgcgccacctgcggcggccccgcgtggcgcggctgctctgcctgggcgtgtgggcgctcatcctggtgtttgccgtgcccgccgcccgcgtgcacaggccctcgcgttgccgctaccgggacctcgaggtgcgcctatgcttcgagagcttcagcgacgagctgtggaaaggcaggctgctgcccctcgtgctgctggccgaggcgctgggcttcctgctgcccctggcggcggtggtctactcgtcgggccgagtcttctggacgctggcgcgccccgacgccacgcagagccagcggcggcggaagaccgtgcgcctcctgctggctaacctcgtcatcttcctgctgtgcttcgtgccctacaacagcacgctggcggtctacgggctgctgcggagcaagctggtggcggccagcgtgcctgcccgcgatcgcgtgcgcggggtgctgatggtgatggtgctgctggccggcgccaactgcgtgctggacccgctggtgtactactttagcgccgagggcttccgcaacaccctgcgcggcctgggcactccgcaccgggccaggacctcggccaccaacgggacgcgggcggcgctcgcgcaatccgaaaggtccgccgtcaccaccgacgccaccaggccggatgccgccagtcaggggctgctccgaccctccgactcccactctctgtcttccttcacacagtgtccccaggattccgccctctgaacacacatgccattgcgctgtccgtgcccgactcccaacgcctctcgttctgggaggcttacagggtgtacacacaagaaggtgggctgggcacttggacctttgggtggcaattccagcttagcaacgcagaagagtacaaagtgtggaagccagggcccagggaaggcagtgctgctggaaatggcttctttaaactgtgagcacgcagagcaccccttctccagcggtgggaagtgatgcagagagcccacccgtgcagagggcagaagaggacgaaatgcctttgggtgggcagggcattaaactgctaaaagctggttagatggaacagaaaatgggcattctggatctaaaccgccacaggggcctgagagctgaagagcaccaggtttggtggacaaagctactgagatgcctgttcatctgctgacttctgtctaggctcatggatgccaccccctttcatttcggcctaggcttcccctgctcaccactgaggcctaatacaagagttcctatggacagaactacattctttctcgcatagtgacttgtgacaatttagacttggcatccagcatgggatagttggggcaaggcaaaactaacttagagtttccccctcaacaacatccaagtccaaaccctttttaggttatcctttcttccatcacatccccttttccaggcctcctccattttaggtccttaatattctttctttttctctctctctcgtttctctcttctctctcctctcctctcctctctcttctcctcttctctctctctccctctctctcctttgtccagagtaaggataaaattctttctactaaagcactggttctcaaactttttggtctcagaccccactcttagaaattgaggatctcaaagagctttgcttatattttgttcttttgatacttaccatactagaaattaaagcgaatacatttttaaaataaatacacatgcacacattacattagccatgggagcaataatgtcaccacacacacttcatgaagcctctggaaaactctacagtatacttgtgagagaatgagagtgaaagggacaaataacatctgtgtagcagtattatgaaaatagcttgacctcgtggacttcctcagagggttggtccctggatcacactttgagaaccatacttgtcctgaagtattggagttcatgtctaacttcttcccagggcattatgtacagtgctttttattactgtggggagagggcagtgctaaataaattaatcactactgatagtc

SEQ ID NO: 150319 - DNA, 2695 bp, Homo sapiens
  Payload ID: 9679
  Gene Symbol: LPAR5
  Gene Name: lysophosphatidic acid receptor 5
  Uniprot ID: Q9H1C0
  ENST ID: ENST00000431922
  CDS Start-End: 282-1400
agcaaagagcagtgcccagcccagctcagagggcaaatgggacagatcccagaggccctgaggaggtctctgctgctgatgaagctgtgaccaaacgcacccaacccttggcagccatctgtccctgcagccatagcccacattcccatgacctccctctgcttgttttgggaccatgtctgtacagcctctaggccccagccccggaggtgaatgccatgccatgattctggtgtgctccatggcatccccagcctagctcccaatcccactttggcacgatgttagccaacagctcctcaaccaacagttctgttctcccgtgtcctgactaccgacctacccaccgcctgcacttggtggtctacagcttggtgctggctgccgggctccccctcaacgcgctagccctctgggtcttcctgcgcgcgctgcgcgtgcactcggtggtgagcgtgtacatgtgtaacctggcggccagcgacctgctcttcaccctctcgctgcccgttcgtctctcctactacgcactgcaccactggcccttccccgacctcctgtgccagacgacgggcgccatcttccagatgaacatgtacggcagctgcatcttcctgatgctcatcaacgtggaccgctacgccgccatcgtgcacccgctgcgactgcgccacctgcggcggccccgcgtggcgcggctgctctgcctgggcgtgtgggcgctcatcctggtgtttgccgtgcccgccgcccgcgtgcacaggccctcgcgttgccgctaccgggacctcgaggtgcgcctatgcttcgagagcttcagcgacgagctgtggaaaggcaggctgctgcccctcgtgctgctggccgaggcgctgggcttcctgctgcccctggcggcggtggtctactcgtcgggccgagtcttctggacgctggcgcgccccgacgccacgcagagccagcggcggcggaagaccgtgcgcctcctgctggctaacctcgtcatcttcctgctgtgcttcgtgccctacaacagcacgctggcggtctacgggctgctgcggagcaagctggtggcggccagcgtgcctgcccgcgatcgcgtgcgcggggtgctgatggtgatggtgctgctggccggcgccaactgcgtgctggacccgctggtgtactactttagcgccgagggcttccgcaacaccctgcgcggcctgggcactccgcaccgggccaggacctcggccaccaacgggacgcgggcggcgctcgcgcaatccgaaaggtccgccgtcaccaccgacgccaccaggccggatgccgccagtcaggggctgctccgaccctccgactcccactctctgtcttccttcacacagtgtccccaggattccgccctctgaacacacatgccattgcgctgtccgtgcccgactcccaacgcctctcgttctgggaggcttacagggtgtacacacaagaaggtgggctgggcacttggacctttgggtggcaattccagcttagcaacgcagaagagtacaaagtgtggaagccagggcccagggaaggcagtgctgctggaaatggcttctttaaactgtgagcacgcagagcaccccttctccagcggtgggaagtgatgcagagagcccacccgtgcagagggcagaagaggacgaaatgcctttgggtgggcagggcattaaactgctaaaagctggttagatggaacagaaaatgggcattctggatctaaaccgccacaggggcctgagagctgaagagcaccaggtttggtggacaaagctactgagatgcctgttcatctgctgacttctgtctaggctcatggatgccaccccctttcatttcggcctaggcttcccctgctcaccactgaggcctaatacaagagttcctatggacagaactacattctttctcgcatagtgacttgtgacaatttagacttggcatccagcatgggatagttggggcaaggcaaaactaacttagagtttccccctcaacaacatccaagtccaaaccctttttaggttatcctttcttccatcacatccccttttccaggcctcctccattttaggtccttaatattctttctttttctctctctctcgtttctctcttctctctcctctcctctcctctctcttctcctcttctctctctctccctctctctcctttgtccagagtaaggataaaattctttctactaaagcactggttctcaaactttttggtctcagaccccactcttagaaattgaggatctcaaagagctttgcttatattttgttcttttgatacttaccatactagaaattaaagcgaatacatttttaaaataaatacacatgcacacattacattagccatgggagcaataatgtcaccacacacacttcatgaagcctctggaaaactctacagtatacttgtgagagaatgagagtgaaagggacaaataacatctgtgtagcagtattatgaaaatagcttgacctcgtggacttcctcagagggttggtccctggatcacactttgagaaccatacttgtcctgaagtattggagttcatgtctaacttcttcccagggcattatgtacagtgctttttattactgtggggagagggcagtgctaaataaattaatcactactgatagtc

SEQ ID NO: 150320 - DNA, 2428 bp, Homo sapiens
  Payload ID: 9680
  Gene Symbol: LPAR6
  Gene Name: lysophosphatidic acid receptor 6
  Uniprot ID: P43657
  ENST ID: ENST00000345941
  CDS Start-End: 1144-2178
gaagctgaggagaagctgatgccatgcttcctgtacagcctgaagaaccacaaggtcttgatctgtcaccaggctgaagtgcagtggtacaatcaaagctcactgcagtctcaacctcctaggctcaaacaatcctcccacttcagcctcccaaccagctgggaccacaggttgacatcaccacacccaggtctgctggaatttgctggaggtccactccagaccctgtttgtctggatatcaccagcagaggttgcagaacaacaaagattgctgcctgttccttcctctggaagctttgtcccagaggggcacccaccagacggcagctggagctctcctgttccctctgctatggctcttcctcagtagaaacaactggcaacaaaattcaagtttatgattcattcatcagcaaacatgtgagaatcatctacaaagaaccaagaattgtgagaaagcgacctcaagatacaactggcaactgaggaaaaggcctcaattcaacaagagctaacaagcttgggagtttatttcggaatctttaaaagactcttctgcttacccacaatctgggatccactgcaggaaaacaaaaaaggaaaacttcatttaaaagaagcaagaagtaaaatgggacaaattgggaatgtttaagtctctgaaactctgcactgaaaagaaaataagattgataacttaagcttaacattctgaggcataaagaaacattaactttggagtattcatcttgactactgaaatacaagtttagaagacaagtggtttcattctggtcacagatcacagcttttctttaaatttataatcctatgggttggactcgttgactgtattttttaaaggttgctcgtcagttaactgagccttggaattcatggattttctaaagactaacaaatgaaaatattttcctgttgaagaacccagcggaaattttacagcaacaaatttcatgtttcttttgggtatttctgagaaaaaggaaatatttataaaaccatccaaagatccagataatttgcaaataaattggaggttatagaggttataatctgaatcccaaaggagactgcagctgatgaaagtgcttccaaactgaaaattggacgtgcctttacgatggtaagcgttaacagctcccactgcttctataatgactcctttaagtacactttgtatgggtgcatgttcagcatggtgtttgtgcttgggttaatatccaattgtgttgccatatacattttcatctgcgtcctcaaagtccgaaatgaaactacaacttacatgattaacttggcaatgtcagacttgctttttgtttttactttacccttcaggattttttacttcacaacacggaattggccatttggagatttactttgtaagatttctgtgatgctgttttataccaacatgtacggaagcattctgttcttaacctgtattagtgtagatcgatttctggcaattgtctacccatttaagtcaaagactctaagaaccaaaagaaatgcaaagattgtttgcactggcgtgtggttaactgtgatcggaggaagtgcacccgccgtttttgttcagtctacccactctcagggtaacaatgcctcagaagcctgctttgaaaattttccagaagccacatggaaaacatatctctcaaggattgtaattttcatcgaaatagtgggattttttattcctctaattttaaatgtaacttgttctagtatggtgctaaaaactttaaccaaacctgttacattaagtagaagcaaaataaacaaaactaaggttttaaaaatgatttttgtacatttgatcatattctgtttctgttttgttccttacaatatcaatcttattttatattctcttgtgagaacacaaacatttgttaattgctcagtagtggcagcagtaaggacaatgtacccaatcactctctgtattgctgtttccaactgttgttttgaccctatagtttactactttacatcggacacaattcagaattcaataaaaatgaaaaactggtctgtcaggagaagtgacttcagattctctgaagttcatggtgcagagaattttattcagcataacctacagaccttaaaaagtaagatatttgacaatgaatctgctgcctgaaataaaaccattaggactcactgggacagaactttcaagttccttcaactgtgaaaagtgtctttttggacaaactatttttccacctccaaaagaaattaacacatggacattttaaagtctttagtataaagaaaatttgtattcaatgtgttaagcattaacatgtattttatttgtgtatccactccatctgatttttctgagccattttgatttgttccttcattaaaaaaaatctcttaaagtt

SEQ ID NO: 150321 - DNA, 3004 bp, Homo sapiens
  Payload ID: 9680
  Gene Symbol: LPAR6
  Gene Name: lysophosphatidic acid receptor 6
  Uniprot ID: P43657
  ENST ID: ENST00000378434
  CDS Start-End: 1626-2660
tggattaggagagcttctggatagctgaacacatggaggtttctggagggtgtggcccccagagggcatggaagctctgcacccctgctcccatacctcaccctacgcatctcctcatctgtatcctttgcaatatcctttgtaataaaccgaaaattttatcataatgagcatcaaaagaatcccaaatgagaaaactgctttttgcataagtgtaaattaagagatggaagtcacatttcaccatggcaaacatttgctgcatgcaaaatgactgaaacaaggtcttgatctgtcaccaggctgaagtgcagtggtacaatcaaagctcactgcagtctcaacctcctaggctcaaacaatcctcccacttcagcctcccaaccagctgggaccacaggttgacatcaccacacccaggtctgctggaatttgctggaggtccactccagaccctgtttgtctggatatcaccagcagaggttgcagaacaacaaagattgctgcctgttccttcctctggaagctttgtcccagaggggcacccaccagacggcagctggagctctcctgtgtgccactggagtacgaaaaagaaaaaatcctgcagctagctcggtgtctgcccaaacggctgcccagttttgtgcttgaaacccagggcctgggtggtgtaggcacccgagggaattgcctggtctaagggttgtgaagatcacggaaaaggcatagagtctgggccggaatgcatcgttcctcgtggcacattccctcatggcttcccttagctaggggaggaagttccctggccccttgcacttcccgttccctctgctatggctcttcctcagtagaaacaactggcaacaaaattcaagtttatgattcattcatcagcaaacatgtgagaatcatctacaaagaaccaagaattgtgagaaagcgacctcaagatacaactggcaactgaggaaaaggcctcaattcaacaagagctaacaagcttgggagtttatttcggaatctttaaaagactcttctgcttacccacaatctgggatccactgcaggaaaacaaaaaaggaaaacttcatttaaaagaagcaagaagtaaaatgggacaaattgggaatgtttaagtctctgaaactctgcactgaaaagaaaataagattgataacttaagcttaacattctgaggcataaagaaacattaactttggagtattcatcttgactactgaaatacaagtttagaagacaagtggtttcattctggtcacagatcacagcttttctttaaatttataatcctatgggttggactcgttgactgtattttttaaaggttgctcgtcagttaactgagccttggaattcatggattttctaaagactaacaaatgaaaatattttcctgttgaagaacccagcggaaattttacagcaacaaatttcatgtttcttttgggtatttctgagaaaaaggaaatatttataaaaccatccaaagatccagataatttgcaaataaattggaggttatagaggttataatctgaatcccaaaggagactgcagctgatgaaagtgcttccaaactgaaaattggacgtgcctttacgatggtaagcgttaacagctcccactgcttctataatgactcctttaagtacactttgtatgggtgcatgttcagcatggtgtttgtgcttgggttaatatccaattgtgttgccatatacattttcatctgcgtcctcaaagtccgaaatgaaactacaacttacatgattaacttggcaatgtcagacttgctttttgtttttactttacccttcaggattttttacttcacaacacggaattggccatttggagatttactttgtaagatttctgtgatgctgttttataccaacatgtacggaagcattctgttcttaacctgtattagtgtagatcgatttctggcaattgtctacccatttaagtcaaagactctaagaaccaaaagaaatgcaaagattgtttgcactggcgtgtggttaactgtgatcggaggaagtgcacccgccgtttttgttcagtctacccactctcagggtaacaatgcctcagaagcctgctttgaaaattttccagaagccacatggaaaacatatctctcaaggattgtaattttcatcgaaatagtgggattttttattcctctaattttaaatgtaacttgttctagtatggtgctaaaaactttaaccaaacctgttacattaagtagaagcaaaataaacaaaactaaggttttaaaaatgatttttgtacatttgatcatattctgtttctgttttgttccttacaatatcaatcttattttatattctcttgtgagaacacaaacatttgttaattgctcagtagtggcagcagtaaggacaatgtacccaatcactctctgtattgctgtttccaactgttgttttgaccctatagtttactactttacatcggacacaattcagaattcaataaaaatgaaaaactggtctgtcaggagaagtgacttcagattctctgaagttcatggtgcagagaattttattcagcataacctacagaccttaaaaagtaagatatttgacaatgaatctgctgcctgaaataaaaccattaggactcactgggacagaactttcaagttccttcaactgtgaaaagtgtctttttggacaaactatttttccacctccaaaagaaattaacacatggacattttaaagtctttagtataaagaaaatttgtattcaatgtgttaagcattaacatgtattttatttgtgtatccactccatctgatttttctgagccattttgatttgttccttcattaaaaaaaatctcttaaagttatttagtgtctaaaagtgactgacttaaattatgtggtgccaatctgtaatgtctttgaattcctttttatattaaatgatttaatttactaaa

SEQ ID NO: 150322 - DNA, 2175 bp, Homo sapiens
  Payload ID: 9680
  Gene Symbol: LPAR6
  Gene Name: lysophosphatidic acid receptor 6
  Uniprot ID: P43657
  ENST ID: ENST00000620633
  CDS Start-End: 800-1834
tccctctgctatggctcttcctcagtagaaacaactggcaacaaaattcaagtttatgattcattcatcagcaaacatgtgagaatcatctacaaagaaccaagaattgtgagaaagcgacctcaagatacaactggcaactgaggaaaaggcctcaattcaacaagagctaacaagcttgggagtttatttcggaatctttaaaagactcttctgcttacccacaatctgggatccactgcaggaaaacaaaaaaggaaaacttcatttaaaagaagcaagaagtaaaatgggacaaattgggaatgtttaagtctctgaaactctgcactgaaaagaaaataagattgataacttaagcttaacattctgaggcataaagaaacattaactttggagtattcatcttgactactgaaatacaagtttagaagacaagtggtttcattctggtcacagatcacagcttttctttaaatttataatcctatgggttggactcgttgactgtattttttaaaggttgctcgtcagttaactgagccttggaattcatggattttctaaagactaacaaatgaaaatattttcctgttgaagaacccagcggaaattttacagcaacaaatttcatgtttcttttgggtatttctgagaaaaaggaaatatttataaaaccatccaaagatccagataatttgcaaataaattggaggttatagaggttataatctgaatcccaaaggagactgcagctgatgaaagtgcttccaaactgaaaattggacgtgcctttacgatggtaagcgttaacagctcccactgcttctataatgactcctttaagtacactttgtatgggtgcatgttcagcatggtgtttgtgcttgggttaatatccaattgtgttgccatatacattttcatctgcgtcctcaaagtccgaaatgaaactacaacttacatgattaacttggcaatgtcagacttgctttttgtttttactttacccttcaggattttttacttcacaacacggaattggccatttggagatttactttgtaagatttctgtgatgctgttttataccaacatgtacggaagcattctgttcttaacctgtattagtgtagatcgatttctggcaattgtctacccatttaagtcaaagactctaagaaccaaaagaaatgcaaagattgtttgcactggcgtgtggttaactgtgatcggaggaagtgcacccgccgtttttgttcagtctacccactctcagggtaacaatgcctcagaagcctgctttgaaaattttccagaagccacatggaaaacatatctctcaaggattgtaattttcatcgaaatagtgggattttttattcctctaattttaaatgtaacttgttctagtatggtgctaaaaactttaaccaaacctgttacattaagtagaagcaaaataaacaaaactaaggttttaaaaatgatttttgtacatttgatcatattctgtttctgttttgttccttacaatatcaatcttattttatattctcttgtgagaacacaaacatttgttaattgctcagtagtggcagcagtaaggacaatgtacccaatcactctctgtattgctgtttccaactgttgttttgaccctatagtttactactttacatcggacacaattcagaattcaataaaaatgaaaaactggtctgtcaggagaagtgacttcagattctctgaagttcatggtgcagagaattttattcagcataacctacagaccttaaaaagtaagatatttgacaatgaatctgctgcctgaaataaaaccattaggactcactgggacagaactttcaagttccttcaactgtgaaaagtgtctttttggacaaactatttttccacctccaaaagaaattaacacatggacattttaaagtctttagtataaagaaaatttgtattcaatgtgttaagcattaacatgtattttatttgtgtatccactccatctgatttttctgagccattttgatttgttccttcattaaaaaaaatctcttaaagttatttagtgtctaaaagtgactgacttaaattatgtggtgccaatctgtaatgtctttgaattcctttttatattaaatgatttaatttact

SEQ ID NO: 150323 - DNA, 3966 bp, Homo sapiens
  Payload ID: 9681
  Gene Symbol: LPCAT1
  Gene Name: lysophosphatidylcholine acyltransferase 1
  Uniprot ID: Q8NF37
  ENST ID: ENST00000283415
  CDS Start-End: 134-1738
cgcgcctgcgcgcccggcccgctccagccgccgcgcatcctcggcccgcgccccgagacccgcgcccagctagccccggccccgctcggcgccccaggcagctcggctgcgctcgccgcgggacggcgcggccatgaggctgcggggatgcggaccccgggccgcccctgcctccagcgcaggggccagcgacgctcggctgctggcgcccccggggcggaaccccttcgtgcacgagctgcgcctcagcgccctgcagaaggcccaggtggccctcatgacactgacgctcttcccggtccggctcctggttgccgctgccatgatgctgctggcctggcccctcgcacttgtcgcatccctgggctctgcggagaaggaacccgagcagcccccggccctgtggaggaaggttgtggacttcctgctgaaggccatcatgcgcaccatgtggttcgccggcggcttccaccgggtggccgtgaaggggcggcaggcgctgcccaccgaggcggccatcctcacgctcgcgcctcactcgtcctacttcgacgccatccctgtgaccatgacgatgtcctccatcgtgatgaaggcagagagcagagacatcccgatctggggaactctgatccagtatatacggcctgtgttcgtgtcccggtcagaccaggattctcgcaggaaaacagtagaagaaatcaagagacgggcgcagtccaacggaaagtggccacagataatgatttttccagaaggaacttgtacaaacaggacctgcctaattaccttcaaacctggtgcattcatccctggagcgcccgtccagcctgtggttttacgatatccaaataaactggacaccatcacatggacgtggcaaggacctggagcgctggaaatcctgtggctcacgctgtgtcagtttcacaaccaagtggaaatcgagttccttcctgtgtacagcccttctgaggaggagaagaggaaccccgcgctgtatgccagcaacgtgcggcgagtcatggccgaggccttgggtgtctccgtgactgactacacgttcgaggactgccagctggccctggcggaaggacagctccgtctccccgctgacacttgccttttagaatttgccaggctcgtgcggggcctcgggctaaaaccagaaaagcttgaaaaagatctggacagatactcagaaagagccaggatgaagggaggagagaagataggtattgcggagtttgccgcctccctggaagtccccgtttctgacttgctggaagacatgttttcactgttcgacgagagcggcagcggcgaggtggacctgcgagagtgtgtggttgccctgtctgtcgtctgccggccggcccggaccctggacaccatccagctggctttcaagatgtacggagcgcaagaggacggcagcgtcggcgaaggtgacctgtcctgcatcctcaagacggccctgggggtggcagagctcaccgtgaccgacctattccgagccattgaccaagaggagaaggggaagatcacattcgctgacttccacaggtttgcagaaatgtaccctgccttcgcagaggaatacctgtacccggatcagacacatttcgaaagctgtgcagagacctcacctgcgccaatcccaaacggcttctgtgccgatttcagcccggaaaactcagacgctgggcggaagcctgttcgcaagaagctggattaggacccagggttgcggagagacgcggcccctcccgcgtggacatcaccgccatgagcctctttgcgagtgacctctgggctccgctcctcactcctgctgtacaggcactgtcttcagcccgagttccaggggcctcgggggctgtttgtatcttgttcctttgtgaagtgtgttgcagaaccgacgcttactgtgcgagaatcggagggcgcgcacgcggatcccccgcctggcctggaccccgtggggtcaggttccctgccgggcggggggcaccggtgccgccccgtgttctcccacggggccctggtttcgagtctctgtcacagcctcttccggcggcagcgtgcaccgggcgggcctccgtgcacactcagcacacgcctgccacacagcgtgcgcttgcgtgtcactctggcacgaaacctgtctgcctctgtggatccacagcctggcagagccgagccgtcacctgatttttcagtgtttctacctgtgtgctggagctcatgagtattttataaactccatttaggtacttcaggaaacatgcagcattttttaaaaaatgaaaattgtttttctacttcatttttccttttagagtcaaaggatatttatttataggcctttttttttttaatatagaatctgaggctgtttgggctttgacttaaatttccatcaggcctctctccagcaggtaatccctctccttccgctgggtcccctggggaggtgtgaactcaagggcctagccccaaaacactttttctgcttttcttaatccttttccagtcccctctttttttataaacgttggcagtttgatgtttctgtttcggcataacgtaatccatttcactgtagcctaaactccagtccgaggttggatattgttcaaatgagcagggcccgagctggaagcgcaaggcagccgccgccgtgccgctcctcccttgccctcaggccaggtccctgctggaagcggctgcatcttcctgtcagccctggtttccatggtgactggcgtcacgctgccacccgagtatggctgaccttcctgcagagagaggagccgcagtcttttgcttgtggaaggagacgctgggctgtgcggtgcggagggtgatgaggatgtctggtgacagccgtgcggacaccactcctctctgcagcactgcctcccagcgccagggtcgcgggcacatcccactgagagcgggggtcctgccccatcttagagtcaaaggcagaggggcttccaggccctggatggggtattttggtgtcacctgaagtccctctgacatcaccttgtttcatcattttttatgacagaattagaaacccatccttcaagcacaataatcatcacagacttgagtttgcttcctaaagcaaaggctccgggtttgtttggaaaatttttttgatttctgaaatgaattgatttttatatttggggcatctctatagaaagtgaccaccaaggccagtaagtacgggaaaaaatgtttactaacttcctcagagattcgtgatacgcgtttctccactgacagacatttaaaaacaaccttcagctccgtttcaatcaatcacctcgacttgttttttagcatggacactgccagcaggacagacagggatggagtaaaccgaagtcaatttcagggctcttggcgtgttggacacagaagaaatcctagtgcagcctttggtagctaacagtcactgattttataattggagaatgcgtaaagattcatttttcaaggagaagagcctgcaaatggccaatgaaggaggtaaataaactaagatattccgagggaagggacccaggccacctcccttccgcaggtctgcagatgaagggttttttgaatgaaatgccactgtgcattttcagaaaaaaaaatctctgataaacagactttgaatggatgtttgttcctcctgattctcttttctcttcgtggcgacttagagttggcggatattcggaactgtgaatgtacatagcgttgagttaaaccccttgtgtgtgagacaggacgcagcgggcccctggtggcctgggggccagacccgtgggcaggtggggcatgggccctggcctgcggggacctgctggggtgtgagggcagagggagggttgccatgaaggaacttgggattttcaatggaataagtaaaacataaagtctatacttgggaatgat

SEQ ID NO: 150324 - DNA, 5610 bp, Homo sapiens
  Payload ID: 9681
  Gene Symbol: LPCAT1
  Gene Name: lysophosphatidylcholine acyltransferase 1
  Uniprot ID: Q8NF37
  ENST ID: ENST00000475622
  CDS Start-End: 119-1723
ggcccgctccagccgccgcgcatcctcggcccgcgccccgagacccgcgcccagctagccccggccccgctcggcgccccaggcagctcggctgcgctcgccgcgggacggcgcggccatgaggctgcggggatgcggaccccgggccgcccctgcctccagcgcaggggccagcgacgctcggctgctggcgcccccggggcggaaccccttcgtgcacgagctgcgcctcagcgccctgcagaaggcccaggtggccctcatgacactgacgctcttcccggtccggctcctggttgccgctgccatgatgctgctggcctggcccctcgcacttgtcgcatccctgggctctgcggagaaggaacccgagcagcccccggccctgtggaggaaggttgtggacttcctgctgaaggccatcatgcgcaccatgtggttcgccggcggcttccaccgggtggccgtgaaggggcggcaggcgctgcccaccgaggcggccatcctcacgctcgcgcctcactcgtcctacttcgacgccatccctgtgaccatgacgatgtcctccatcgtgatgaaggcagagagcagagacatcccgatctggggaactctgatccagtatatacggcctgtgttcgtgtcccggtcagaccaggattctcgcaggaaaacagtagaagaaatcaagagacgggcgcagtccaacggaaagtggccacagataatgatttttccagaaggaacttgtacaaacaggacctgcctaattaccttcaaacctggtgcattcatccctggagcgcccgtccagcctgtggttttacgatatccaaataaactggacaccatcacatggacgtggcaaggacctggagcgctggaaatcctgtggctcacgctgtgtcagtttcacaaccaagtggaaatcgagttccttcctgtgtacagcccttctgaggaggagaagaggaaccccgcgctgtatgccagcaacgtgcggcgagtcatggccgaggccttgggtgtctccgtgactgactacacgttcgaggactgccagctggccctggcggaaggacagctccgtctccccgctgacacttgccttttagaatttgccaggctcgtgcggggcctcgggctaaaaccagaaaagcttgaaaaagatctggacagatactcagaaagagccaggatgaagggaggagagaagataggtattgcggagtttgccgcctccctggaagtccccgtttctgacttgctggaagacatgttttcactgttcgacgagagcggcagcggcgaggtggacctgcgagagtgtgtggttgccctgtctgtcgtctgccggccggcccggaccctggacaccatccagctggctttcaagatgtacggagcgcaagaggacggcagcgtcggcgaaggtgacctgtcctgcatcctcaagacggccctgggggtggcagagctcaccgtgaccgacctattccgagccattgaccaagaggagaaggggaagatcacattcgctgacttccacaggtttgcagaaatgtaccctgccttcgcagaggaatacctgtacccggatcagacacatttcgaaagctgtgcagagacctcacctgcgccaatcccaaacggcttctgtgccgatttcagcccggaaaactcagacgctgggcggaagcctgttcgcaagaagctggattaggacccagggttgcggagagacgcggcccctcccgcgtggacatcaccgccatgagcctctttgcgagtgacctctgggctccgctcctcactcctgctgtacaggcactgtcttcagcccgagttccaggggcctcgggggctgtttgtatcttgttcctttgtgaagtgtgttgcagaaccgacgcttactgtgcgagaatcggagggcgcgcacgcggatcccccgcctggcctggaccccgtggggtcaggttccctgccgggcggggggcaccggtgccgccccgtgttctcccacggggccctggtttcgagtctctgtcacagcctcttccggcggcagcgtgcaccgggcgggcctccgtgcacactcagcacacgcctgccacacagcgtgcgcttgcgtgtcactctggcacgaaacctgtctgcctctgtggatccacagcctggcagagccgagccgtcacctgatttttcagtgtttctacctgtgtgctggagctcatgagtattttataaactccatttaggtacttcaggaaacatgcagcattttttaaaaaatgaaaattgtttttctacttcatttttccttttagagtcaaaggatatttatttataggcctttttttttttaatatagaatctgaggctgtttgggctttgacttaaatttccatcaggcctctctccagcaggtaatccctctccttccgctgggtcccctggggaggtgtgaactcaagggcctagccccaaaacactttttctgcttttcttaatccttttccagtcccctctttttttataaacgttggcagtttgatgtttctgtttcggcataacgtaatccatttcactgtagcctaaactccagtccgaggttggatattgttcaaatgagcagggcccgagctggaagcgcaaggcagccgccgccgtgccgctcctcccttgccctcaggccaggtccctgctggaagcggctgcatcttcctgtcagccctggtttccatggtgactggcgtcacgctgccacccgagtatggctgaccttcctgcagagagaggagccgcagtcttttgcttgtggaaggagacgctgggctgtgcggtgcggagggtgatgaggatgtctggtgacagccgtgcggacaccactcctctctgcagcactgcctcccagcgccagggtcgcgggcacatcccactgagagcgggggtcctgccccatcttagagtcaaaggcagaggggcttccaggccctggatggggtattttggtgtcacctgaagtccctctgacatcaccttgtttcatcattttttatgacagaattagaaacccatccttcaagcacaataatcatcacagacttgagtttgcttcctaaagcaaaggctccgggtttgtttggaaaatttttttgatttctgaaatgaattgatttttatatttggggcatctctatagaaagtgaccaccaaggccagtaagtacgggaaaaaatgtttactaacttcctcagagattcgtgatacgcgtttctccactgacagacatttaaaaacaaccttcagctccgtttcaatcaatcacctcgacttgttttttagcatggacactgccagcaggacagacagggatggagtaaaccgaagtcaatttcagggctcttggcgtgttggacacagaagaaatcctagtgcagcctttggtagctaacagtcactgattttataattggagaatgcgtaaagattcatttttcaaggagaagagcctgcaaatggccaatgaaggagaaagacaacaacaggcattgtgagaggagagccaatccagatgagattttcttggtgtggttctagcatgtttggaaaacacaagaattgaaattctgtagaaaaagctgtcttggtggcaaagggacgctccggagtgttctggtattttgcggacagtagcagacatcttacagagttgaaacatggatggctggctgcctgcctgttctccactcagcattggagccaggagaaatgaaggtgggaccctcaggaaaaagcaaacccacccccggtgttcacgcaagagttgacacagctgcacctgctgctgccgtatgctgatcctaaccagaagctggctgggaggagaggccccctgggccatgaagcagagctcgggaatgtgagaagtggggctgagggcaaacggggtagtgaaggaccagcactgcccacccatagctgctctgtgtccacaagcaggtcagctgcagctctgctccatgtcaccatctgcatccagcccagcacagcagcccctcctgggactcagccagtcagatggctttgggaagaggtgacaagcaagcctgcctagatgctatatctgctgcacagacgcagaatacagcaggcccactcctggttcattggccacagtaagccatgtggtcacagctgaattcaacagccagagacgtacagtcctgcaagggagcccctcaaaggaggtgaaggatcttctgaacagcagcaccagccaccctgcagtaagtgttggatgtggtggtgagcagggccagtcctaattccacccattgacattacagacattattctggctatgaaatggtgccatgtcttggtccacagttcgaggcactatgtcatccatcaggatggcagtccaatgttctagggcactgcctccccatgggcagcacacctaaagcttcaagaagtcatcctcatgcttaatcagactcgccacctctgggtgatgggaaacgtagggattccaagtgtgtacctgttcccatgctgcctttgctgtaaagtaaattccttaacaatgccataggaggtgggcaatagtgaataagccattcatcaagcccacagatggtgctgtcagaaacactgacagcaaagacatatccatatctggaataagggaaactgaaaccaagagatactcccctcaatgatggaagagtccagtgtgatcaacctgcctccagggggctggctagtccctttcccaggaatggtacctggggctaagtatgggaccctgcttccgacatgttgggagtccagtgataactgcatcagcctaggctattgttgatgggtcagctctttgttattgatccacactcatctccatccctatttccagtgccagtttgtgaatggttctactaggtaaacactgggttggctgggaaagagacaggctgacatccactgcctgtgtcataccctggcagagactatagtaaattagacccgacaagagaaaatattagtgaacctgaaaatacagctatgtgtgatcccagtgatgtacagggagaaacagacagaaatgaagcacaagtgggcatggaataatgccacaaggcccatcacatgtgattggagccctagaaaaggaggaggacaggacagaaaaattatttgatgaaataatggccagaatttttttccaaatctataaactaagatacccaagaagctcaataagcacccagcagaaaaaatacaataaaaacacagcaagacacacatcacaaactgctgaaagccactgaaaaggagaaaaatcttaaaagcagctggagaaaaacaacatactatcaaggaacagagataagaatgaaagccaacttctcttcagaaactatgcaacccagacgtcaaggaacagagataagaacgacagccgacttctctgcagaaactatgcaacccagacgtcaaggaacagagataagaacgacagccgacttctctgcagaaactatgcaacccagacgtcaaggaacagagataagaacgacagccgacttctctgcagaaactatg

SEQ ID NO: 150325 - DNA, 3698 bp, Homo sapiens
  Payload ID: 9681
  Gene Symbol: LPCAT1
  Gene Name: lysophosphatidylcholine acyltransferase 1
  ENST ID: ENST00000611696
  CDS Start-End: 1-1470
gtggccctcatgacactgacgctcttcccggtccggctcctggttgccgctgccatgatgctgctggcctggcccctcgcacttgtcgcatccctgggctctgcggagaaggaacccgagcagcccccggccctgtggaggaaggttgtggacttcctgctgaaggccatcatgcgcaccatgtggttcgccggcggcttccaccgggtggccgtgaaggggcggcaggcgctgcccaccgaggcggccatcctcacgctcgcgcctcactcgtcctacttcgacgccatccctgtgaccatgacgatgtcctccatcgtgatgaaggcagagagcagagacatcccgatctggggaactctgatccagtatatacggcctgtgttcgtgtcccggtcagaccaggattctcgcaggaaaacagtagaagaaatcaagagacgggcgcagtccaacggaaagtggccacagataatgatttttccagaaggaacttgtacaaacaggacctgcctaattaccttcaaacctggtgcattcatccctggagcgcccgtccagcctgtggttttacgatatccaaataaactggacaccatcacatggacgtggcaaggacctggagcgctggaaatcctgtggctcacgctgtgtcagtttcacaaccaagtggaaatcgagttccttcctgtgtacagcccttctgaggaggagaagaggaaccccgcgctgtatgccagcaacgtgcggcgagtcatggccgaggccttgggtgtctccgtgactgactacacgttcgaggactgccagctggccctggcggaaggacagctccgtctccccgctgacacttgccttttagaatttgccaggctcgtgcggggcctcgggctaaaaccagaaaagcttgaaaaagatctggacagatactcagaaagagccaggatgaagggaggagagaagataggtattgcggagtttgccgcctccctggaagtccccgtttctgacttgctggaagacatgttttcactgttcgacgagagcggcagcggcgaggtggacctgcgagagtgtgtggttgccctgtctgtcgtctgccggccggcccggaccctggacaccatccagctggctttcaagatgtacggagcgcaagaggacggcagcgtcggcgaaggtgacctgtcctgcatcctcaagacggccctgggggtggcagagctcaccgtgaccgacctattccgagccattgaccaagaggagaaggggaagatcacattcgctgacttccacaggtttgcagaaatgtaccctgccttcgcagaggaatacctgtacccggatcagacacatttcgaaagctgtgcagagacctcacctgcgccaatcccaaacggcttctgtgccgatttcagcccggaaaactcagacgctgggcggaagcctgttcgcaagaagctggattaggacccagggttgcggagagacgcggcccctcccgcgtggacatcaccgccatgagcctctttgcgagtgacctctgggctccgctcctcactcctgctgtacaggcactgtcttcagcccgagttccaggggcctcgggggctgtttgtatcttgttcctttgtgaagtgtgttgcagaaccgacgcttactgtgcgagaatcggagggcgcgcacgcggatcccccgcctggcctggaccccgtggggtcaggttccctgccgggcggggggcaccggtgccgccccgtgttctcccacggggccctggtttcgagtctctgtcacagcctcttccggcggcagcgtgcaccgggcgggcctccgtgcacactcagcacacgcctgccacacagcgtgcgcttgcgtgtcactctggcacgaaacctgtctgcctctgtggatccacagcctggcagagccgagccgtcacctgatttttcagtgtttctacctgtgtgctggagctcatgagtattttataaactccatttaggtacttcaggaaacatgcagcattttttaaaaaatgaaaattgtttttctacttcatttttccttttagagtcaaaggatatttatttataggcctttttttttttaatatagaatctgaggctgtttgggctttgacttaaatttccatcaggcctctctccagcaggtaatccctctccttccgctgggtcccctggggaggtgtgaactcaagggcctagccccaaaacactttttctgcttttcttaatccttttccagtcccctctttttttataaacgttggcagtttgatgtttctgtttcggcataacgtaatccatttcactgtagcctaaactccagtccgaggttggatattgttcaaatgagcagggcccgagctggaagcgcaaggcagccgccgccgtgccgctcctcccttgccctcaggccaggtccctgctggaagcggctgcatcttcctgtcagccctggtttccatggtgactggcgtcacgctgccacccgagtatggctgaccttcctgcagagagaggagccgcagtcttttgcttgtggaaggagacgctgggctgtgcggtgcggagggtgatgaggatgtctggtgacagccgtgcggacaccactcctctctgcagcactgcctcccagcgccagggtcgcgggcacatcccactgagagcgggggtcctgccccatcttagagtcaaaggcagaggggcttccaggccctggatggggtattttggtgtcacctgaagtccctctgacatcaccttgtttcatcattttttatgacagaattagaaacccatccttcaagcacaataatcatcacagacttgagtttgcttcctaaagcaaaggctccgggtttgtttggaaaatttttttgatttctgaaatgaattgatttttatatttggggcatctctatagaaagtgaccaccaaggccagtaagtacgggaaaaaatgtttactaacttcctcagagattcgtgatacgcgtttctccactgacagacatttaaaaacaaccttcagctccgtttcaatcaatcacctcgacttgttttttagcatggacactgccagcaggacagacagggatggagtaaaccgaagtcaatttcagggctcttggcgtgttggacacagaagaaatcctagtgcagcctttggtagctaacagtcactgattttataattggagaatgcgtaaagattcatttttcaaggagaagagcctgcaaatggccaatgaaggaggtaaataaactaagatattccgagggaagggacccaggccacctcccttccgcaggtctgcagatgaagggttttttgaatgaaatgccactgtgcattttcagaaaaaaaaatctctgataaacagactttgaatggatgtttgttcctcctgattctcttttctcttcgtggcgacttagagttggcggatattcggaactgtgaatgtacatagcgttgagttaaaccccttgtgtgtgagacaggacgcagcgggcccctggtggcctgggggccagacccgtgggcaggtggggcatgggccctggcctgcggggacctgctggggtgtgagggcagagggagggttgccatgaaggaacttgggattttcaatggaataagtaaaacataaagtctatacttgggaatgat

SEQ ID NO: 150326 - DNA, 5357 bp, Homo sapiens
  Payload ID: 9681
  Gene Symbol: LPCAT1
  Gene Name: lysophosphatidylcholine acyltransferase 1
  ENST ID: ENST00000625809
  CDS Start-End: 1-1470
gtggccctcatgacactgacgctcttcccggtccggctcctggttgccgctgccatgatgctgctggcctggcccctcgcacttgtcgcatccctgggctctgcggagaaggaacccgagcagcccccggccctgtggaggaaggttgtggacttcctgctgaaggccatcatgcgcaccatgtggttcgccggcggcttccaccgggtggccgtgaaggggcggcaggcgctgcccaccgaggcggccatcctcacgctcgcgcctcactcgtcctacttcgacgccatccctgtgaccatgacgatgtcctccatcgtgatgaaggcagagagcagagacatcccgatctggggaactctgatccagtatatacggcctgtgttcgtgtcccggtcagaccaggattctcgcaggaaaacagtagaagaaatcaagagacgggcgcagtccaacggaaagtggccacagataatgatttttccagaaggaacttgtacaaacaggacctgcctaattaccttcaaacctggtgcattcatccctggagcgcccgtccagcctgtggttttacgatatccaaataaactggacaccatcacatggacgtggcaaggacctggagcgctggaaatcctgtggctcacgctgtgtcagtttcacaaccaagtggaaatcgagttccttcctgtgtacagcccttctgaggaggagaagaggaaccccgcgctgtatgccagcaacgtgcggcgagtcatggccgaggccttgggtgtctccgtgactgactacacgttcgaggactgccagctggccctggcggaaggacagctccgtctccccgctgacacttgccttttagaatttgccaggctcgtgcggggcctcgggctaaaaccagaaaagcttgaaaaagatctggacagatactcagaaagagccaggatgaagggaggagagaagataggtattgcggagtttgccgcctccctggaagtccccgtttctgacttgctggaagacatgttttcactgttcgacgagagcggcagcggcgaggtggacctgcgagagtgtgtggttgccctgtctgtcgtctgccggccggcccggaccctggacaccatccagctggctttcaagatgtacggagcgcaagaggacggcagcgtcggcgaaggtgacctgtcctgcatcctcaagacggccctgggggtggcagagctcaccgtgaccgacctattccgagccattgaccaagaggagaaggggaagatcacattcgctgacttccacaggtttgcagaaatgtaccctgccttcgcagaggaatacctgtacccggatcagacacatttcgaaagctgtgcagagacctcacctgcgccaatcccaaacggcttctgtgccgatttcagcccggaaaactcagacgctgggcggaagcctgttcgcaagaagctggattaggacccagggttgcggagagacgcggcccctcccgcgtggacatcaccgccatgagcctctttgcgagtgacctctgggctccgctcctcactcctgctgtacaggcactgtcttcagcccgagttccaggggcctcgggggctgtttgtatcttgttcctttgtgaagtgtgttgcagaaccgacgcttactgtgcgagaatcggagggcgcgcacgcggatcccccgcctggcctggaccccgtggggtcaggttccctgccgggcggggggcaccggtgccgccccgtgttctcccacggggccctggtttcgagtctctgtcacagcctcttccggcggcagcgtgcaccgggcgggcctccgtgcacactcagcacacgcctgccacacagcgtgcgcttgcgtgtcactctggcacgaaacctgtctgcctctgtggatccacagcctggcagagccgagccgtcacctgatttttcagtgtttctacctgtgtgctggagctcatgagtattttataaactccatttaggtacttcaggaaacatgcagcattttttaaaaaatgaaaattgtttttctacttcatttttccttttagagtcaaaggatatttatttataggcctttttttttttaatatagaatctgaggctgtttgggctttgacttaaatttccatcaggcctctctccagcaggtaatccctctccttccgctgggtcccctggggaggtgtgaactcaagggcctagccccaaaacactttttctgcttttcttaatccttttccagtcccctctttttttataaacgttggcagtttgatgtttctgtttcggcataacgtaatccatttcactgtagcctaaactccagtccgaggttggatattgttcaaatgagcagggcccgagctggaagcgcaaggcagccgccgccgtgccgctcctcccttgccctcaggccaggtccctgctggaagcggctgcatcttcctgtcagccctggtttccatggtgactggcgtcacgctgccacccgagtatggctgaccttcctgcagagagaggagccgcagtcttttgcttgtggaaggagacgctgggctgtgcggtgcggagggtgatgaggatgtctggtgacagccgtgcggacaccactcctctctgcagcactgcctcccagcgccagggtcgcgggcacatcccactgagagcgggggtcctgccccatcttagagtcaaaggcagaggggcttccaggccctggatggggtattttggtgtcacctgaagtccctctgacatcaccttgtttcatcattttttatgacagaattagaaacccatccttcaagcacaataatcatcacagacttgagtttgcttcctaaagcaaaggctccgggtttgtttggaaaatttttttgatttctgaaatgaattgatttttatatttggggcatctctatagaaagtgaccaccaaggccagtaagtacgggaaaaaatgtttactaacttcctcagagattcgtgatacgcgtttctccactgacagacatttaaaaacaaccttcagctccgtttcaatcaatcacctcgacttgttttttagcatggacactgccagcaggacagacagggatggagtaaaccgaagtcaatttcagggctcttggcgtgttggacacagaagaaatcctagtgcagcctttggtagctaacagtcactgattttataattggagaatgcgtaaagattcatttttcaaggagaagagcctgcaaatggccaatgaaggagaaagacaacaacaggcattgtgagaggagagccaatccagatgagattttcttggtgtggttctagcatgtttggaaaacacaagaattgaaattctgtagaaaaagctgtcttggtggcaaagggacgctccggagtgttctggtattttgcggacagtagcagacatcttacagagttgaaacatggatggctggctgcctgcctgttctccactcagcattggagccaggagaaatgaaggtgggaccctcaggaaaaagcaaacccacccccggtgttcacgcaagagttgacacagctgcacctgctgctgccgtatgctgatcctaaccagaagctggctgggaggagaggccccctgggccatgaagcagagctcgggaatgtgagaagtggggctgagggcaaacggggtagtgaaggaccagcactgcccacccatagctgctctgtgtccacaagcaggtcagctgcagctctgctccatgtcaccatctgcatccagcccagcacagcagcccctcctgggactcagccagtcagatggctttgggaagaggtgacaagcaagcctgcctagatgctatatctgctgcacagacgcagaatacagcaggcccactcctggttcattggccacagtaagccatgtggtcacagctgaattcaacagccagagacgtacagtcctgcaagggagcccctcaaaggaggtgaaggatcttctgaacagcagcaccagccaccctgcagtaagtgttggatgtggtggtgagcagggccagtcctaattccacccattgacattacagacattattctggctatgaaatggtgccatgtcttggtccacagttcgaggcactatgtcatccatcaggatggcagtccaatgttctagggcactgcctccccatgggcagcacacctaaagcttcaagaagtcatcctcatgcttaatcagactcgccacctctgggtgatgggaaacgtagggattccaagtgtgtacctgttcccatgctgcctttgctgtaaagtaaattccttaacaatgccataggaggtgggcaatagtgaataagccattcatcaagcccacagatggtgctgtcagaaacactgacagcaaagacatatccatatctggaataagggaaactgaaaccaagagatactcccctcaatgatggaagagtccagtgtgatcaacctgcctccagggggctggctagtccctttcccaggaatggtacctggggctaagtatgggaccctgcttccgacatgttgggagtccagtgataactgcatcagcctaggctattgttgatgggtcagctctttgttattgatccacactcatctccatccctatttccagtgccagtttgtgaatggttctactaggtaaacactgggttggctgggaaagagacaggctgacatccactgcctgtgtcataccctggcagagactatagtaaattagacccgacaagagaaaatattagtgaacctgaaaatacagctatgtgtgatcccagtgatgtacagggagaaacagacagaaatgaagcacaagtgggcatggaataatgccacaaggcccatcacatgtgattggagccctagaaaaggaggaggacaggacagaaaaattatttgatgaaataatggccagaatttttttccaaatctataaactaagatacccaagaagctcaataagcacccagcagaaaaaatacaataaaaacacagcaagacacacatcacaaactgctgaaagccactgaaaaggagaaaaatcttaaaagcagctggagaaaaacaacatactatcaaggaacagagataagaatgaaagccaacttctcttcagaaactatgcaacccagacgtcaaggaacagagataagaacgacagccgacttctctgcagaaactatgcaacccagacgtcaaggaacagagataagaacgacagccgacttctctgcagaaactatgcaacccagacgtcaaggaacagagataagaacgacagccgacttctctgcagaaactatg

SEQ ID NO: 150327 - DNA, 705 bp, Homo sapiens
  Payload ID: 9681
  Gene Symbol: LPCAT1
  Gene Name: lysophosphatidylcholine acyltransferase 1
  ENST ID: ENST00000626646
  CDS Start-End: 1-705
gccttgggtgtctccgtgactgactacacgttcgaggactgccagctggccctggcggaaggacagctccgtctccccgctgacacttgccttttagaatttgccaggctcgtgcggggcctcgggctaaaaccagaaaagcttgaaaaagatctggacagatactcagaaagagccaggatgaagggaggagagaagataggtattgcggagtttgccgcctccctggaagtccccgtttctgacttgctggaagacatgttttcactgttcgacgagagcggcagcggcgaggtggacctgcgagagtgtgtggttgccctgtctgtcgtctgccggccggcccggaccctggacaccatccagctggctttcaagatgtacggagcgcaagaggacggcagcgtcggcgaaggtgacctgtcctgcatcctcaagacggccctgggggtggcagagctcaccgtgaccgacctattccgagccattgaccaagaggagaaggggaagatcacattcgctgacttccacaggtttgcagaaatgtaccctgccttcgcagaggaatacctgtacccggatcagacacatttcgaaagctgtgcagagacctcacctgcgccaatcccaaacggcttctgtgccgatttcagcccggaaaactcagacgctgggcggaagcctgttcgcaagaagctggattag

SEQ ID NO: 150328 - DNA, 5391 bp, Homo sapiens
  Payload ID: 9682
  Gene Symbol: LPCAT2
  Gene Name: lysophosphatidylcholine acyltransferase 2
  Uniprot ID: Q7L5N7
  ENST ID: ENST00000262134
  CDS Start-End: 185-1819
agagcctggggcgtgtcacagccgaaggggcagggcggcagcagcaggcgtctaagtaacttcagcgcctgcgcagaggctccccagcgtcgccctaggctgggactctagtaggtcttcggctcagttttggctgcagcgcccgcgtagatcgcttcggccgggttctacgcccggctcaactatgagccggtgcgcccaggcggcggaagtggcggccacagtgccaggtgccggcgtcgggaacgtggggctgcggccgcccatggtgccccgtcaggcgtccttcttcccgccgccggtgccgaaccccttcgtgcagcagacgcagatcggctccgcgaggcgggtccagattgtccttcttgggattatcttgcttccaattcgtgtcttattggttgcgttaattttattacttgcatggccatttgctgcaatttcaacagtatgctgtcctgaaaagctgacccacccaataactggttggaggaggaaaattactcaaacagctttgaaatttctgggtcgtgctatgttcttttcaatgggatttatagttgctgtaaaaggaaagattgcaagtcctttggaagcaccagtttttgttgctgcccctcattcaacattctttgatggaattgcctgtgttgtagctgggttaccttctatggtatctcgaaatgagaatgcacaagtccctctgattggcagactgttacgggctgtgcaaccagttttggtgtcccgtgtagatccggattcccgaaaaaacacaataaatgaaataataaagcgaacaacatcaggaggagaatggccccagatactagttttcccagaaggtacttgtactaatcgttcctgtttgattacttttaaaccaggagccttcattccaggagttccagtgcagccagtcctcctcagatacccaaacaagctggatactgtgacctggacatggcaaggatatacattcattcagctttgtatgcttactttctgccagctcttcacaaaggtagaagttgagtttatgccagttcaagtaccaaatgatgaagaaaaaaatgatcctgtcctttttgccaataaagtccggaatttaatggcagaagctctgggaataccagtaacagatcatacctatgaagactgcagattgatgatttcagcaggacagctaacattgcctatggaagctgggctggtggaatttactaaaattagccgaaaattgaaattagattgggatggtgttcgtaagcatttggatgaatatgcatctattgcgagttcctcaaaaggaggaagaattggaattgaagaattcgccaagtatttaaagttgcctgtttcagatgtcttgagacaactttttgcactctttgacaggaaccatgatggcagcattgacttccgagagtatgtgattggcctggctgtcttgtgcaacccttccaacacagaggagatcatccaggtggcatttaagctgtttgacgttgatgaggatggctacataacggaggaagagttctccaccattctacaggcttcccttggagtgcctgaccttgatgtttctggtctcttcaaggaaatagcccaaggggactcaatttcctatgaggaatttaaaagttttgccttaaagcatccagaatatgctaagatatttacaacatacctagacctccagacgtgccatgtgttttcattaccaaaagaagtccagacaaccccctccaccgccagtaataaagtcagccctgaaaagcatgaagagagtacctcagacaaaaaagatgactgaaagcagtatttccaataaggaaaacacagtagcttttgcttgaaattgtaaaggcacttattgataatacttttaatgtgttggtaatgatgtttaaaattgaaagatttttaaaacaaaaatgatagattttcttactaaaaatgtttttattaaccttgcttttattggaaaaaatcaagcaatatttcgttttcttttgtgttatattgtactttactgattcatttactggtgatacatatgtttttatggattttccagtttaatttgcatatacaaatgaatgcaatggtctattggtgagcattgagcaacactgtataaagttttaaaaatgtaaacactttttaatctactttcctctaaaaatcaataatattctattatttctaatccttttccacttgggaaataacaatgaagaatctgagaatttgacatctataactttacagattcatttttccatttaaatttcagtttcttggatcactgaatatgggaagggagagcttcactaattagacgcagcttcttaagaacttatattctctttgacatacatctctattgtagttttttgttttgttttgttttttgagatggagtcttgctctgtcacccaggctggagtgcagtggtgcaatctcagctcactgcaacctctgcctcctgggttcaagtgattctcgtacctcagactcccgagtagttgggattacaggtgcccaccaccacacccgactaatttttgtatttttagtagccatgtggttttgccatgttggccaggctggtttcgaactcctgacctcaggtgatccacccacctcagcctcccaaagtgctgggattacaggtgtgagccaccgttcccggcctattgtagattttcttaactacttgctaaggaaatcatatccttttacatgaactacaggtttagaacttggttttaagacaactgctatggccagaaggtaaatgggaattgccttattgaaggtaacattgattgcctaataagaaaatgaattgtttgccacagagttgaatttaatttgagttagatagttcagaatgtagcacttgccctataaatgaatcagatttgttctatttatataatattagaattaatatattatcatgtaagtgggaattttattttgttaagtggactctcaaattttagaacttgtgtgaaatatctcccagaaaacacaaaaggtttcaaggtatcacccaaagctagggaatcaacaaacgtactttattaatgcaagaccacaatttaagccccaggcaggaatccaacagtaacatttttcctttaggttaagcagtaatttttttgaattgtcatttttaatgggtctcacacatgcatattgctaatatcattcatgtttgaggttttcaacaaagaaccaatttattaatataatgtacaaaaatagttggttcattttctgaattcagtctttgaaataaaactccttgttttggccgtgtttctgaatgtattggtgattcacccccaagctaattttttaaagtcatttttgaagttgggaagtctcatgagagatgttgaagtatgtatttaatcaagagtcatgatttcaaactagttttacatattaagcagttagtgttctaatttaatgggtaaatgtgtgtttggataaatatctgaaaattttatccttaagtatatataattatttgcctcttatatgtcttaaagctatttaaacaaggtgttaaatgagccaaaacaattaagtaattagaacagtacatttttatcagagtgtctgtcatatgcaatgaatgtatgtaatactaaaaaatcatgactacttttatcaaagaaaaaccacacattaatcctattaatcatgaaagcgtagcattgtaaattaaaggttttctttgaggctcttgaaagtgatcccattgctttcctgttttaaaaatattttatgctctttatttccacttctgtgaatgtgatatttctattttgtgattatgttactgaataaacaaacttgctacataaaattcttagcaattaaaaaaattctgattctgccattttgtctcaaatgtaatatacccttttaatatcatatgtttacatatttatgaatgattaatcatttttgtttgcattaaactttatgaaatgtcagaaatgattttactctaatgaaactcaaattttgcccaaagtagcaatattcttaaagatgttgaattttgactggttgaattttatatagtaacacacaagtcgtgatcatcaatattattgcagaccaggactctgcttatatgccttgctaacaaagatttctttcacagaggcttttctcctctcaagacttaaagtaagaattacattttattaagtcagttaaatgcaccatggcttcatatagtaatataaaaaaactctttgaagtgagaaatattatatcctaaaacctctaaaccacaaacattcaattgaaagagttctgttgaaggataatgacatactgactgcttacagaccaagttgcttgcattttgtatgtttagccctcctttgccactgcttttagagccttggaaggctaagtgtgatagtaatgctagctctaatgcatatttaaaggagactgcctcgcttttagaagacatctggtctgctctctgcatgaggcacagcagtaaagctctttgattcccagaatcaagaactctccccttcagactattaccgaatgcaaggtggttaattgaaggccactaattgatgctcaaatagaaggatattgactatattggaacagatggagtctctactacaaaagtctttgggtatttgtttcttacatagaaaatgctaacatgaatagaaagatactggtgcaagaccattcccgggaaagtagacatacttacatttttttccttttctgctcatttgaatgaactcaattttatgttaaattgttatatcagagtgacaaataagtgctatggcttgatagaagtgaagctcttcacatatattcaaaatacatatcacaaactttggtaaataggatagtaatctgaagaacttttgccctttttaccccatttactgtaactcttgtttctaggtaatcgttctctctcaacaaacttctcaagcgtctgtgtaacaagccacatgttctaacaaattgtctccatcgcacttcaacagccaggtccctattttttataacgtattaaccttattattttcttattattttaaaagaatctatgcacattagcaaaatttaaaagatagagaaaaatataaacagaaaaaattatgtttacttctaccaccctaaatcaactattatcaattttatacatattttactccatcttttttcaaagtttcttacattttccaatgtcattaaaattctctgtgaatgtaaattttaaaaactgtacctactgttttttggaaatctgtaacaagctatgtgtaatcattcttctaatattaaacatattgtgtccagaattta

SEQ ID NO: 150329 - DNA, 616 bp, Homo sapiens
  Payload ID: 9682
  Gene Symbol: LPCAT2
  Gene Name: lysophosphatidylcholine acyltransferase 2
  ENST ID: ENST00000564084
  CDS Start-End: 1-566
ctgcccctcattcaacattctttgatggaattgcctgtgttgtagctgggttaccttctatggtatctcgaaatgagaatgcacaagtccctctgattggcagactgttacgggctgtgcaaccagttttggtgtcccgtgtagatccggattcccgaaaaaacacaataaatgaaataataaagcgaacaacatcaggaggagaatggccccagatactagttttcccagaaggtacttgtactaatcgttcctgtttgattacttttaaaccaggagccttcattccaggagttccagtgcagccagtcctcctcagatacccaaacaagctggatactgtgacctggacatggcaaggatatacattcattcagctttgtatgcttactttctgccagctcttcacaaaggtagaagttgagatgtttctgttcttttgggaaggaagcagcaagcattgtttaaaaatatcttccttcttttgcattttttctcttcgaagatttaaaagaagaattacacaaagaactagaactgcacatttgttaagattgtccttttaaaattattttctgttacaaggaaaaaataaaagattgattatagtgtcata

SEQ ID NO: 150330 - DNA, 5279 bp, Homo sapiens
  Payload ID: 9682
  Gene Symbol: LPCAT2
  Gene Name: lysophosphatidylcholine acyltransferase 2
  ENST ID: ENST00000615823
  CDS Start-End: 957-1715
gaaatacacaaaataactctttagcttgctctgagcatttttttcttttctgatagcaactttttaacgttgtggatccacagaacttactgctttgctttctcttttggggtcataattcctctccccttggagtgtccactccatgcatgtgcacttaggatgtgtggctgtgtgtgtgtttgggaaccctcacggacacataaggttctatgtcatcaagtagaaaacctatctcattatcattataatgtcttcagatgctttctaaggttcacctcttttttaacattagaagtcagtgaatgcagctttcattataatttttaatactttaaaatgtttttgtattagctgccagaatgctcagcagcaaagttatgactcacttctagcaagtgtggtagttcttgcttcaagcatttggtttcatgtagcttttcttcttattttttctttgtcttgattttatcattacttaaaacaattctgttgaatattaacacttggaaaatgaaaaaaagtggagaaataaatcaatgaataaacaaatattttaagtggcataggcacagcatttaatattttgcttcagtagttcttaattaaaaaaaaaaaatccctcattttggtaagcactagggatttaccaacatttagcaaatgatttctgttacacatactcttaaaatattcagtctatttatactatttattaattttctctttatcataaaacttttattcacataaaaacacattataaactttcaatgtggttgcaggagccttcattccaggagttccagtgcagccagtcctcctcagatacccaaacaagctggatactgtgacctggacatggcaaggatatacattcattcagctttgtatgcttactttctgccagctcttcacaaaggtagaagttgagtttatgccagttcaagtaccaaatgatgaagaaaaatgatcctgtcctttttgccaataaagtccggaatttaatggcagaagctctgggaataccagtaacagatcatacctatgaagactgcagattgatgatttcagcaggacagctaacattgcctatggaagctgggctggtggaatttactaaaattagccgaaaattgaaattagattgggatggtgttcgtaagcatttggatgaatatgcatctattgcgagttcctcaaaaggaggaagaattggaattgaagaattcgccaagtatttaaagttgcctgtttcagatgtcttgagacaactttttgcactctttgacaggaaccatgatggcagcattgacttccgagagtatgtgattggcctggctgtcttgtgcaacccttccaacacagaggagatcatccaggtggcatttaagctgtttgacgttgatgaggatggctacataacggaggaagagttctccaccattctacaggcttcccttggagtgcctgaccttgatgtttctggtctcttcaaggaaatagcccaaggggactcaatttcctatgaggaatttaaaagttttgccttaaagcatccagaatatgctaagatatttacaacatacctagacctccagacgtgccatgtgttttcattaccaaaagaagtccagacaaccccctccaccgccagtaataaagtcagccctgaaaagcatgaagagagtacctcagacaaaaaagatgactgaaagcagtatttccaataaggaaaacacagtagcttttgcttgaaattgtaaaggcacttattgataatacttttaatgtgttggtaatgatgtttaaaattgaaagatttttaaaacaaaaatgatagattttcttactaaaaatgtttttattaaccttgcttttattggaaaaaatcaagcaatatttcgttttcttttgtgttatattgtactttactgattcatttactggtgatacatatgtttttatggattttccagtttaatttgcatatacaaatgaatgcaatggtctattggtgagcattgagcaacactgtataaagttttaaaaatgtaaacactttttaatctactttcctctaaaaatcaataatattctattatttctaatccttttccacttgggaaataacaatgaagaatctgagaatttgacatctataactttacagattcatttttccatttaaatttcagtttcttggatcactgaatatgggaagggagagcttcactaattagacgcagcttcttaagaacttatattctctttgacatacatctctattgtagttttttgttttgttttgttttttgagatggagtcttgctctgtcacccaggctggagtgcagtggtgcaatctcagctcactgcaacctctgcctcctgggttcaagtgattctcgtacctcagactcccgagtagttgggattacaggtgcccaccaccacacccgactaatttttgtatttttagtagccatgtggttttgccatgttggccaggctggtttcgaactcctgacctcaggtgatccacccacctcagcctcccaaagtgctgggattacaggtgtgagccaccgttcccggcctattgtagattttcttaactacttgctaaggaaatcatatccttttacatgaactacaggtttagaacttggttttaagacaactgctatggccagaaggtaaatgggaattgccttattgaaggtaacattgattgcctaataagaaaatgaattgtttgccacagagttgaatttaatttgagttagatagttcagaatgtagcacttgccctataaatgaatcagatttgttctatttatataatattagaattaatatattatcatgtaagtgggaattttattttgttaagtggactctcaaattttagaacttgtgtgaaatatctcccagaaaacacaaaaggtttcaaggtatcacccaaagctagggaatcaacaaacgtactttattaatgcaagaccacaatttaagccccaggcaggaatccaacagtaacatttttcctttaggttaagcagtaatttttttgaattgtcatttttaatgggtctcacacatgcatattgctaatatcattcatgtttgaggttttcaacaaagaaccaatttattaatataatgtacaaaaatagttggttcattttctgaattcagtctttgaaataaaactccttgttttggccgtgtttctgaatgtattggtgattcacccccaagctaattttttaaagtcatttttgaagttgggaagtctcatgagagatgttgaagtatgtatttaatcaagagtcatgatttcaaactagttttacatattaagcagttagtgttctaatttaatgggtaaatgtgtgtttggataaatatctgaaaattttatccttaagtatatataattatttgcctcttatatgtcttaaagctatttaaacaaggtgttaaatgagccaaaacaattaagtaattagaacagtacatttttatcagagtgtctgtcatatgcaatgaatgtatgtaatactaaaaaatcatgactacttttatcaaagaaaaaccacacattaatcctattaatcatgaaagcgtagcattgtaaattaaaggttttctttgaggctcttgaaagtgatcccattgctttcctgttttaaaaatattttatgctctttatttccacttctgtgaatgtgatatttctattttgtgattatgttactgaataaacaaacttgctacataaaattcttagcaattaaaaaaattctgattctgccattttgtctcaaatgtaatatacccttttaatatcatatgtttacatatttatgaatgattaatcatttttgtttgcattaaactttatgaaatgtcagaaatgattttactctaatgaaactcaaattttgcccaaagtagcaatattcttaaagatgttgaattttgactggttgaattttatatagtaacacacaagtcgtgatcatcaatattattgcagaccaggactctgcttatatgccttgctaacaaagatttctttcacagaggcttttctcctctcaagacttaaagtaagaattacattttattaagtcagttaaatgcaccatggcttcatatagtaatataaaaaaactctttgaagtgagaaatattatatcctaaaacctctaaaccacaaacattcaattgaaagagttctgttgaaggataatgacatactgactgcttacagaccaagttgcttgcattttgtatgtttagccctcctttgccactgcttttagagccttggaaggctaagtgtgatagtaatgctagctctaatgcatatttaaaggagactgcctcgcttttagaagacatctggtctgctctctgcatgaggcacagcagtaaagctctttgattcccagaatcaagaactctccccttcagactattaccgaatgcaaggtggttaattgaaggccactaattgatgctcaaatagaaggatattgactatattggaacagatggagtctctactacaaaagtctttgggtatttgtttcttacatagaaaatgctaacatgaatagaaagatactggtgcaagaccattcccgggaaagtagacatacttacatttttttccttttctgctcatttgaatgaactcaattttatgttaaattgttatatcagagtgacaaataagtgctatggcttgatagaagtgaagctcttcacatatattcaaaatacatatcacaaactttggtaaataggatagtaatctgaagaacttttgccctttttaccccatttactgtaactcttgtttctaggtaatcgttctctctcaacaaacttctcaagcgtctgtgtaacaagccacatgttctaacaaattgtctccatcgcacttcaacagccaggtccctattttttataacgtattaaccttattattttcttattattttaaaagaatctatgcacattagcaaaatttaaaagatagagaaaaatataaacagaaaaaattatgtttacttctaccaccctaaatcaactattatcaattttatacatattttactccatcttttttcaaagtttcttacattttccaatgtcattaaaattctctgtgaatgtaaattttaaaaactgtacctactgttttttggaaatctgtaacaagctatgtgtaatcattcttctaatattaaacatattgtgtcc

SEQ ID NO: 150331 - DNA, 2268 bp, Homo sapiens
  Payload ID: 9683
  Gene Symbol: LPCAT3
  Gene Name: lysophosphatidylcholine acyltransferase 3
  Uniprot ID: Q6P1A2
  ENST ID: ENST00000261407
  CDS Start-End: 87-1550
ccggaattgggggtgaagcgatagcgttttgcccgcattcggggcgcgcggagctggggggtccctgtggggctcccggagttaagatggcgtcctcagcggagggggacgaggggactgtggtggcgctggcgggggttctgcagtcgggtttccaggagctgagccttaacaagttggcgacgtccctgggcgcgtcagaacaggcgctgcggctgatcatctccatcttcctgggttacccctttgctttgttttatcggcattaccttttctacaaggagacctacctcatccacctcttccatacctttacaggcctctcaattgcttattttaactttggaaaccagctctaccactccctgctgtgtattgtgcttcagttcctcatccttcgactaatgggccgcaccatcactgccgtcctcactaccttttgcttccagatggcctaccttctggctggatactattacactgccaccggcaactacgatatcaagtggacaatgccacattgtgttctgactttgaagctgattggtttggctgttgactactttgacggagggaaagatcagaattccttgtcctctgagcaacagaaatatgccatacgtggtgttccttccctgctggaagttgctggtttctcctacttctatggggccttcttggtagggccccagttctcaatgaatcactacatgaagctggtgcagggagagctgattgacataccaggaaagataccaaacagcatcattcctgctctcaagcgcctgagtctgggccttttctacctagtgggctacacactgctcagcccccacatcacagaagactatctcctcactgaagactatgacaaccaccccttctggttccgctgcatgtacatgctgatctggggcaagtttgtgctgtacaaatatgtcacctgttggctggtcacagaaggagtatgcattttgacgggcctgggcttcaatggctttgaagaaaagggcaaggcaaagtgggatgcctgtgccaacatgaaggtgtggctctttgaaacaaacccccgcttcactggcaccattgcctcattcaacatcaacaccaacgcctgggtggcccgctacatcttcaaacgactcaagttccttggaaataaagaactctctcagggtctctcgttgctattcctggccctctggcacggcctgcactcaggatacctggtctgcttccagatggaattcctcattgttattgtggaaagacaggctgccaggctcattcaagagagccccaccctgagcaagctggccgccattactgtcctccagcccttctactatttggtgcaacagaccatccactggctcttcatgggttactccatgactgccttctgcctcttcacgtgggacaaatggcttaaggtgtataaatccatctatttccttggccacatcttcttcctgagcctactattcatattgccttatattcacaaagcaatggtgccaaggaaagagaagttaaagaagatggaataatccatttccctggtggcctgtgcgggactggtgcagaaactactcgtctcccttttcacagcactcctttgccccagagcagagaatggaaaagccagggaggtggaagatcgatgcttccagctgtgcctctgctgccagccaagtcttcatttggggccaaaggggaaacttttttttggagaaggcgtcttgctttgtcacccacgctggaatgcagtggcgggatctcagctcaccgcaacctccacctcctgggttcaagtgattttcctgcctcagcctcccaagtagctgggaatacaggcacgccaccatgcccagctaatttttgtattttcagtagaaacgggatttcaccacgttggccaggctggtctcgaactcctgaccgcaagtgatccacccgcctccgcctcccaaagtgctgggattacaggcgtgagccaccgtgcccggcccaaaggggaaactcttgtgggaggagcagaggggctcacatctcccctctgattcccccatgcacattgccttatctctccccatctagccaggaatctattgtgtttttcttctgccaatttactatgattgtgtatgtgccgctaccaccaccccccccatgggggggtggagaggggtgcaaggccctgcctgctccactttttctaccttggaactgtattagataaaatcacttctgtttgttcagtttttc

SEQ ID NO: 150332 - DNA, 571 bp, Homo sapiens
  Payload ID: 9683
  Gene Symbol: LPCAT3
  Gene Name: lysophosphatidylcholine acyltransferase 3
  ENST ID: ENST00000538910
  CDS Start-End: 51-245
attcggggcgcgcggagctggggggtccctgtggggctcccggagttaagatggcgtcctcagcggagggggacgaggggactgtggtggcgctggcgggggttctgcagtcgggtttccaggagctgagccttaacaagttggcgacgtccctgggcgcgtcagaacaggcgctgcggctgatcatctccatcttcctgggaacaccttggatgaagcccctacccgcagaattctggcagtagcagcagaattttcaggttacccctttgctttgttttatcggcattaccttttctacaaggagacctacctcatccacctcttccatacctttacaggcctctcaattgcttattttaactttggaaaccagctctaccactccctgctgtgtattgtgcttcagttcctcatccttcgactaatgggccgcaccatcactgccgtcctcactaccttttgcttccagatggcctaccttctggctggatactattacactgccaccggcaactacgatatcaagtggacaatgccacattgtgttctgactttgaagctgattggt

SEQ ID NO: 150333 - DNA, 2902 bp, Homo sapiens
  Payload ID: 9683
  Gene Symbol: LPCAT3
  Gene Name: lysophosphatidylcholine acyltransferase 3
  ENST ID: ENST00000535479
  CDS Start-End: 54-1097
cgcattcggggcgcgcggagctggggggtccctgtggggctcccggagttaagatggcgtcctcagcggagggggacgaggggactgtggtggcgctggcgggggttctgcagtcgggtttccaggagctgagccttaacaagttggcgacgtccctgggcgcgtcagaacaggcgctgcggctgatcatctccatcttcctgggttacccctttgctttgttttatcggcattaccttttctacaaggagacctacctcatccacctcttccatacctttacaggcctctcaattgcttattttaactttggaaaccagctctaccactccctgctgtgtattgtgcttcagttcctcatccttcgactaatgggccgcaccatcactgccgtcctcactaccttttgcttccagatggcctaccttctggctggatactattacactgccaccggcaactacgatatcaagtggacaatgccacattgtgttctgactttgaagctgattggtttggctgttgactactttgacggagggaaagatcagaattccttgtcctctgagcaacagaaatatgccatacgtggtgttccttccctgctggaagttgctggtttctcctacttctatggggccttcttggtagggccccagttctcaatgaatcactacatgaagctggtgcagggagagctgattgacataccaggaaagataccaaacagcatcattcctgctctcaagcgcctgagtctgggccttttctacctagtgggctacacactgctcagcccccacatcacagaagactatctcctcactgaagactatgacaaccaccccttctggttccgctgcatgtacatgctgatctggggcaagtttgtgctgtacaaatatgtcacctgttggctggtcacagaaggagtatgcattttgacgggcctgggcttcaatggctttgaagaaaagggcaaggcaaagtgggatgcctgtgccaacatgaaggtgtggctctttgaaacaaacccccgcttcactggcaccattgcctcattcaacatcaacaccaacgcctgggtggcccggtgagctgctggtggggagcctggaccctggttccttccttccactgtcttcccagattggagggcaggggtgtaccatgtcacccctatgcgtctttcccatctgggcagaaccccctgtcgctcacactgactttgacccccacctatacccccctcccaaaaaaaccattactgtcatatttgaaaaaaaggcaagatataaaagtgcgttaagacctgggtgttactccagctctgccaatggacttatgtcctccactgccctgtttatcaacagctttacttgtttgtccccaccactagagtgtgggcagcttgagtagagtgtctggttcaccactgatctcagcatcagcctcagtcactgctgctgaaccaagtggctcgtgcgcacacggtctccagctccgccttgggtctgctttccatctctaaaagtaatcagtcagcactgcctcctgtaccctctgggggctacacgtgggaacccaccagcactccaatccaatcctcagggtgaggacccagaggcaggtggcgggatgcaaggaccagtcagtttgagggtcgccccacccacccttttctccagctacatcttcaaacgactcaagttccttggaaataaagaactctctcagggtctctcgttgctattcctggccctctggcacggcctgcactcaggatacctggtctgcttccagatggaattcctcattgttattgtggaaagacaggtaggcctccagggtgggggtgaaggggaatataagggacaagatgctgatgagctcctcctccctccccaggctgccaggctcattcaagagagccccaccctgagcaagctggccgccattactgtcctccagcccttctactatttggtgcaacagaccatccactggctcttcatgggttactccatgactgccttctgcctcttcacgtgggacaaatggcttaaggtgtataaatccatctatttccttggccacatcttcttcctgagcctactattcatattgccttatattcacaaagcaatggtgccaaggaaagagaagttaaagaagatggaataatccatttccctggtggcctgtgcgggactggtgcagaaactactcgtctcccttttcacagcactcctttgccccagagcagagaatggaaaagccagggaggtggaagatcgatgcttccagctgtgcctctgctgccagccaagtcttcatttggggccaaaggggaaacttttttttggagaaggcgtcttgctttgtcacccacgctggaatgcagtggcgggatctcagctcaccgcaacctccacctcctgggttcaagtgattttcctgcctcagcctcccaagtagctgggaatacaggcacgccaccatgcccagctaatttttgtattttcagtagaaacgggatttcaccacgttggccaggctggtctcgaactcctgaccgcaagtgatccacccgcctccgcctcccaaagtgctgggattacaggcgtgagccaccgtgcccggcccaaaggggaaactcttgtgggaggagcagaggggctcacatctcccctctgattcccccatgcacattgccttatctctccccatctagccaggaatctattgtgtttttcttctgccaatttactatgattgtgtatgtgccgctaccaccaccccccccatgggggggtggagaggggtgcaaggccctgcctgctccactttttctaccttggaactgtattagataaaatcacttctgtttgttcagtttttc

SEQ ID NO: 150334 - DNA, 1412 bp, Homo sapiens
  Payload ID: 9683
  Gene Symbol: LPCAT3
  Gene Name: lysophosphatidylcholine acyltransferase 3
  ENST ID: ENST00000536797
  CDS Start-End: 51-647
attcggggcgcgcggagctggggggtccctgtggggctcccggagttaagatggcgtcctcagcggagggggacgaggggactgtggtggcgctggcgggggttctgcagtcgggtttccaggagctgagccttaacaagttggcgacgtccctgggcgcgtcagaacaggcgctgcggctgatcatctccatcttcctgggttacccctttgctttgttttatcggcattaccttttctacaaggagacctacctcatccacctcttccatacctttacaggcctctcaattgcttattttaactttggaaaccagctctaccactccctgctgtgtattgtgcttcagttcctcatccttcgactaatgggccgcaccatcactgccgtcctcactaccttttgcttccagatggcctaccttctggctggatactattacactgccaccggcaactacgatatcaagtggacaatgccacattgtgttctgactttgaagctgattggtttggctgttgactactttgacggagggaaagatcagcatcattcctgctctcaagcgcctgagtctgggccttttctacctagtgggctacacactgctcagcccccacatcacagaagactatctcctcactgaagactatgacaaccaccccttctggttccgctgcatgtacatgctgatctggggcaagtttgtgctgtacaaatatgtcacctgttggctggtcacagaaggagtatgcattttgacgggcctgggcttcaatggctttgaagaaaagggcaaggcaaagtgggatgcctgtgccaacatgaaggtgtggctctttgaaacaaacccccgcttcactggcaccattgcctcattcaacatcaacaccaacgcctgggtggcccggtgagctgctggtggggagcctggaccctggttccttccttccactgtcttcccagattggagggcaggggtgtaccatgtcacccctatgcgtctttcccatctgggcagaaccccctgtcgctcacactgactttgacccccacctatacccccctcccaaaaaaaccattactgtcatatttgaaaaaaaggcaagatataaaagtgcgttaagacctgggtgttactccagctctgccaatggacttatgtcctccactgccctgtttatcaacagctttacttgtttgtccccaccactagagtgtgggcagcttgagtagagtgtctggttcaccactgatctcagcatcagcctcagtcactgctgctgaaccaagtggctcgtgcgcacacggtctccagctccgccttgggtctgctttccatctctaaaagtaatcagtcagcactgcctcctgtaccctctgggggctacacgtgggaacccaccagcac

SEQ ID NO: 150335 - DNA, 974 bp, Homo sapiens
  Payload ID: 9683
  Gene Symbol: LPCAT3
  Gene Name: lysophosphatidylcholine acyltransferase 3
  ENST ID: ENST00000540090
  CDS Start-End: 51-308
attcggggcgcgcggagctggggggtccctgtggggctcccggagttaagatggcgtcctcagcggagggggacgaggggactgtggtggcgctggcgggggttctgcagtcgggtttccaggagctgagccttaacaagttggcgacgtccctgggcgcgtcagaacaggcgctgcggctgatcatctccatcttcctgggcctaccttctggctggatactattacactgccaccggcaactacgatatcaagtggacaatgccacattgtgttctgactttgaagctgattggtttggctgttgactactttgacggagggaaagatcagaattccttgtcctctgagcaacagaaatatgccatacgtggtgttccttccctgctggaagttgctggtttctcctacttctatggggccttcttggtagggccccagttctcaatgaatcactacatgaagctggtgcagggagagctgattgacataccaggaaagataccaaacagcatcattcctgctctcaagcgcctgagtctgggccttttctacctagtgggctacacactgctcagcccccacatcacagaagactatctcctcactgaagactatgacaaccaccccttctggttccgctgcatgtacatgctgatctggggcaagtttgtgctgtacaaatatgtcacctgttggctggtcacagaaggagtatgcattttgacgggcctgggcttcaatggctttgaagaaaagggcaaggcaaagtgggatgcctgtgccaacatgaaggtgtggctctttgaaacaaacccccgcttcactggcaccattgcctcattcaacatcaacaccaacgcctgggtggcccgctacatcttcaaacgactcaagttccttggaaataaagaactctctcagggtctctcgttgctattcctggccctctggcacggcctgcactcaggata

SEQ ID NO: 150336 - DNA, 1099 bp, Homo sapiens
  Payload ID: 9683
  Gene Symbol: LPCAT3
  Gene Name: lysophosphatidylcholine acyltransferase 3
  ENST ID: ENST00000543794
  CDS Start-End: 51-527
attcggggcgcgcggagctggggggtccctgtggggctcccggagttaagatggcgtcctcagcggagggggacgaggggactgtggtggcgctggcgggggttctgcagtcgggtttccaggagctgagccttaacaagttggcgacgtccctgggcgcgtcagaacaggcgctgcggctgatcatctccatcttcctgggttacccctttgctttgttttatcggcattaccttttctacaaggagacctacctcatccacctcttccatacctttacaggcctctcaattgcttattttaactttggaaaccagctctaccactccctgctgtgtattgtgcttcagttcctcatccttcgactaatgggccgcaccatcactgccgtcctcactaccttttgcttccagatggcctaccttctggctggatactattacactgccaccggcaactacgatatcaagtggacaatgccacattgtgttctgactttgaagctgattgaattccttgtcctctgagcaacagaaatatgccatacgtggtgttccttccctgctggaagttgctggtttctcctacttctatggggccttcttggtagggccccagttctcaatgaatcactacatgaagctggtgcagggagagctgattgacataccaggaaagataccaaacagcatcattcctgctctcaagcgcctgagtctgggccttttctacctagtgggctacacactgctcagcccccacatcacagaagactatctcctcactgaagactatgacaaccaccccttctggttccgctgcatgtacatgctgatctggggcaagtttgtgctgtacaaatatgtcacctgttggctggtcacagaaggagtatgcattttgacgggcctgggcttcaatggctttgaagaaaagggcaaggcaaagtgggatgcctgtgccaacatgaaggtgtggctctttgaaacaaacccccgcttcactggcaccattgcctcattcaacatcaacaccaacgcctgggtggcccgctacatcttcaaacgactcaagttccttggaaataaagaactctctc

SEQ ID NO: 150337 - DNA, 2262 bp, Homo sapiens
  Payload ID: 9684
  Gene Symbol: LPCAT4
  Gene Name: lysophosphatidylcholine acyltransferase 4
  Uniprot ID: Q643R3
  ENST ID: ENST00000314891
  CDS Start-End: 179-1753
ggcgccctgacaacgcgggcgggctgggctgcgccgcctgctccccgcccctcggccgcctgcaccgggcggggcccgggccagagcgccgccgccgccgctgctgcagcagcagctgctctgcagagtggtggccggggccagggccggggtgccctccctcccaccttctcccgccatgagccagggaagtccgggggactgggcccccctagatcccacccccggacccccagcatcccccaaccccttcgtgcatgagttacatctctctcgcctccagagggttaagttctgcctcctgggggcattgctggcccccatccgagtgcttctggcctttatcgtcctctttctcctctggccctttgcctggcttcaagtggccggtcttagtgaggagcagcttcaggagccaattacaggatggaggaagactgtgtgccacaacggggtgctaggcctgagccgcctgctgtttttcctgctgggcttcctccggattcgcgttcgtggccagcgagcctctcgccttcaagcccctgtccttgttgctgccccacactccactttctttgaccccattgttctgctgccctgtgacctgcccaaagttgtgtcccgagctgagaacctttccgttcctgtcattggagcccttcttcgattcaaccaagccatcctggtatcccggcatgacccggcttctcgacgcagagtggtggaggaggtccgaaggcgggccacctcaggaggcaagtggccgcaggtgctattctttcctgagggcacctgttccaacaagaaggctttgcttaagttcaaaccaggagccttcatcgcaggggtgcctgtgcagcctgtcctcatccgctaccccaacagtctggacaccaccagctgggcatggaggggtcctggagtactcaaagtcctctggctcacagcctctcagccctgcagcattgtggatgtggagttccttcctgtgtatcaccccagccctgaggagagcagggaccccaccctctatgccaacaatgttcagagggtcatggcacaggctctgggcattccagccaccgaatgtgagtttgtagggagcttacctgtgattgtggtgggccggctgaaggtggcgttggaaccacagctctgggaactgggaaaagtgcttcggaaggctgggctgtccgctggctatgtggacgctggggcagagccaggccggagtcgaatgatcagccaggaagagtttgccaggcagctacagctctctgatcctcagacggtggctggtgcctttggctacttccagcaggataccaagggtttggtggacttccgagatgtggcccttgcactagcagctctggatgggggcaggagcctggaagagctaactcgtctggcctttgagctctttgctgaagagcaagcagagggtcccaaccgcctgctgtacaaagacggcttcagcaccatcctgcacctgctgctgggttcaccccaccctgctgccacagctttgcatgctgagctgtgccaggcaggatccagccaaggcctctccctctgtcagttccagaacttctccctccatgacccactctatgggaaactcttcagcacctacctgcgccccccacacacctctcgaggcacctcccagacaccaaatgcctcatccccaggcaaccccactgctctggccaatgggactgtgcaagcacccaagcagaagggagactgagtgcctcagcctctcaccccctcctcctcagggcagcgctaggggcctcccctatgcctcagccccatctctgctcctgtttgaattttgttattgttgtttggttgttgtttttttaagttgattttaattttttgtttggttgatttttttgtaaaaaactattttatatataaatataaatctatatctatatctattaaaaaaaatgaagtccagtcatattgatgttaccattacttgggaaggaaagggatgaatggttgtaggacgcccgttggaaaatcacaaatgtttccaaggttcgtcctcttggccatagctggatgaatcttcctcttcggacagggctctttcctgcacagaaatcatactgaggttccatatcctccctcctgctgtcatctcctatatgtacattttaacagacttcctcgtgaacctcttttcagcccattccctcttgctctgtcctcattaaagattaaaaaatagcttgctaccattcc

SEQ ID NO: 150338 - DNA, 672 bp, Homo sapiens
  Payload ID: 9684
  Gene Symbol: LPCAT4
  Gene Name: lysophosphatidylcholine acyltransferase 4
  ENST ID: ENST00000567507
  CDS Start-End: 1-255
ttccttcctgtgtatcaccccagccctgaggagagcagggaccccaccctctatgccaacaatgttcagagggtcatggcacaggctctgggcattccagccaccgaatgtgagtttgtagggagcttacctgtgattgtggtgggccggctgaaggtggcgttggaaccacagctctgggaactgggaaaagtgcttcggaaggctgggataccaagggtttggtggacttccgagatgtggcccttgcactagcagctctggatgggggcaggagcctggaagagctaactcgtctggcctttgagctctttgctgaagagcaagcagagggtcccaaccgcctgctgtacaaagacggcttcagcaccatcctgcacctgctgctgggttcaccccaccctgctgccacagctttgcatgctgagctgtgccaggcaggatccagccaaggcctctccctctgtcagttccagaacttctccctccatgacccactctatgggaaactcttcagcacctacctgcgccccccacacacctctcgaggcacctcccagacaccaaatgcctcatccccaggcaaccccactgctctggccaatgggactgtgcaagcacccaagcagaagggagactgagtgcctcagcctctcaccccctcctcctcag

SEQ ID NO: 150339 - DNA, 1719 bp, Homo sapiens
  Payload ID: 9684
  Gene Symbol: LPCAT4
  Gene Name: lysophosphatidylcholine acyltransferase 4
  ENST ID: ENST00000617710
  CDS Start-End: 463-1518
cagcatcccccaaccccttcgtgcatgagttacatctctctcgcctccagagggttaagttctgcctcctgggggcattgctggcccccatccgagtgcttctggcctttatcgtcctctttctcctctggccctttgcctggcttcaagtggccggtcttagtgaggagcagcttcaggagccaattacaggatggaggaagactgtgtgccacaacggggtgctaggcctgagccgcctgctgtttttcctgctgggcttcctccggattcgcgttcgtggccagcgagcctctcgccttcaagcccctgtccttgttgctgccccacactccactttctttgaccccattgttctgctgccctgtgacctgcccaaagttgtgtcccgagctgagaacctttccgttcctgtcattggagcccttcttcgattcaaccaagccatcctggtatcccggcatgacccggcttctcgacgcagagtggtggaggaggtccgaagcgggccacctcaggaggcaagtggccgcagtgctattctttcctgagggcacctgttccaacaagaaggctttgcttaagttcaaaccaggagccttcatcgcaggggtgcctgtgcagcctgtcctcatccgctaccccaacagtctggacaccaccagctgggcatggaggggtcctggagtactcaaagtcctctggctcacagcctctcagccctgcagcattgtggatgtggagttccttcctgtgtatcaccccagccctgaggagagcagggaccccaccctctatgccaacaatgttcagagggtcatggcacaggctctgggcattccagccaccgaatgtgagtttgtagggagcttacctgtgattgtggtgggccggctgaaggtggcgttggaaccacagctctgggaactgggaaaagtgcttcggaaggctgggctgtccgctggctatgtggacgctggggcagagccaggccggagtcgaatgatcagccaggaagagtttgccaggcagctacagctctctgatcctcagacggtggctggtgcctttggctacttccagcaggataccaagggtttggtggacttccgagatgtggcccttgcactagcagctctggatgggggcaggagcctggaagagctaactcgtctggcctttgagctctttgctgaagagcaagcagagggtcccaaccgcctgctgtacaaagacggcttcagcaccatcctgcacctgctgctgggttcaccccaccctgctgccacagctttgcatgctgagctgtgccaggcaggatccagccaaggcctctccctctgtcagttccagaacttctccctccatgacccactctatgggaaactcttcagcacctacctgcgccccccacacacctctcgaggcacctcccagacaccaaatgcctcatccccaggcaaccccactgctctggccaatgggactgtgcaagcacccaagcagaagggagactgagtgcctcagcctctcaccccctcctcctcagggcagcgctaggggcctcccctatgcctcagccccatctctgctcctgtttgaattttgttattgttgtttggttgttgtttttttaagttgattttaattttttgtttggttgatttttttgtaaaaaactattttatatataaatataaatctatatctatatctatt

SEQ ID NO: 150340 - DNA, 2035 bp, Homo sapiens
  Payload ID: 9685
  Gene Symbol: LPGAT1
  Gene Name: lysophosphatidylglycerol acyltransferase 1
  Uniprot ID: Q92604
  ENST ID: ENST00000366996
  CDS Start-End: 817-1929
ggcgggggacacccgcccccgctctccgcagccgcccgccgtccgcgcccgccgaggtgagcccggcgcgcgggccgcgcccgccgccacgacccttccacatccgcggaaaccgctgcaggctccaccggctccccgcgctgcggtcgcctcttctctgcccctttcatcatcccctgcttccttgccctctggtcggaaatctcattctcttcatccccagttccttggcttttacctctttctggcttttgctcccttccccctactcctgtccttcctctttttcgcattataaccccctactttcttcctctcaccttgtaagctttttttctaggccccccattttttttcttaaaaaaaaaagggaaacaaaaaccctattgctacaaatgagaattttgagggtaactcttcgctagagccagagaccttttaaaggaatgcatcggtgtgcaggaatcgtggtggtgaggagactgaggtcctcagtatctgggaaatcttattgaggggaccctgtttcggtcatgtcacttgtgtcttcagtttggagatcctgaggttgtctgaagcgagtggatctatttttctaagtccaatagacgaccgcagtgagacacggtgcggggacggccaccgattactgaatgggaattgtgttatcatttgctaaatatattgtgacatacttcgtgcctcggtgaacagctcccttgaccttgtgcggctcctcctccctcgctctctgtccccctctggaatttcccctgagagatcaccgagaaagacaggacggagtccagtgtgagaatggctataactttggaagaagctccgtggctgggctggctcttggtgaaagcactgatgaggtttgccttcatggtcgtcaacaacctggttgctattccatcctacatctgctatgtaattatacttcagccccttcgagtgctggacagtaagcggttctggtatatcgaaggaatcatgtataaatggcttttaggaatggtagcttcctggggatggtatgctggatatacagtgatggaatggggagaagatattaaagcagtttcaaaagatgaagcagtgatgttggtgaatcatcaggcaacaggagatgtgtgcacactgatgatgtgcctccaggacaaaggactggttgttgctcagatgatgtggttgatggatcatatttttaagtacacaaactttggaattgtttctctagttcatggagacttctttataagacagggaagatcttatcgtgaccaacagctgctgcttctcaagaagcacttagaaaataattacaggagcagagatcgaaaatggattgttttgtttccagaagggggcttcctcaggaagaggcgagaaacaagtcaggcatttgccaagaaaaataacttgccatttcttacaaatgttactctgccaaggtctggggcaacaaaaattattttgaatgcacttgtagcacaacagaaaaatggaagtccagcaggaggagatgctaaagaattagacagcaaatcaaaaggcctccagtggataatagatacaacgatagcttatcccaaagctgaacctatagatattcaaacctggatccttggatacaggaaaccaacagtcacacatgtacattacaggatctttccaattaaagatgtacccctggagactgatgaccttaccacttggctctatcagcggtttgttgaaaaagaagacctcttatcacatttttatgaaacaggagcttttccaccttccaagggccataaggaagctgtttccagggagatgaccctcagcaacttgtggatatttctcatacagtcttttgcatttttgtcaggctatatgtggtacaacatcattcagtatttttaccattgcctgttttaggaattgacgtggacttgtcaaggtcaccgtaggagttcagactttctttcataagtgtgcattattttacatgtgcaaatcagaatatatttaaaaaaaagcaaaa

SEQ ID NO: 150341 - DNA, 7782 bp, Homo sapiens
  Payload ID: 9685
  Gene Symbol: LPGAT1
  Gene Name: lysophosphatidylglycerol acyltransferase 1
  Uniprot ID: Q92604
  ENST ID: ENST00000366997
  CDS Start-End: 228-1340
ctccccgccagtccgggcgaacgcggccgggcccttggggaccgagtctcggcgccgccggggaacgggcgcgggccgcgccacagccggagcggggcagggccccgccaccgccttcttccgccggccccgccgccggccatgcattcttccggctcctctgactcccaaagccccggctggggcccggccagcccgagaaagacaggacggagtccagtgtgagaatggctataactttggaagaagctccgtggctgggctggctcttggtgaaagcactgatgaggtttgccttcatggtcgtcaacaacctggttgctattccatcctacatctgctatgtaattatacttcagccccttcgagtgctggacagtaagcggttctggtatatcgaaggaatcatgtataaatggcttttaggaatggtagcttcctggggatggtatgctggatatacagtgatggaatggggagaagatattaaagcagtttcaaaagatgaagcagtgatgttggtgaatcatcaggcaacaggagatgtgtgcacactgatgatgtgcctccaggacaaaggactggttgttgctcagatgatgtggttgatggatcatatttttaagtacacaaactttggaattgtttctctagttcatggagacttctttataagacagggaagatcttatcgtgaccaacagctgctgcttctcaagaagcacttagaaaataattacaggagcagagatcgaaaatggattgttttgtttccagaagggggcttcctcaggaagaggcgagaaacaagtcaggcatttgccaagaaaaataacttgccatttcttacaaatgttactctgccaaggtctggggcaacaaaaattattttgaatgcacttgtagcacaacagaaaaatggaagtccagcaggaggagatgctaaagaattagacagcaaatcaaaaggcctccagtggataatagatacaacgatagcttatcccaaagctgaacctatagatattcaaacctggatccttggatacaggaaaccaacagtcacacatgtacattacaggatctttccaattaaagatgtacccctggagactgatgaccttaccacttggctctatcagcggtttgttgaaaaagaagacctcttatcacatttttatgaaacaggagcttttccaccttccaagggccataaggaagctgtttccagggagatgaccctcagcaacttgtggatatttctcatacagtcttttgcatttttgtcaggctatatgtggtacaacatcattcagtatttttaccattgcctgttttaggaattgacgtggacttgtcaaggtcaccgtaggagttcagactttctttcataagtgtgcattattttacatgtgcaaatcagaatatatttaaaaaaaagcaaaagaaattcaatggatggattaatatttatccccctttgggatattttaaaatctactaaaatgaggattagtaatataatgacctgctaatatattttaagaacatgttttaaaaagatacactctatcacatatttaagcaaacatcacatttggagaagaggaaatcataaaatcatcctagaagactatctgagagaaattctgttgccaccagttatacttgacaatttagttgaagctcagaaagttatattcatccctcttagctgtagtctatattagggcagttctctagaacgcccacatttccaccaactcagtaaacttgaggggagctggttggcacctcgtgaagaactctttccctgtcgtttgcagtaacaaactccagtctgttgcagtaacaaactccagtctgttgcagtaacaaactctagaatattgacattctctgtgggggaaaagcagtgtccactggaccccttctggtactggatgtgttctttacaaaggctagctcagtccaacactgtgtttacatacactcgtgcttttccttatctgacttctcattttgtatcagaggcatatcataaattgataattttgcaaaatgcacttttttgagatgcagatatagcaaaggattagtaatatagcctgaaaacaaatgggagcatagcagtgtgtgaggttctcgagaactgtcttgtctctgtgtgtttatttgcctgccagtgctctccagcgccatcctgccctggacaccaccctgacgtgatgcctctattgcagctcagaggctttattttttccattttgacattggcactaaatgcatttggggatggttaaaacaaattactatagaacatttaaatgatcagtttaaggggaaataggctagtttatagaaaaataagagctagtggcttataatggtgacaggttctcatgtggcacccctaggacctgtgcagacagtagtctgttgaatcattacatcaaggagctgcccctgtcagggtgagtgtaattaggaacgataccagcacataaggctccccccaatctcttccagttgctttttcttttttcttttttttttagacaggtcttactctgtcacccaggctgtagtgcagtggcataatctcagctcactgcagtctctgcctcccgggttcgagcgattctcctgcctcagcctcccgagtagctgggactacaggcacccaccatcatgcttggctaatttttgtatttttagtagagatggggtttcaccatgttggccaggctggcctcgaactcctgacctcaggtgatctgcccacctcggcttcctaaagtgctgggattgcaggcgtgagccaccacgcccggcctccagttgcttttgaagagggtaaagtcaagtttctatttctagaaaacattttttagaaatttgttgcgatgtttgtacaatttacctcataagagaaccacacccttctccaaaagtgctggtactgcatcagtgagatgagtagggtttttgtttgggattgtaagactattaagatcctagtaagtcagtggtagtttactgtgatgtgagcattgtagattcccccgttgtcactaatcacacaacaattttgagaagtaggctataaaacaaaaaaaggttgctgttttctatttttaaataaaccaaaaaaaaacagaaaagatgtgaattttccccagttatgtgggaaaggtaaagcaacaccaaataaaagcccacagcagcttcatctttacgataactcagtgcatatgtgaaagagaatgatgcattaactgaaatacctcattgaatattatactactactggtaaaatgcagaagacagtgttaatgtgtttggtttggggactggttgttataaaatgcaatttttttttaaatctaagcatttcattatgtgttctacagtgtcggtgaataaatgaaaccaatctcaatttagaggtatggatgatgacagaaagcccaatagaagcttaatgatgcttctgtttgaggcccagcaagcaccactaaattactggatgaaatgaaattgttcacttgagggattagtcaaccatctgggggagaagttgctcactgtcaaatacagcatgcacggtcctagctgatagaccttttcctcattgctacagcaagccacagggtagagtgaccagttctcctatccaaaaataaatgcgaacatgcatacataaatgtggctgagggccacttttgccatcactgtgctccaaaggaacatgatattgttaaatatactgtacacattaaactattctataagatgctttacttttcaagtacggtgtcattttcacagtctccagggtgacaaatgccaatagatatgtgagttaatttttttaaatatctccgtgagttgtaaatagatgtgtatttgatctgccctatccttctttgattctttaacatgttctctctcttctgtttgcaaaatatgtttgaaagcattggtagtgctttccttatcagtaactggagttctcctgcttgcactagagaaggtaaagagagaatcagtattcttatatggcaatctggggaagcagcaatatgccactgtacaaaactgaagaaaagttcctaatttgtactttgtgaagggagatgaaaggacgtttaaagtatatatattttgtcaagaggaaagaagataaaactatgccagttttatatcaatagcttgtagaagctcagctcttcttggtcttggctagactgcctagattcccacagcagacaaggttgagaatccattgctggaatcttggtattgatgagttacagtgatggaacatgtgcttggccacaggcaggtccagtcactgcaaaagtgaccaagccagcaggtcacccttaacttcagaaacaattattggtggtgaactgtacttaaattgcagagaaacctgtaagtaatggaaggtaaagaaaaattacagaatggaaaataatattttgggcaagcaaacaaattcactgagaattccaaaagtatattaaaaaagaagatagctatgagttcagatctatcttattggtctttaatattacaaccaatccttaactttccactataaaggaaggattactagattgattactttctggatagataatctggtaataaatgataggtaaatcaaaaattacttttatttaggagtttgaattcttactctcatcagacattttttttctagggacgcttactaattaaatgatttaagttgtttcttaggggttttttgcctatatatttatgactgtgttaatgagtagtgaaatgatgcggaaagacagctatcaggaagaggaaatacagaagcctgaataatctatgggttagaaaagcatccctgaataatcaaaaattggcagtattggcattgttctcaagcctttttatgaaaatgaaatctgaaatcaccaaatgtaaacctgggaacattattctagtgttgctgtcttggattcatgttaagaagcgtcttcattctttgctcatgttgcccacttcttgtggatttgtctgagtgttttttgacaatcacttccttaaagactcttctgaactagttggacctggttaatcatagagagtagcctttaatcatggatagtcttcttggattatttttatatttgaaaagaaaatgttttatttgcactactgagtaggaagagttaattgttttctttgttctttttttgaagtcattacacaggacttcactccagagttaccattatgagtgtgttcagctctggtccacagaggatggataaaaatggtttgttatgtttttttgctctgcagtgctatgagccttatatctgttaatatgaaggacaaagtcaaaagcagcagtggatagcaggaagggtagagactaatatgtttgggaccaaaaccatctaagttagagatttccagatcacagaggggctgggcattctctggagcagtcattggttggtgctttattgtaatcattttgcgccaatccccaacaattaggaactggaccctgggaataagctgagggtgctgaactgttggggaagggtgactgtagccacatggaagataaaatatgggtttttctgcaaaatttccatctgagggtttttacatttaatatttttttaagacagtttaaagagcaaacgttttttaagtgtattctagttgcaaagtatgcacacatatcttgaatggctttatttttattgtgtaaaactgttgaacacatgactgtgatgcacaaattctttacgtgtaaggagtctatgcattttacagtaacttattttatgatcgggtgatgagacagttatactttcaactgccattatttttattaagtgctttcattttctttacagttattataaaattgtatttattttatacagatgggttttcattttcctgatgctgtaatgtttacttcagcttgttgacctttctttgtgttatctgcatgttgtaacgtgtgataagaatgaatgtaaaggctgtggcaactgtaattaatttttgtaaagggctggtcacacgtggatctggtttatgaatgcatttgggatgattttggtaaccagatcaccttttcagaaatttagatgtgaacaccaaaagaagcattttctcaacaaaaattaatagctggttctattttttttaaacctagaaaaaataaagttgatttttttcaattaaagtgcttttaattcttagcagtggggatggggcatgtgtgttttaccagagctatttgggcattaatatctgcaggcaagtacttaaagcacactgtggcagttggatgctgaaggcaaactgaaaaaccaaatgaaaaaacatcagacttccttctttggtttaaaaatatttccccctttctccccattctcccaatccagtggtgtgctggtaaatgtttagcagttcactcttctgggagaaaattatgtattcaactatacatgtttgttataaattttgctgatagcaagaacatataacacaattaacaaataataagatacaaatactttattgtaaatcccatatagccagttgattctcacagtatacttagttgctcaggaaagaactaaaatgcttttttaaaaggatacttaattgctttttgctcaactcctacagtcaacctatgattgattgtctttcaactgtgatttgaaaaatggcagactgtccaaatctaactcatttcccaataaatttattatcattcaatctgatacgtgatctactgttaaaactgtttcttaccatggtacatattagactcattaagccgaaaccacttttagctttaacattaattgtaaatttatatgattcaattttcataaccaatgcttaacaactgcaggcaaaattctaaaatgtgaccactgggtcttgggaatcagtaggggctgtatccagcacaccactgccccatcctttttttcttaactattagtgttgaataaacttctcatagttaatctacttgctgaactcaggaaattcctatcactgaccctggccagggctttaaagggtaggaaaagcattaatgtcagtcctacacagcgaacttttgatttagaagaatgtgacagaaagaaaacatttactgaaatacatgggaagcttgcatatttctaaagttgtctttatacttttcatttctcaaagctaagtaaactgtggtataggcatctctaagatgttagcatttaaaacatcaattgttttattgatgtttaaacaattgtttaaatcccactgaaaaatttaaatattaaaatatcttgcacagtctaccaaatgagttaaatcgttacagtcgtgtctacctcttatttttctatctgtatttaggctgctgttttggtgagattctaatttctttttcccctggaactactttctgtggaagacaaggaacagactggggacagaggcctgaaaacaaattggaagcactcagagatctattgctgaccagccctattcctcatgagttggcggggggaaagccattgtttttaatttccacttaatatgaaaatgcttgtttttaaaatgttttttcctgctgaacaaatgtatttttaaaaggaaaaaaattctcttttggctctaagaagtcagctgtatgagcaggcgtgaccatatcataacatgctgatatgatagaaatcaataaatttttacctctcagga

SEQ ID NO: 150342 - DNA, 2585 bp, Homo sapiens
  Payload ID: 9686
  Gene Symbol: LYPLA1
  Gene Name: lysophospholipase I
  Uniprot ID: O75608
  ENST ID: ENST00000316963
  CDS Start-End: 195-887
cggcgggcgaggggcagggcagggcggaccctggacgcgcgggcgcgcgcggaaggtagcgcggggccgcgttggcgcgcacgcgcctgagcgtgcgcccggtggggccggccgggactcgccgctcgcacgcccttgggccgcggccgggcgcccgctcttccttccgcttgcgctgtgagctgaggcggtgtatgtgcggcaataacatgtcaaccccgctgcccgccatcgtgcccgccgcccggaaggccaccgctgcggtgattttcctgcatggattgggagatactgggcacggatgggcagaagcctttgcaggtatcagaagttcacatatcaaatatatctgcccgcatgcgcctgttaggcctgttacattaaatatgaacgtggctatgccttcatggtttgatattattgggctttcaccagattcacaggaggatgaatctgggattaaacaggcagcagaaaatataaaagctttgattgatcaagaagtgaagaatggcattccttctaacagaattattttgggagggttttctcagggaggagctttatctttatatactgcccttaccacacagcagaaactggcaggtgtcactgcactcagttgctggcttccacttcgggcttcctttccacagggtcctatcggtggtgctaatagagatatttctattctccagtgccacggggattgtgaccctttggttcccctgatgtttggttctcttacggtggaaaaactaaaaacattggtgaatccagccaatgtgacctttaaaacctatgaaggtatgatgcacagttcgtgtcaacaggaaatgatggatgtcaagcaattcattgataaactcctacctccaattgattgacgtcactaagaggccttgtgtagaagtacaccagcatcattgtagtagagtgtaaaccttttcccatgcccagtcttcaaatttctaatgttttgcagtgttaaaatgttttgcaaatacatgccaataacacagatcaaataatatctcctcatgagaaatttatgatcttttaagtttctatacatgtattcttataagacgacccaggatctactatattagaatagatgaagcaggtagcttcttttttctcaaatgtaattcagcaaaataatacagtactgccaccagattttttattacatcatttgaaaattagcagtatgcttaatgaaaatttgttcaggtataaatgagcagttaagatataaacaatttatgcatgctgtgacttagtctatggatttattccaaaattgcttagtcaccatgcagtgtctgtatttttatatatgtgttcatatatacataatgattataatacataataagaatgaggtggtattacattattcctaataatagggataatgctgtttattgtcaagaaaaagtaaaatcgttctcttcaattaatggcccttttattttgggaccaggcttttattttccctgatattatttctatttaatactcttttctctcaagaaaaaaaaaaaagtttgttttttctttattgtccttcatagcaggccaagtattgcctctctgcaatagacagctactgtcaatacatgctgtaatttgacattctgggtcacagatataaggtatttaaaatctatttatgctttatagagaaaccagacattaaaacttcatgcactacttatttcgaattactgtaccttatccaaatttacacctagctattaggatcttcaacccaggtaacaggaataattctgtggtttcatttttctgtaaacaactgaaagaataattagatcatattctagtatgttctgaaatatctttaagactgatcttaaaaactaacttctaagatgatttcatcttctcatagtatagagtttactttgtacacgtttgaaaccaactactgtagaagatgaggaatctattgtaattttttgctttattttcatctgccagtggacttatttgaaattttcactttagtcaaattattttttgtattagtttttgatgcagacataaaaatagcaatcattttaaattgtcaaaatttccagattactggtaaaaattatttgaaaacaaacttatgggtaataaaggctagtcagaaccctataccataaagtgtagttaccatacagattaatatgtagcaaaaatgtatgcttgatatttctcaactgtgttaatttttctgctgtattccagctgaccaaaacaatattaagaatgcatctttataaatgggtgctaattgataatggaaataatttagtaatggactatacaggatgttaataatgaagccatatgtttatgtctggatttaaaaattttaaacaatcatttactatgtcatttttctttaccttgaagaacataaactgttatttcacttctacaaatcagcaagatattatttatggcaagaaatattccattgaaatattgtgctgtaacatgggaaagtgtaaatgtttttcatggtttctatcaatgtgaaataaaatttaattctgacttttctgtga

SEQ ID NO: 150343 - DNA, 1308 bp, Homo sapiens
  Payload ID: 9686
  Gene Symbol: LYPLA1
  Gene Name: lysophospholipase I
  Uniprot ID: O75608
  ENST ID: ENST00000343231
  CDS Start-End: 6-650
ggtgtatgtgcggcaataacatgtcaaccccgctgcccgccatcgtgcccgccgcccggaaggccaccgctgcggtgattttcctgcatggattgggagatactgggcacggatgggcagaagcctttgcaggtatcagaagttcacatatcaaatatatctgcccgcatgcgtttgatattattgggctttcaccagattcacaggaggatgaatctgggattaaacaggcagcagaaaatataaaagctttgattgatcaagaagtgaagaatggcattccttctaacagaattattttgggagggttttctcagggaggagctttatctttatatactgcccttaccacacagcagaaactggcaggtgtcactgcactcagttgctggcttccacttcgggcttcctttccacagggtcctatcggtggtgctaatagagatatttctattctccagtgccacggggattgtgaccctttggttcccctgatgtttggttctcttacggtggaaaaactaaaaacattggtgaatccagccaatgtgacctttaaaacctatgaaggtatgatgcacagttcgtgtcaacaggaaatgatggatgtcaagcaattcattgataaactcctacctccaattgattgacgtcactaagaggccttgtgtagaagtacaccagcatcattgtagtagagtgtaaaccttttcccatgcccagtcttcaaatttctaatgttttgcagtgttaaaatgttttgcaaatacatgccaataacacagatcaaataatatctcctcatgagaaatttatgatcttttaagtttctatacatgtattcttataagacgacccaggatctactatattagaatagatgaagcaggtagcttcttttttctcaaatgtaattcagcaaaataatacagtactgccaccagattttttattacatcatttgaaaattagcagtatgcttaatgaaaatttgttcaggtataaatgagcagttaagatataaacaatttatgcatgctgtgacttagtctatggatttattccaaaattgcttagtcaccatgcagtgtctgtatttttatatatgtgttcatatatacataatgattataatacataataagaatgaggtggtattacattattcctaataatagggataatgctgtttattgtcaagaaaaagtaaaatcgttctcttcaattaatggcccttttattttgggaccaggcttttattttccctgatattatttctatttaatactcttttctctcaagaaaaaa

SEQ ID NO: 150344 - DNA, 250 bp, Homo sapiens
  Payload ID: 9686
  Gene Symbol: LYPLA1
  Gene Name: lysophospholipase I
  ENST ID: ENST00000522007
  CDS Start-End: 33-209
ccttccgcttgcgctgtgagctgaggcggtgtatgtgcggcaataacatgtcaaccccgctgcccgccatcgtgcccgccgcccggaaggccaccgctgcggtgattttcctgcatggattgggagatactggggtcctatcggtggtgctaatagagatatttctattctccagtgccacggggattgtgaccctttggttcccctgatgtttggttctcttacggtggaaaaactaaaaacattggtg

SEQ ID NO: 150345 - DNA, 580 bp, Homo sapiens
  Payload ID: 9686
  Gene Symbol: LYPLA1
  Gene Name: lysophospholipase I
  ENST ID: ENST00000521352
  CDS Start-End: 310-580
gcattgcggaggaagtgtggccccgggacccccgcgggccggcctagggcacggcgtcagcctctgcagcgtgtttctgcctggtgtgtgggtgagggaaacctaagtccgccaggaaatcgccttattgtcacctcgcactcttatcctcaatgaaagaagtttgaagattgagtgtcctacaaggtgattttcctgcatggattgggagatactgggcacggatgggcagaagcctttgcaggtatcagaagttcacatatcaaatatatctgcccgcatgcgcctgttaggcctgttacattaaatatgaacgtggctatgccttcatggtttgatattattgggctttcaccagattcacaggaggatgaatctgggattaaacaggcagcagaaaatataaaagctttgattgatcaagaagtgaagaatggcattccttctaacagaattattttgggagggttttctcagggaggagctttatctttatatactgcccttaccacacagcagaaactggcaggtgtcactgcactcagttgctggcttccacttcgggcttcctttccacagg

SEQ ID NO: 150346 - DNA, 746 bp, Homo sapiens
  Payload ID: 9686
  Gene Symbol: LYPLA1
  Gene Name: lysophospholipase I
  ENST ID: ENST00000518546
  CDS Start-End: 155-746
gggcgcgcgcggaaggtagcgcggggccgcgttggcgcgcacgcgcctgagcgtgcgcccggtggggccggccgggactcgccgctcgcacgcccttgggccgcggccgggcgcccgctcttccttccgcttgcgctgtgagctgaggcggtgtatgtgcggcaataacatgtcaaccccgctgcccgccatcgtgcccgccgcccggaaggccaccgctgcggtgattttcctgcatggattgggagatactgggcacggatgggcagaagcctttgcaggtatcagaagttcacatatcaaatatatctgcccgcatgcgtttgatattattgggctttcaccagattcacaggaggatgaatctgggattaaacaggcagcagaaaatataaaagctttgattgatcaagaagtgaagaatggcattccttctaacagaattattttgggagggttttctcagggaggagctttatctttatatactgcccttaccacacagcagaaactggcaggtgtcactgcactcagttgctggcttccacttcgggcttcctttccacagggtcctatcggtggtgctaatagagatatttctattctccagtgccacggggattgtgaccctttggttcccctgatgtttggttctcttacggtggaaaaactaaaaacattggtgaatccagccaatgtgacctttaaaacctatgaaggtatgatgcacagttcgtgtcaacagg

SEQ ID NO: 150347 - DNA, 344 bp, Homo sapiens
  Payload ID: 9686
  Gene Symbol: LYPLA1
  Gene Name: lysophospholipase I
  ENST ID: ENST00000521898
  CDS Start-End: 36-344
cttccttccgcttgcgctgtgagctgaggcggtgtatgtgcggcaataacatgtcaaccccgctgcccgccatcgtgcccgccgcccggaaggccaccgctgcggtgattttcctgcatggattgggagatactgggcctgttaggcctgttacattaaatatgaacgtggctatgccttcatggtttgatattattgggctttcaccagattcacaggaggatgaatctgggattaaacaggcagcagaaaatataaaagctttgattgatcaagaagtgaagaatggcattccttctaacagaattattttgggagggttttctcagggaggagctttatct

SEQ ID NO: 150348 - DNA, 2482 bp, Homo sapiens
  Payload ID: 9686
  Gene Symbol: LYPLA1
  Gene Name: lysophospholipase I
  ENST ID: ENST00000618914
  CDS Start-End: 195-785
cggcgggcgaggggcagggcagggcggaccctggacgcgcgggcgcgcgcggaaggtagcgcggggccgcgttggcgcgcacgcgcctgagcgtgcgcccggtggggccggccgggactcgccgctcgcacgcccttgggccgcggccgggcgcccgctcttccttccgcttgcgctgtgagctgaggcggtgtatgtgcggcaataacatgtcaaccccgctgcccgccatcgtgcccgccgcccggaaggccaccgctgcggtgattttcctgcatggattgggagatactgggcacggatgggcagaagcctttgcaggtatcagaagttcacatatcaaatatatctgcccgcatgcgcctgttaggcctgttacattaaatatgaacgtggctatgccttcatggtttgatattattgggctttcaccagattcacaggaggatgaatctgggattaaacaggcagcagaaaatataaaagctttgattgatcaagaagtgaagaatggcattccttctaacagaattattttgggagggttttctcagggtcctatcggtggtgctaatagagatatttctattctccagtgccacggggattgtgaccctttggttcccctgatgtttggttctcttacggtggaaaaactaaaaacattggtgaatccagccaatgtgacctttaaaacctatgaaggtatgatgcacagttcgtgtcaacaggaaatgatggatgtcaagcaattcattgataaactcctacctccaattgattgacgtcactaagaggccttgtgtagaagtacaccagcatcattgtagtagagtgtaaaccttttcccatgcccagtcttcaaatttctaatgttttgcagtgttaaaatgttttgcaaatacatgccaataacacagatcaaataatatctcctcatgagaaatttatgatcttttaagtttctatacatgtattcttataagacgacccaggatctactatattagaatagatgaagcaggtagcttcttttttctcaaatgtaattcagcaaaataatacagtactgccaccagattttttattacatcatttgaaaattagcagtatgcttaatgaaaatttgttcaggtataaatgagcagttaagatataaacaatttatgcatgctgtgacttagtctatggatttattccaaaattgcttagtcaccatgcagtgtctgtatttttatatatgtgttcatatatacataatgattataatacataataagaatgaggtggtattacattattcctaataatagggataatgctgtttattgtcaagaaaaagtaaaatcgttctcttcaattaatggcccttttattttgggaccaggcttttattttccctgatattatttctatttaatactcttttctctcaagaaaaaaaaaaaagtttgttttttctttattgtccttcatagcaggccaagtattgcctctctgcaatagacagctactgtcaatacatgctgtaatttgacattctgggtcacagatataaggtatttaaaatctatttatgctttatagagaaaccagacattaaaacttcatgcactacttatttcgaattactgtaccttatccaaatttacacctagctattaggatcttcaacccaggtaacaggaataattctgtggtttcatttttctgtaaacaactgaaagaataattagatcatattctagtatgttctgaaatatctttaagactgatcttaaaaactaacttctaagatgatttcatcttctcatagtatagagtttactttgtacacgtttgaaaccaactactgtagaagatgaggaatctattgtaattttttgctttattttcatctgccagtggacttatttgaaattttcactttagtcaaattattttttgtattagtttttgatgcagacataaaaatagcaatcattttaaattgtcaaaatttccagattactggtaaaaattatttgaaaacaaacttatgggtaataaaggctagtcagaaccctataccataaagtgtagttaccatacagattaatatgtagcaaaaatgtatgcttgatatttctcaactgtgttaatttttctgctgtattccagctgaccaaaacaatattaagaatgcatctttataaatgggtgctaattgataatggaaataatttagtaatggactatacaggatgttaataatgaagccatatgtttatgtctggatttaaaaattttaaacaatcatttactatgtcatttttctttaccttgaagaacataaactgttatttcacttctacaaatcagcaagatattatttatggcaagaaatattccattgaaatattgtgctgtaacatgggaaagtgtaaatgtttttcatggtttctatcaatgtgaaataaaatttaattctgacttttctgtg

SEQ ID NO: 150349 - DNA, 2526 bp, Homo sapiens
  Payload ID: 9686
  Gene Symbol: LYPLA1
  Gene Name: lysophospholipase I
  ENST ID: ENST00000618741
  CDS Start-End: 329-829
cagtccccagctcctccctgcattgcggaggaagtgtggccccgggacccccgcgggccggcctagggcacggcgtcagcctctgcagcgtgtttctgcctggtgtgtgggtgagggaaacctaagtccgccaggaaatcgccttattgtcacctcgcactcttatcctcaatgaaagaagtttgaagattgagtgtcctacaaggtgattttcctgcatggattgggagatactgggcacggatgggcagaagcctttgcaggtatcagaagttcacatatcaaatatatctgcccgcatgcgcctgttaggcctgttacattaaatatgaacgtggctatgccttcatggtttgatattattgggctttcaccagattcacaggaggatgaatctgggattaaacaggcagcagaaaatataaaagctttgattgatcaagaagtgaagaatggcattccttctaacagaattattttgggagggttttctcagggaggagctttatctttatatactgcccttaccacacagcagaaactggcaggtgtcactgcactcagttgctggcttccacttcgggcttcctttccacagggtcctatcggtggtgctaatagagatatttctattctccagtgccacggggattgtgaccctttggttcccctgatgtttggttctcttacggtggaaaaactaaaaacattggtgaatccagccaatgtgacctttaaaacctatgaaggtatgatgcacagttcgtgtcaacaggaaatgatggatgtcaagcaattcattgataaactcctacctccaattgattgacgtcactaagaggccttgtgtagaagtacaccagcatcattgtagtagagtgtaaaccttttcccatgcccagtcttcaaatttctaatgttttgcagtgttaaaatgttttgcaaatacatgccaataacacagatcaaataatatctcctcatgagaaatttatgatcttttaagtttctatacatgtattcttataagacgacccaggatctactatattagaatagatgaagcaggtagcttcttttttctcaaatgtaattcagcaaaataatacagtactgccaccagattttttattacatcatttgaaaattagcagtatgcttaatgaaaatttgttcaggtataaatgagcagttaagatataaacaatttatgcatgctgtgacttagtctatggatttattccaaaattgcttagtcaccatgcagtgtctgtatttttatatatgtgttcatatatacataatgattataatacataataagaatgaggtggtattacattattcctaataatagggataatgctgtttattgtcaagaaaaagtaaaatcgttctcttcaattaatggcccttttattttgggaccaggcttttattttccctgatattatttctatttaatactcttttctctcaagaaaaaaaaaaaagtttgttttttctttattgtccttcatagcaggccaagtattgcctctctgcaatagacagctactgtcaatacatgctgtaatttgacattctgggtcacagatataaggtatttaaaatctatttatgctttatagagaaaccagacattaaaacttcatgcactacttatttcgaattactgtaccttatccaaatttacacctagctattaggatcttcaacccaggtaacaggaataattctgtggtttcatttttctgtaaacaactgaaagaataattagatcatattctagtatgttctgaaatatctttaagactgatcttaaaaactaacttctaagatgatttcatcttctcatagtatagagtttactttgtacacgtttgaaaccaactactgtagaagatgaggaatctattgtaattttttgctttattttcatctgccagtggacttatttgaaattttcactttagtcaaattattttttgtattagtttttgatgcagacataaaaatagcaatcattttaaattgtcaaaatttccagattactggtaaaaattatttgaaaacaaacttatgggtaataaaggctagtcagaaccctataccataaagtgtagttaccatacagattaatatgtagcaaaaatgtatgcttgatatttctcaactgtgttaatttttctgctgtattccagctgaccaaaacaatattaagaatgcatctttataaatgggtgctaattgataatggaaataatttagtaatggactatacaggatgttaataatgaagccatatgtttatgtctggatttaaaaattttaaacaatcatttactatgtcatttttctttaccttgaagaacataaactgttatttcacttctacaaatcagcaagatattatttatggcaagaaatattccattgaaatattgtgctgtaacatgggaaagtgtaaatgtttttcatggtttctatcaatgtgaaataaaatttaattctgacttttctgtg

SEQ ID NO: 150350 - DNA, 1117 bp, Homo sapiens
  Payload ID: 9687
  Gene Symbol: LYPLA2
  Gene Name: lysophospholipase II
  ENST ID: ENST00000374501
  CDS Start-End: 78-572
ggcctcctcattcctcctgagcatgatgggccctctggctctctttccccaggcctaggatccctgtgaccctcaacatgaagatggtgatgccctcctggtttgacctgatggggctgagtccagatgccccagaggacgaggctggcatcaagaaggcagcagagaacatcaaggccttgattgagcatgaaatgaagaacgggatccctgccaatcgaatcgtcctgggaggcttttcacagggcggggccctgtccctctacacggccctcacctgcccccaccctctggctggcatcgtggcgttgagctgctggctgcctctgcaccgggccttcccccaggcagctaatggcagtgccaaggacctggccatactccagtgccatggggagctggaccccatggtgcccgtacggtttggggccctgacggctgagaagctccggtctgttgtcacacctgccagggtccagttcaagacatacccgggtgtcatgcacagctcctgtcctcaggagatggcagctgtgaaggaatttcttgagaagctgctgcctcctgtctaactagtcgctggccccagtgcagtaccccagctcatgggggactcagcaagcaagcgtggcaccatcttggatctgagccggtcgagcccctgtccccacccttcctgacctgtccttttcccacaggcctctgggggcaggtggcaaggcctggccgggccttccttcctggccttagccacctggctctgtctgcagcaggggcaggctgctttcttatccatttccctggaggcgggcccccctggcagcagtattggaggggctacaggcagctggagaaaggggcccagccgctgacccactcactcaggacctcactcactagccccgctttgggccccctcctgtgacctcagggtttggcccatggggcccccccaggcccctgccccaactgattctgcccagataatcgtgtctcctgcctccactcagctgcttctcagtcatgaatgtggccatggccccggggtccccttgctgctgtgggctccctgtccctgggcaggagtgctggtgaggaggtggagccttttgagggg

SEQ ID NO: 150351 - DNA, 1072 bp, Homo sapiens
  Payload ID: 9687
  Gene Symbol: LYPLA2
  Gene Name: lysophospholipase II
  ENST ID: ENST00000374502
  CDS Start-End: 57-599
aagcggcctcggaagtcccagggagtggaggcccccgccgtggagccgtgtggtgtatgtgtggtaacaccatgtctgtgcccctgctcaccgatgctgccaccgtgtctggagctgagcgggaaacggccgcggttatttttttacatggacttggagacacagggcacagctgggctgacgccctctccaccatccggctccctcacgtcaagtacatctgtccccatgcgcctaggatccctgtgaccctcaacatgaagatggtgatgccctcctggtttgacctgatggggctgagtccagatgccccagaggacgaggctggcatcaagaaggcagcagagaacatcaaggccttgattgagcatgaaatgaagaacgggatccctgccaatcgaatcgtcctgggaggcttttcacagggcggggccctgtccctctacacggccctcacctgcccccaccctctggctggcatcgtggcgttgagctgctggctgcctctgcaccgggccttcccccaggtgaatgtccccactgacccccccgccctttgtgtctgcatcctcgtggcttggggactgctgcagcactagctttgccctgagtcctgtccggcctccaggcagctaatggcagtgccaaggacctggccatactccagtgccatggggagctggaccccatggtgcccgtacggtttggggccctgacggctgagaagctccggtctgttgtcacacctgccagggtccagttcaagacatacccgggtgtcatgcacagctcctgtcctcaggtcagtggggggaccatttcccactcccacttctctgcctccagccaggtgcctctcgtgatcccctcttaatcccctcaggagatggcagctgtgaaggaatttcttgagaagctgctgcctcctgtctaactagtcgctggccccagtgcagtaccccagctcatgggggactcagcaagcaagcgtggcaccatcttggatctgagccggtcgagcccctgtccccacccttcctgacctgtccttttcccacaggcctctgggggc

SEQ ID NO: 150352 - DNA, 868 bp, Homo sapiens
  Payload ID: 9687
  Gene Symbol: LYPLA2
  Gene Name: lysophospholipase II
  ENST ID: ENST00000374503
  CDS Start-End: 75-623
gaaagaggagaatcgcccaagcggcctcggaagtcccagggagtggaggcccccgccgtggagccgtgtggtgtatgtgtggtaacaccatgtctgtgcccctgctcaccgatgctgccaccgtgtctggagctgagcgggaaacggccgcggttatttttttacatggacttggagacacagggcacagctgggctgacgccctctccaccatccggctccctcacgtcaagtacatctgtccccatgcgcctaggatccctgtgaccctcaacatgaagatggtgatgccctcctggtttgacctgatggggctgagtccagatgccccagaggacgaggctggcatcaagaaggcagcagagaacatcaaggccttgattgagcatgaaatgaagaacgggatccctgccaatcgaatcgtcctgggaggcttttcacagggcggggccctgtccctctacacggccctcacctgcccccaccctctggctggcatcgtggcgttgagctgctggctgcctctgcaccgggccttcccccagggtccagttcaagacatacccgggtgtcatgcacagctcctgtcctcaggagatggcagctgtgaaggaatttcttgagaagctgctgcctcctgtctaactagtcgctggccccagtgcagtaccccagctcatgggggactcagcaagcaagcgtggcaccatcttggatctgagccggtcgagcccctgtccccacccttcctgacctgtccttttcccacaggcctctgggggcaggtggcaaggcctggccgggccttccttcctggccttagccacctggctctgtctgcagcaggggcaggctgctttcttatcca

SEQ ID NO: 150353 - DNA, 907 bp, Homo sapiens
  Payload ID: 9687
  Gene Symbol: LYPLA2
  Gene Name: lysophospholipase II
  ENST ID: ENST00000374505
  CDS Start-End: 91-504
gagtgtgtctgcgggagaaagaggagaatcgcccaagcggcctcggaagtcccagggagtggaggcccccgccgtggagccgtgtggtgtatgtgtggtaacaccatgtctgtgcccctgctcaccgatgctgccaccgtgtctggagctgagcgggaaacggccgcggttatttttttacatggacttggagacacagggcacagctgggctgacgccctctccaccatccggctccctcacgtcaagtacatctgtccccatgcgcctaggatccctgtgaccctcaacatgaagatggtgatgccctcctggtttgacctgatggggctgagtccagatgccccagaggacgaggctggcatcaagaaggcagcagagaacaggcggggccctgtccctctacacggccctcacctgcccccaccctctggctggcatcgtggcgttgagctgctggctgcctctgcaccgggccttcccccaggtgaatgtccccactgacccccccgccctttgtgtctgcatcctcgtggcttggggactgctgcagcactagctttgccctgagtcctgtccggcctccaggcagctaatggcagtgccaaggacctggccatactccagtgccatggggagctggaccccatggtgcccgtacggtttggggccctgacggctgagaagctccggtctgttgtcacacctgccagggtccagttcaagacatacccgggtgtcatgcacagctcctgtcctcaggtcagtggggggaccatttcccactcccacttctctgcctccagccaggtgcctctcgtgatcccctcttaatcccctcaggagatggcagctgtgaaggaatttcttgagaagctgctgcctcctgtctaactagtcgctggcc

SEQ ID NO: 150354 - DNA, 1810 bp, Homo sapiens
  Payload ID: 9687
  Gene Symbol: LYPLA2
  Gene Name: lysophospholipase II
  Uniprot ID: O95372
  ENST ID: ENST00000374514
  CDS Start-End: 308-1003
gtctcgaatctacaaggtgggagcgggtgagaacccagcgactgcgcggctgaatgacagggagtagccccgccgcctccaacatggcagcttctatccagcgaagccgggtccccgcttccgggttccgtactgtcggccaggctacttccggcagcgcgatggctgggttcccgggactcgaacggaagttccggcgggggcggccgagggggaagagtgtgtctgcgggagaaagaggagaatcgcccaagcggcctcggaagtcccagggagtggaggcccccgccgtggagccgtgtggtgtatgtgtggtaacaccatgtctgtgcccctgctcaccgatgctgccaccgtgtctggagctgagcgggaaacggccgcggttatttttttacatggacttggagacacagggcacagctgggctgacgccctctccaccatccggctccctcacgtcaagtacatctgtccccatgcgcctaggatccctgtgaccctcaacatgaagatggtgatgccctcctggtttgacctgatggggctgagtccagatgccccagaggacgaggctggcatcaagaaggcagcagagaacatcaaggccttgattgagcatgaaatgaagaacgggatccctgccaatcgaatcgtcctgggaggcttttcacagggcggggccctgtccctctacacggccctcacctgcccccaccctctggctggcatcgtggcgttgagctgctggctgcctctgcaccgggccttcccccaggcagctaatggcagtgccaaggacctggccatactccagtgccatggggagctggaccccatggtgcccgtacggtttggggccctgacggctgagaagctccggtctgttgtcacacctgccagggtccagttcaagacatacccgggtgtcatgcacagctcctgtcctcaggagatggcagctgtgaaggaatttcttgagaagctgctgcctcctgtctaactagtcgctggccccagtgcagtaccccagctcatgggggactcagcaagcaagcgtggcaccatcttggatctgagccggtcgagcccctgtccccacccttcctgacctgtccttttcccacaggcctctgggggcaggtggcaaggcctggccgggccttccttcctggccttagccacctggctctgtctgcagcaggggcaggctgctttcttatccatttccctggaggcgggcccccctggcagcagtattggaggggctacaggcagctggagaaaggggcccagccgctgacccactcactcaggacctcactcactagccccgctttgggccccctcctgtgacctcagggtttggcccatggggcccccccaggcccctgccccaactgattctgcccagataatcgtgtctcctgcctccactcagctgcttctcagtcatgaatgtggccatggccccggggtccccttgctgctgtgggctccctgtccctgggcaggagtgctggtgaggaggtggagccttttgaggggggccttccctcagctgtttccccacactggggggctgggccctgcctccccgttaccctccttccctgcaggcctggagcctgtagggctggactgaggttcaggtctccccccagctgtctcacccccactttgtccccactctagagcagggaggcagtgggggaggagttgtgtctcgtcttctgtctccatgtggtttttgggtgtttttcttgttgtgtcctggattccgataaaattaaagaaattgcttcctcaa

SEQ ID NO: 150355 - DNA, 429 bp, Homo sapiens
  Payload ID: 9687
  Gene Symbol: LYPLA2
  Gene Name: lysophospholipase II
  ENST ID: ENST00000421070
  CDS Start-End: 158-429
tttgcagtcagtggcagcagcagcaggacagaacctgggtgctgtgtggggctgatggcctggtggcctcttgggccaggagtgtgtcctgtgcctggttttgctcttgaccgccgccccgatgtatgcaggcccccgccgtggagccgtgtggtgtatgtgtggtaacaccatgtctgtgcccctgctcaccgatgctgccaccgtgtctggagctgagcgggaaacggccgcggttatttttttacatggacttggagacacagggcacagctgggctgacgccctctccaccatccggctccctcacgtcaagtacatctgtccccatgcgcctaggatccctgtgaccctcaacatgaagatggtgatgccctcctggtttgacctgatggggctgagtccagatgccccagaggacgaggctgg

SEQ ID NO: 150356 - DNA, 614 bp, Homo sapiens
  Payload ID: 9687
  Gene Symbol: LYPLA2
  Gene Name: lysophospholipase II
  ENST ID: ENST00000420982
  CDS Start-End: 128-614
gagtgtgtctgcgggagaaagaggagaatcgcccaagcggcctcggaagtcccagggagtggaggcccccgccgtggagccgtgtggtgtatgtgtggtaacaccatgtctgtgcccctgctcaccgatgctgccaccgtgtctggagctgagcgggaaacggccgcggcacagctgggctgacgccctctccaccatccggctccctcacgtcaagtacatctgtccccatgcgcctaggatccctgtgaccctcaacatgaagatggtgatgccctcctggtttgacctgatggggctgagtccagatgccccagaggacgaggctggcatcaagaaggcagcagagaacatcaaggccttgattgagcatgaaatgaagaacgggatccctgccaatcgaatcgtcctgggaggcttttcacagggcggggccctgtccctctacacggccctcacctgcccccaccctctggctggcatcgtggcgttgagctgctggctgcctctgcaccgggccttcccccaggcagctaatggcagtgccaaggacctggccatactccagtgccatggggagctggaccccatggtgcccgtacggtttggggccc

SEQ ID NO: 150357 - DNA, 1819 bp, Homo sapiens
  Payload ID: 9688
  Gene Symbol: LYPLAL1
  Gene Name: lysophospholipase-like 1
  Uniprot ID: Q5VWZ2
  ENST ID: ENST00000366927
  CDS Start-End: 17-682
ggcagtggcatcagcgatggcggctgcgtcggggtcggttctgcagcgctgtatcgtgtcgccggcagggaggcatagcgcctctctgatcttcctgcatggctcaggtgattctggacaaggattaagaatgtggatcaagcaggttttaaatcaagatttaacattccaacacataaaaattatttatccaacagctcctcccagatttaaaataaccaatgactgcccagaacaccttgaatcaattgatgtcatgtgtcaagtgcttactgatttgattgatgaagaagtaaaaagtggcatcaagaagaacaggatattaataggaggattctctatgggaggatgcatggcaatacatttagcatatagaaatcatcaagatgtggcaggagtatttgctctttctagttttctgaataaagcatctgctgtttaccaggctcttcagaagagtaatggtgtacttcctgaattatttcagtgtcatggtactgcagatgagttagttcttcattcttgggcagaagagacaaactcaatgttaaaatctctaggagtgaccacgaagtttcatagttttccaaatgtttaccatgagctaagcaaaactgagttagacatattgaagttatggattcttacaaagctgccaggagaaatggaaaaacaaaaatgaatgaatcaagagtgatttgttaatgtaagtgtaatgtctttgtgaaaagtgatttttactgccaaattataatgataattaaaatattaagaaataacactttcctgacttttttattattaaaatgcttatcactgtagacagtagctaatcttattaatgaaaaacaatagacaaacatctgtgcataatttttcagacacaattctgtaaatatttggaaaccttttaagtatttaaacttttaaatttttgaaataaagtattctaaactaatataaataaggacaatgaaaaaacatgaaaggacttagcataatgttattttatcttttctacaactttgtttaaattacctttccaaagatatttgtgtttatgtaattttccacggaataacattaatactctaggtttataaaccggtttcacattatttcatttgatcatcacaagagctttgtgaagtaagccgagaagttgttactggtatttaataatagcaatagaggagttaaagactttcccacagcttgcaggtcaagacaagaaattcaggtctcctaattctcagtggagctctatttctgttaacccaaattgctgctctgttttaggtctcaatttcatctgtaaaatgatactaatagtacttatcccattggatttttgttgagatttaaataaatagccaaaagccaatacataataaacactcaataaagattaaccataaggagagtcatgatctggttccaggaatacattgttagatgactgaaaaattgtattacttcaatgaaaatactataaataataacattttcatatattagttggttctcatgcatacataatctaattttatttgatcctcacaactgtttaagttttattaaatatacattatccctatttgtataaatagaatcatacaatacctgcctgctttcattcaacaaaattatcatgagatttttccatgttgtgtacatcaatagttcatctattttattgctcagtaatattccattgtgtggatgtatcactatttgtttacacattcaccactgatatataagttgcttccagtgtgaggctgttttaaataaagctgctatgaatattcatgtaaga

SEQ ID NO: 150358 - DNA, 1898 bp, Homo sapiens
  Payload ID: 9688
  Gene Symbol: LYPLAL1
  Gene Name: lysophospholipase-like 1
  Uniprot ID: Q5VWZ2
  ENST ID: ENST00000366928
  CDS Start-End: 48-761
cgcggcaacgcaggggcggaaccgcatgactggcagtggcatcagcgatggcggctgcgtcggggtcggttctgcagcgctgtatcgtgtcgccggcagggaggcatagcgcctctctgatcttcctgcatggctcaggtgattctggacaaggattaagaatgtggatcaagcaggttttaaatcaagatttaacattccaacacataaaaattatttatccaacagctcctcccagatcatatactcctatgaaaggaggaatctccaatgtatggtttgacagatttaaaataaccaatgactgcccagaacaccttgaatcaattgatgtcatgtgtcaagtgcttactgatttgattgatgaagaagtaaaaagtggcatcaagaagaacaggatattaataggaggattctctatgggaggatgcatggcaatacatttagcatatagaaatcatcaagatgtggcaggagtatttgctctttctagttttctgaataaagcatctgctgtttaccaggctcttcagaagagtaatggtgtacttcctgaattatttcagtgtcatggtactgcagatgagttagttcttcattcttgggcagaagagacaaactcaatgttaaaatctctaggagtgaccacgaagtttcatagttttccaaatgtttaccatgagctaagcaaaactgagttagacatattgaagttatggattcttacaaagctgccaggagaaatggaaaaacaaaaatgaatgaatcaagagtgatttgttaatgtaagtgtaatgtctttgtgaaaagtgatttttactgccaaattataatgataattaaaatattaagaaataacactttcctgacttttttattattaaaatgcttatcactgtagacagtagctaatcttattaatgaaaaacaatagacaaacatctgtgcataatttttcagacacaattctgtaaatatttggaaaccttttaagtatttaaacttttaaatttttgaaataaagtattctaaactaatataaataaggacaatgaaaaaacatgaaaggacttagcataatgttattttatcttttctacaactttgtttaaattacctttccaaagatatttgtgtttatgtaattttccacggaataacattaatactctaggtttataaaccggtttcacattatttcatttgatcatcacaagagctttgtgaagtaagccgagaagttgttactggtatttaataatagcaatagaggagttaaagactttcccacagcttgcaggtcaagacaagaaattcaggtctcctaattctcagtggagctctatttctgttaacccaaattgctgctctgttttaggtctcaatttcatctgtaaaatgatactaatagtacttatcccattggatttttgttgagatttaaataaatagccaaaagccaatacataataaacactcaataaagattaaccataaggagagtcatgatctggttccaggaatacattgttagatgactgaaaaattgtattacttcaatgaaaatactataaataataacattttcatatattagttggttctcatgcatacataatctaattttatttgatcctcacaactgtttaagttttattaaatatacattatccctatttgtataaatagaatcatacaatacctgcctgctttcattcaacaaaattatcatgagatttttccatgttgtgtacatcaatagttcatctattttattgctcagtaatattccattgtgtggatgtatcactatttgtttacacattcaccactgatatataagttgcttccagtgtgaggctgttttaaataaagctgctatgaatattcatgtaaga

SEQ ID NO: 150359 - DNA, 1765 bp, Homo sapiens
  Payload ID: 9689
  Gene Symbol: LAPTM4A
  Gene Name: lysosomal protein transmembrane 4 alpha
  Uniprot ID: Q15012
  ENST ID: ENST00000175091
  CDS Start-End: 509-1210
atccagtacgtggcacacattgctcagaaaagccccttgtgcccgctttctgccatccgcgctgtctcgtgtctccctttttccattaaatgcctcttttcttgcgggtctcatctcgggaatagtgcactacggggacatacctatccccaactatcctaggcccgagaaccagcccttgccttcgcgtaacaggcggagactcgctgaggcgagttgcacttctaattgggcgtgaggtcttgtcaatccccaagttcttccaatcagaagtccggtccatccagccttccgctccccattggcctgtgtggaggaagaggggtgggtaagccgaagtcgctgcgctcagtgcgcaggcgcgaagaagctggcaggggcacgagccgggggcgggtttgaagacgcgtcgttgggttttggaggccgtgaaacagccgtttgagtttggctgcgggtggagaacgtttgtcaggggcccggccaagaaggaggcccgcctgttacgatggtgtccatgagtttcaagcggaaccgcagtgaccggttctacagcacccggtgctgcggctgttgccatgtccgcaccgggacgatcatcctggggacctggtacatggtagtaaacctattgatggcaattttgctgactgtggaagtgactcatccaaactccatgccagctgtcaacattcagtatgaagtcatcggtaattactattcgtctgagagaatggctgataatgcctgtgttctttttgccgtctctgttcttatgtttataatcagttcaatgctggtttatggagcaatttcttatcaagtgggttggctgattccattcttctgttaccgactttttgacttcgtcctcagttgcctggttgctattagttctctcacctatttgccaagaatcaaagaatatctggatcaactacctgattttccctacaaagatgacctcctggccttggactccagctgcctcctgttcattgttcttgtgttctttgccttattcatcatttttaaggcttatctaattaactgtgtttggaactgctataaatacatcaacaaccgaaacgtgccggagattgctgtgtaccctgcctttgaagcacctcctcagtacgttttgccaacctatgaaatggccgtgaaaatgcctgaaaaagaaccaccacctccttacttacctgcctgaagaaattctgcctttgacaataaatcctataccagctttttgtttgtttatgttacagaatgctgcaattcagggctcttcaaacttgtttgatataaaatatgttgtcttttgtttaagcatttattttcaaacactaaggagctttttgacatctgttaaacgtctttttgtttttttgttaagtcttttacattttaatagtttttgaagacaatctaggttaagcaagagcaaagtgccattgtttgcctttaattggggggtgggaagggaaagagggtacttgccacatagtttcctttttaactgcactttctttatataatcgtttgcattttgttacttgctaccctgagtactttcaggaagactgacttaaatattcggggtgagtaagtagttgggtataagatctgaacttttcatctgcagaggcaagaaaaatatttgacattgtgacttgactgtggaagatgatggttgcatgtttctagtttgtatatgtttccatctttgtgataagatgatttaataaatctctttaaatactta

SEQ ID NO: 150360 - DNA, 3173 bp, Homo sapiens
  Payload ID: 9690
  Gene Symbol: LAPTM4B
  Gene Name: lysosomal protein transmembrane 4 beta
  Uniprot ID: Q86VI4
  ENST ID: ENST00000445593
  CDS Start-End: 681-1634
atcctattttctgggaaaagattactaccacagtaattgagctgtgaagcggagacaaattgctctcggtggtggttcaaagtactgcaattgactggaatagcaccgcgcagttttccttcctctcgtgcaagataagagtgataggagctgtatcgattacctgcaagatagaagtagaagcgggccgggtgcggtggctcacgcctgtaatcccagcactttgggaggctgaggcgggtggatcattcgacgtcaggagttccagaccagcctgaccaacatggtgaaaccccgtctctactaaaaatacaacaaattagccgggtgtggtggcaagcgcctgtaatcccagctactcggttggttgggcaggagaatcgcttgaacccgggaggcggaggttgcagtgagccgagatcgcgccattgcactccagcctgggcgacaagagcgagactctgtctcaaaaaaaaaaaaaaaagaagtagaagggaagaaaatcgcaaggaactagactaaaagaatctcgacccttgaatggagttacacgaacggccagatgaaagaaggaaggcccggacctccactcagggccgactaggggactggcggagggtgcacgctgatggatttactcaccgggtgcttggagctccagcagctggctggagcccgcgatgacgtcacggactcgggtcacatggccaagtccgccccgccccctccccgtccccgccgctgcagcggtcgccttcggagcgaagggtaccgacccggcagaagctcggagctctcggggtatcgaggaggcaggcccgcgggcgcacgggcgagcgggccgggagccggagcggcggaggagccggcagcagcggcgcggcgggctccaggcgaggcggtcgacgctcctgaaaacttgcgcgcgcgctcgcgccactgcgcccggagcgatgaagatggtcgcgccctggacgcggttctactccaacagctgctgcttgtgctgccatgtccgcaccggcaccatcctgctcggcgtctggtatctgatcatcaatgctgtggtactgttgattttattgagtgccctggctgatccggatcagtataacttttcaagttctgaactgggaggtgactttgagttcatggatgatgccaacatgtgcattgccattgcgatttctcttctcatgatcctgatatgtgctatggctacttacggagcgtacaagcaacgcgcagcctggatcatcccattcttctgttaccagatctttgactttgccctgaacatgttggttgcaatcactgtgcttatttatccaaactccattcaggaatacatacggcaactgcctcctaattttccctacagagatgatgtcatgtcagtgaatcctacctgtttggtccttattattcttctgtttattagcattatcttgacttttaagggttacttgattagctgtgtttggaactgctaccgatacatcaatggtaggaactcctctgatgtcctggtttatgttaccagcaatgacactacggtgctgctacccccgtatgatgatgccactgtgaatggtgctgccaaggagccaccgccaccttacgtgtctgcctaagccttcaagtgggcggagctgagggcagcagcttgactttgcagacatctgagcaatagttctgttatttcacttttgccatgagcctctctgagcttgtttgttgctgaaatgctactttttaaaatttagatgttagattgaaaactgtagttttcaacatatgctttgctggaacactgtgatagattaactgtagaattcttcctgtacgattggggatataatgggcttcactaaccttccctaggcattgaaacttcccccaaatctgatggacctagaagtctgcttttgtacctgctgggccccaaagttgggcatttttctctctgttccctctcttttgaaaatgtaaaataaaaccaaaaatagacaactttttcttcagccattccagcatagagaacaaaaccttatggaaacaggaatgtcaattgtgtaatcattgttctaattaggtaaatagaagtccttatgtatgtgttacaagaatttcccccacaacatcctttatgactgaagttcaatgacagtttgtgtttggtggtaaaggattttctccatggcctgaattaagaccattagaaagcaccaggccgtgggagcagtgaccatctgctgactgttcttgtggatcttgtgtccagggacatggggtgacatgcctcgtatgtgttagagggtggaatggatgtgtttggcgctgcatgggatctggtgcccctcttctcctggattcacatccccacccagggcccgcttttactaagtgttctgccctagattggttcaaggaggtcatccaactgactttatcaagtggaattgggatatatttgatatacttctgcctaacaacatggaaaagggttttcttttccctgcaagctacatcctactgctttgaacttccaagtatgtctagtcaccttttaaaatgtaaacattttcagaaaaatgaggattgccttccttgtatgcgctttttaccttgactacctgaattgcaagggatttttatatattcatatgttacaaagtcagcaactctcctgttggttcattattgaatgtgctgtaaattaagttgtttgcaattaaaacaaggtttgcccacatccaagatgaccttgtgattttgtgctgattgtgtctgaggacctttccctccacatatggtctggcagatgcacccagttcagcctaaggagtaggcttttttttgggggggggaggtcgggtgggggggatttttaatcttttaattttcaagatggttaaaatattgaaatgtttaagtggataactatattattcataaaatgactgagtgaaaactaatacactatgagatgaaaagtacttgtcagggattttcaagcttttgctcaagtaattactatgaaataacaatttctagaaatgaagaacaatccgtggagaataaattaccattggtgtgggggaaaaaagccaaacagaagtagaaaaaggtgtagccggcatacaaatgttatctacagtgtatttttagat

SEQ ID NO: 150361 - DNA, 915 bp, Homo sapiens
  Payload ID: 9690
  Gene Symbol: LAPTM4B
  Gene Name: lysosomal protein transmembrane 4 beta
  Uniprot ID: Q86VI4
  ENST ID: ENST00000521545
  CDS Start-End: 235-915
cgccccctccccgtccccgccgctgcagcggtcgccttcggagcgaagggtaccgacccggcagaagctcggagctctcggggtatcgaggaggcaggcccgcgggcgcacgggcgagcgggccgggagccggagcggcggaggagccggcagcagcggcgcggcgggctccaggcgaggcggtcgacgctcctgaaaacttgcgcgcgcgctcgcgccactgcgcccggagcgatgaagatggtcgcgccctggacgcggttctactccaacagctgctgcttgtgctgccatgtccgcaccggcaccatcctgctcggcgtctggtatctgatcatcaatgctgtggtactgttgattttattgagtgccctggctgatccggatcagtataacttttcaagttctgaactgggaggtgactttgagttcatggatgatgccaacatgtgcattgccattgcgatttctcttctcatgatcctgatatgtgctatggctacttacggagcgtacaagcaacgcgcagcctggatcatcccattcttctgttaccagatctttgactttgccctgaacatgttggttgcaatcactgtgcttatttatccaaactccattcaggaatacatacggcaactgcctcctaattttccctacagagatgatgtcatgtcagtgaatcctacctgtttggtccttattattcttctgtttattagcattatcttgacttttaagggttacttgattagctgtgtttggaactgctaccgatacatcaatggtaggaactcctctgatgtcctggtttatgttaccagcaatgacactacggtgctgctacccccgtatgatgatgccactgtgaatggtgctgccaaggagccaccgccaccttacgtgtctgcctaa

SEQ ID NO: 150362 - DNA, 618 bp, Homo sapiens
  Payload ID: 9690
  Gene Symbol: LAPTM4B
  Gene Name: lysosomal protein transmembrane 4 beta
  ENST ID: ENST00000517924
  CDS Start-End: 162-618
gctctcggggtatcgaggaggcaggcccgcgggcgcacgggcgagcgggccgggagccggagcggcggaggagccggcagcagcggcgcggcgggctccaggcgaggcggtcgacgctcctgaaaacttgcgcgcgcgctcgcgccactgcgcccggagcgatgaagatggtcgcgccctggacgcggttctactccaacagctgctgcttgtgctgccatgtccgcaccggcaccatcctgctcggcgtctggtatctgatcatcaatgctgtggtactgttgattttattgagtgccctggctgatccggatcagtataacttttcaagttctgaactgggaggtgactttgagttcatggatgatgccaaaattctttttaatctttcggcagacatgtgcattgccattgcgatttctcttctcatgatcctgatatgtgctatggctacttacggagcgtacaagcaacgcgcagcctggatcatcccattcttctgttaccagatctttgactttgccctgaacatgttggttgcaatcactgtgcttatttatccaaactccattcaggaatacatacggcaactgcctcctaattttccctacagagatg

SEQ ID NO: 150363 - DNA, 2758 bp, Homo sapiens
  Payload ID: 9690
  Gene Symbol: LAPTM4B
  Gene Name: lysosomal protein transmembrane 4 beta
  Uniprot ID: Q86VI4
  ENST ID: ENST00000619747
  CDS Start-End: 681-1634
atcctattttctgggaaaagattactaccacagtaattgagctgtgaagcggagacaaattgctctcggtggtggttcaaagtactgcaattgactggaatagcaccgcgcagttttccttcctctcgtgcaagataagagtgataggagctgtatcgattacctgcaagatagaagtagaagcgggccgggtgcggtggctcacgcctgtaatcccagcactttgggaggctgaggcgggtggatcattcgacgtcaggagttccagaccagcctgaccaacatggtgaaaccccgtctctactaaaaatacaacaaattagccgggtgtggtggcaagcgcctgtaatcccagctactcggttggttgggcaggagaatcgcttgaacccgggaggcggaggttgcagtgagccgagatcgcgccattgcactccagcctgggcgacaagagcgagactctgtctcaaaaaaaaaaaaaaaagaagtagaagggaagaaaatcgcaaggaactagactaaaagaatctcgacccttgaatggagttacacgaacggccagatgaaagaaggaaggcccggacctccactcagggccgactaggggactggcggagggtgcacgctgatggatttactcaccgggtgcttggagctccagcagctggctggagcccgcgatgacgtcacggactcgggtcacatggccaagtccgccccgccccctccccgtccccgccgctgcagcggtcgccttcggagcgaagggtaccgacccggcagaagctcggagctctcggggtatcgaggaggcaggcccgcgggcgcacgggcgagcgggccgggagccggagcggcggaggagccggcagcagcggcgcggcgggctccaggcgaggcggtcgacgctcctgaaaacttgcgcgcgcgctcgcgccactgcgcccggagcgatgaagatggtcgcgccctggacgcggttctactccaacagctgctgcttgtgctgccatgtccgcaccggcaccatcctgctcggcgtctggtatctgatcatcaatgctgtggtactgttgattttattgagtgccctggctgatccggatcagtataacttttcaagttctgaactgggaggtgactttgagttcatggatgatgccaacatgtgcattgccattgcgatttctcttctcatgatcctgatatgtgctatggctacttacggagcgtacaagcaacgcgcagcctggatcatcccattcttctgttaccagatctttgactttgccctgaacatgttggttgcaatcactgtgcttatttatccaaactccattcaggaatacatacggcaactgcctcctaattttccctacagagatgatgtcatgtcagtgaatcctacctgtttggtccttattattcttctgtttattagcattatcttgacttttaagggttacttgattagctgtgtttggaactgctaccgatacatcaatggtaggaactcctctgatgtcctggtttatgttaccagcaatgacactacggtgctgctacccccgtatgatgatgccactgtgaatggtgctgccaaggagccaccgccaccttacgtgtctgcctaagccttcaagtgggcggagctgagggcagcagcttgactttgcagacatctgagcaatagttctgttatttcacttttgccatgagcctctctgagcttgtttgttgctgaaatgctactttttaaaatttagatgttagattgaaaactgtagttttcaacatatgctttgctggaacactgtgatagattaactgtagaattcttcctgtacgattggggatataatgggcttcactaaccttccctaggcattgaaacttcccccaaatctgatggacctagaagtctgcttttgtacctgctgggccccaaagttgggcatttttctctctgttccctctcttttgaaaatgtaaaataaaaccaaaaatagacaactttttcttcagccattccagcatagagaacaaaaccttatggaaacaggaatgtcaattgtgtaatcattgttctaattaggtaaatagaagtccttatgtatgtgttacaagaatttcccccacaacatcctttatgactgaagttcaatgacagtttgtgtttggtggtaaaggattttctccatggcctgaattaagaccattagaaagcaccaggccgtgggagcagtgaccatctgctgactgttcttgtggatcttgtgtccagggacatggggtgacatgcctcgtatgtgttagagggtggaatggatgtgtttggcgctgcatgggatctggtgcccctcttctcctggattcacatccccacccagggcccgcttttactaagtgttctgccctagattggttcaaggaggtcatccaactgactttatcaagtggaattgggatatatttgatatacttctgcctaacaacatggaaaagggttttcttttccctgcaagctacatcctactgctttgaacttccaagtatgtctagtcaccttttaaaatgtaaacattttcagaaaaatgaggattgccttccttgtatgcgctttttaccttgactacctgaattgcaagggatttttatatattcatatgttacaaagtcagcaactctcctgttggttcattattgaatgtgctgtaaattaagttgtttgcaattaaaacaaggtttgcccacatcc

SEQ ID NO: 150364 - DNA, 2223 bp, Homo sapiens
  Payload ID: 9691
  Gene Symbol: LAPTM5
  Gene Name: lysosomal protein transmembrane 5
  Uniprot ID: Q13571
  ENST ID: ENST00000294507
  CDS Start-End: 76-864
cttccccttctctgccctgctccaggcaccaggctctttccccttcagtgtctcagaggaggggacggcagcaccatggacccccgcttgtccactgtccgccagacctgctgctgcttcaatgtccgcatcgcaaccaccgccctggccatctaccatgtgatcatgagcgtcttgttgttcatcgagcactcagtagaggtggcccatggcaaggcgtcctgcaagctctcccagatgggctacctcaggatcgctgacctgatctccagcttcctgctcatcaccatgctcttcatcatcagcctgagcctactgatcggcgtagtcaagaaccgggagaagtacctgctgcccttcctgtccctgcaaatcatggactatctcctgtgcctgctcaccctgctgggctcctacattgagctgcccgcctacctcaagttggcctcccggagccgtgctagctcctccaagttccccctgatgacgctgcagctgctggacttctgcctgagcatcctgaccctctgcagctcctacatggaagtgcccacctatctcaacttcaagtccatgaaccacatgaattacctccccagccaggaggatatgcctcataaccagttcatcaagatgatgatcatcttttccatcgccttcatcactgtccttatcttcaaggtctacatgttcaagtgcgtgtggcggtgctacagattgatcaagtgcatgaactcggtggaggagaagagaaactccaagatgctccagaaggtggtcctgccgtcctacgaggaagccctgtctttgccatcgaagaccccagaggggggcccagcaccacccccatactcagaggtgtgaccctcgccaggccccagccccagtgctgggaggggtggagctgcctcataatctgcttttttgctttggtggcccctgtggcctgggtgggccctcccgcccctccctggcaggacaatctgcttgtgtctccctcgctggcctgctcctcctgcagggcctgtgagctgctcacaactgggtcaacgctttaggctgagtcactcctcgggtctctccataattcagcccaacaatgcttggtttatttcaatcagctctgacacttgtttagacgattggccattctaaagttggtgagtttgtcaagcaactatcgacttgatcagttcagccaagcaactgacaaatcaaaaacccacttgtcagttcagtaaaataatttggtcaaacaacagtctattgcattgatttataaatagttgtcagttcacatagcaatttaatcaagtaatcattaattagttaccccctatatataaatatatgtaatcaatttcttcaaatagcttgcttacatgataatcaattagccaaccatgagtcatttagaatagtgataaatagaatacacagaatagtgatgaaattcaatttaaaaaatcacgttagcctccaaaccatttaattcaaatgaacccatcaactggatgccaactctggcgaatgtaggacctctgagtggctgtataattgttaattcaaatgaaattcatttaaacagttgacaaactgtcattcaacaattagctccaggaaataacagttatttcatcataaaacagtcccttcaaacacacaattgttctgctgaagagttgtcatcaacaatccaatgctcacctattcagttgctctgtggtcagtgtggctgcataacagtggattccatgaaaggagtcattttagtgatgagctgccagtccattcccaggccaggctgtcgctggccatccattcagtcgattcagtcataggcgaatctgttctgcccgaggcttgtggtcaagcaaaaattcagccctgaaatcaggcacatctgttcgttggactaaacccacaggttagttcagtcaaagcaggcaacccccttgtgggcactgaccctgccactggggtcatggcggttgtggcagctggggaggtttggccccaacagccctcctgtgcctgcttccctgtgtgtcggggtcctccagggagctgacccagaggtggaggccacggaggcagggtctctggggactgtcggggggtacagagggagaaggctctgcaagagctccctggcaatacccccttgtgtaattgctttgtgtgcgacagggaggaagtttcaataaagcagcaacaagcttc

SEQ ID NO: 150365 - DNA, 13480 bp, Homo sapiens
  Payload ID: 9692
  Gene Symbol: LYST
  Gene Name: lysosomal trafficking regulator
  Uniprot ID: Q99698
  ENST ID: ENST00000389793
  CDS Start-End: 176-11581
gcggcggcggcagcggcgtcggctcggggttctccgggagagggggagtgcgcggcggccgcagctgccacaaaccaggtgaagctttgttctaagaatatttgtttcatctagtttatgagtccaaatgatatagactgtaaatgtcacagcagtggtgaaagactgctcggtcatgagcaccgacagtaactcactggcacgtgaatttctgaccgatgtcaaccggctttgcaatgcagtggtccagagggtggaggccagggaggaagaagaggaggagacgcacatggcaacccttggacagtaccttgtccatggtcgaggatttctattacttaccaagctaaattctataattgatcaggcattgacatgtagagaagaactcctgactcttcttctgtctctccttccactggtatggaagatacctgtccaagaagaaaaggcaacagattttaacctaccgctctcagcagatataatcctgaccaaagaaaagaactcaagttcacaaagatccactcaggaaaaattacatttagaaggaagtgccctgtctagtcaggtttctgcaaaagtaaatgtttttcgaaaaagcagacgacagcgtaaaattacccatcgctattctgtaagagatgcaagaaagacacagctctccacctcagattcagaagccaattcagatgaaaaaggcatagcaatgaataagcatagaaggccccatctgctgcatcattttttaacatcgtttcctaaacaagaccaccccaaagctaaacttgaccgcttagcaaccaaagaacagactcctccagatgctatggctttggaaaattccagagagattattccaagacaggggtcaaacactgacattttaagtgagccagctgccttgtctgttatcagtaacatgaacaattctccatttgacttatgtcatgttttgttatctttattagaaaaagtttgtaagtttgacgttaccttgaatcataattctcctttagcagccagtgtagtgcccacactaactgaattcctagcaggctttggggactgctgcagtctgagcgacaacttggagagtcgagtagtttctgcaggttggaccgaagaaccggtggctttgattcaaaggatgctctttcgaacagtgttgcatcttctgtcagtagatgttagtactgcagagatgatgccagaaaatcttaggaaaaatttaactgaattgcttagagcagctttaaaaattagaatatgcctagaaaagcagcctgacccttttgcaccaagacaaaagaaaacactgcaggaggttcaggaagattttgtgttttcaaagtatcgtcatagagcccttcttttacctgagcttttggaaggagttcttcagattctgatctgttgtcttcaaagtgcagcttcaaatcccttctacttcagtcaagccatggatttggttcaagaattcattcagcatcatggatttaatttatttgaaacagcagttcttcaaatggaatggctggttttaagagatggagttcctcccgaggcctcagagcatttgaaagccctaataaatagtgtgatgaaaataatgagcactgtcaaaaaagtgaaatcagagcaacttcatcattcgatgtgtacaagaaaaaggcacagacgatgtgaatattctcattttatgcatcatcaccgagatctctcaggtcttctggtttcggcttttaaaaaccaggtttccaaaaacccatttgaagagactgcagatggagatgtttattatcctgagcggtgctgttgcattgcagtgtgtgcccatcagtgcttgcgcttactacagcaggcttccttgagcagcacttgtgtccagatcctatcgggtgttcataacattggaatatgctgttgtatggatcccaaatctgtaatcattcctttgctccatgcttttaaattgccagcactgaaaaattttcagcagcatatattgaatatccttaacaaacttattttggatcagttaggaggagcagagatatcaccaaaaattaaaaaagcagcttgtaatatttgtactgttgactctgaccaactagcccaattagaagagacactgcagggaaacttatgtgatgctgaactctcctcaagtttatccagtccttcttacagatttcaagggatcctgcccagcagtggatctgaagatttgttgtggaaatgggatgctttaaaggcttatcagaactttgtttttgaagaagacagattacatagtatacagattgcaaatcacatttgcaatttaatccagaaaggcaatatagttgttcagtggaaattatataattacatatttaatcctgtgctccaaagaggagttgaattagcacatcattgtcaacacctaagcgttacttcagctcaaagtcatgtatgtagccatcataaccagtgcttgcctcaggacgtgcttcagatttatgtaaaaactctgcctatcctgcttaaatccagggtaataagagatttgtttttgagttgtaatggagtaagtcaaataatcgaattaaattgcttaaatggtattcgaagtcattctctaaaagcatttgaaactctgataatcagcctaggggagcaacagaaagatgcctcagttccagatattgatgggatagacattgaacagaaggagttgtcctctgtacatgtgggtacttcttttcatcatcagcaagcttattcagattctcctcagagtctcagcaaattttatgctggcctcaaagaagcttatccaaagagacggaagactgttaaccaagatgttcatatcaacacaataaacctattcctctgtgtggcttttttatgcgtaagtaaagaagcagagtctgacagggagtcggccaatgactcagaagatacttctggctatgacagcacagccagcgagcctttaagtcatatgctgccatgtatatctctcgagagccttgtcttgccttctcctgaacatatgcaccaagcagcagacatttggtctatgtgtcgttggatctacatgttgagttcagtgttccagaaacagttttataggcttggtggtttccgagtatgccataagttaatatttatgataatacagaaactgttcagaagtcacaaagaggagcaaggaaaaaaggagggagatacaagtgtaaatgaaaaccaggatttaaacagaatttctcaacctaagagaactatgaaggaagatttattatctttggctataaaaagtgaccccataccatcagaactaggtagtctaaaaaagagtgctgacagtttaggtaaattagagttacagcatatttcttccataaatgtggaagaagtttcagctactgaagccgctcccgaggaagcaaagctatttacaagtcaagaaagtgagacctcacttcaaagtatacgacttttggaagcccttctggccatttgtcttcatggtgccagaactagtcaacagaagatggaattggagttacctaatcagaacttgtctgtggaaagtatattatttgaaatgagggaccatctttcccagtcaaaggtgattgaaacacaactagcaaagcctttatttgatgccctgcttcgagttgccctcgggaattattcagcagattttgaacataatgatgctatgactgagaagagtcatcaatctgcagaagaattgtcatcccagcctggtgatttttcagaagaagctgaggattctcagtgttgtagttttaaacttttagttgaagaagaaggttacgaagcagatagtgaaagcaatcctgaagatggcgaaacccaggatgatggggtagacttaaagtctgaaacagaaggtttcagtgcatcaagcagtccaaatgacttactcgaaaacctcactcaaggggaaataatttatcctgagatttgtatgctggaattaaatttgctttctgctagtaaagccaaacttgatgtgcttgcccatgtatttgagagttttttgaaaattattaggcagaaagaaaagaatgtttttctgctcatgcaacagggaactgtgaaaaatcttttaggagggttcttgagtattttaacacaggatgattctgattttcaagcatgccagagagtattggtggatcttttggtatctttgatgagttcaagaacatgttcagaagagctaacccttcttttgagaatatttctggagaaatctccttgtacaaaaattcttcttctgggtattctgaaaattattgaaagtgatactactatgagcccttcacagtatctaaccttccctttactgcacgctccaaatttaagcaacggtgtttcatcacaaaagtatcctgggattttaaacagtaaggccatgggtttattgagaagagcacgagtttcacggagcaagaaagaggctgatagagagagttttccccatcggctgctttcatcttggcacatagccccagtccacctgccgttgctggggcaaaactgctggccacacctatcagaaggtttcagtgtttccctgtggtttaatgtggagtgtatccatgaagctgagagtactacagaaaaaggaaagaagataaagaaaagaaacaaatcattaattttaccagatagcagttttgatggtacagagagcgacagaccagaaggtgcagagtacataaatcctggtgaaagactcatagaagaaggatgtattcatataatttcactgggatccaaagcgttgatgatccaagtgtgggctgatccccacaatgccactcttatctttcgtgtgtgcatggattcaaatgatgacatgaaagctgttttactagcacaggttgaatcacaggagaatattttcctcccaagcaaatggcaacatttagtactcacctacttacagcagccccaagggaaaaggaggattcatgggaaaatctccatatgggtctctggacagaggaagcctgatgttactttggattttatgcttccaagaaaaacaagtttgtcatctgatagcaataaaacattttgcatgattggccattgtttatcatcccaagaagagtttttgcagttggctggaaaatgggacctgggaaatttgcttctcttcaacggagctaaggttggttcacaagaggccttttatctgtatgcttgtggacccaaccatacatctgtaatgccatgtaagtatggcaagccagtcaatgactactccaaatatattaataaagaaattttgcgatgtgaacaaatcagagaactttttatgaccaagaaagatgtggatattggtctcttaattgaaagtctttcagttgtttatacaacttactgtcctgctcagtataccatctatgaaccagtgattagacttaaaggtcaaatgaaaacccaactctctcaaagacccttcagctcaaaagaagttcagagcatcttattagaacctcatcatctaaagaatctccaacctactgaatataaaactattcaaggcattctgcacgaaattggtggaactggcatatttgtttttctctttgccagggttgttgaactcagtagctgtgaagaaactcaagcattagcactgcgagttatactctcattaattaaatacaaccaacaaagagtacatgaattagaaaattgtaatggactttctatgattcatcaggtgttgatcaaacaaaaatgcattgttgggttttacattttgaagacccttcttgaaggatgctgtggtgaagatattatttatatgaatgagaatggagagtttaagttggatgtagactctaatgctataatccaagatgttaagctgttagaggaactattgcttgactggaagatatggagtaaagcagagcaaggtgtttgggaaactttgctagcagctctagaagtcctcatcagagcagatcaccaccagcagatgtttaatattaagcagttattgaaagctcaagtggttcatcactttctactgacttgtcaggttttgcaggaatacaaagaggggcaactcacacccatgccccgagaggtttgtagatcatttgtgaaaattatagcagaagtccttggatctcctccagatttggaattattgacaattatcttcaatttccttttagcagttcaccctcctactaatacttacgtttgtcacaatcccacgaacttctacttttctttgcacatagatggcaagatctttcaggagaaagtgcggtcaatcatgtacctgaggcattccagcagtggaggaaggtcccttatgagccctggatttatggtaataagcccatctggttttactgcttcaccatatgaaggagagaattcctctaatattattccacaacagatggccgcccatatgctgcgttctagaagcctaccagcattccctacttcttcactactaacgcaatcacaaaaactgactggaagtttgggttgtagtatcgacaggttacaaaatattgcagatacttatgttgccacccaatcaaagaaacaaaattctttggggagttccgacacactgaaaaaaggcaaagaggacgcattcatcagtagctgtgagtctgcaaaaactgtttgtgaaatggaagctgtcctctcagcccaggtctctgtcagtgatgtcccaaagggagtgctgggatttccagtggtcaaagcagatcataaacagttgggagcagaacccaggtcagaagatgacagtcctggggatgagtcctgcccacgccgacctgattacctaaagggattggcctccttccagcgaagccacagcactattgcaagccttgggctagcttttccttcacagaacggatctgcagctgttggccgttggccaagtcttgttgatagaaacactgatgattgggaaaactttgcctattctcttggttatgagccaaattacaaccgaactgcaagtgctcacagtgtaactgaagactgtttggtacctatatgctgtggattatatgaactcctaagtggggttcttcttatcctgcctgatgttttgcttgaagatgtgatggacaagcttattcaagcagatacacttttggtcctcgttaaccacccatcaccagctatacaacaaggtgttattaaactattagatgcatattttgctagagcatctaaggaacaaaaagataaatttctgaagaatcgtggattttccttgctagccaaccagttgtatcttcatcgaggaactcaagaattgttagaatgcttcatcgaaatgttctttggtcgacatattggccttgatgaagaatttgatctggaagatgtgagaaacatgggattgtttcagaagtggtctgtcattcctattctgggactaatagagacctctctatatgacaacatactcttgcataatgctcttttacttcttctccaaattttaaattcttgttctaaggtagcagatatgttgctggataatggtctactctatgtgttatgtaatacagtagcagccctgaatggattagaaaagaacattcccatgagtgaatataaattgcttgcttgtgatatacagcaacttttcatagcagttacaattcatgcttgcagttcctcaggctcacaatattttagggttattgaagaccttattgtaatgcttggatatcttcaaaatagcaaaaacaagaggacacaaaatatggctgttgcactacagcttagagttctccaggctgctatggaatttataaggaccaccgcaaatcatgactctgaaaacctcacagattcactccagtcaccttctgctccccatcatgcagtagttcaaaagcggaaaagcattgctggtcctcgaaaatttccccttgctcaaactgaatcgcttctgatgaaaatgcgttcagtggcaaatgatgagcttcatgtgatgatgcaacggagaatgagccaagagaaccctagccaagcaactgaaacggaacttgcgcagagactacagaggctcactgttttagcagtcaacaggattatttatcaagaatttaattcagacattattgacattttgagaactccagaaaatgtaactcaaagcaagacctcagttttccagaccgaaatttctgaggaaaatattcatcatgaacagtcttctgttttcaatccatttcagaaagaaatttttacatatctggtagaaggattcaaagtatctattggttcaagtaaagccagtggttccaagcagcaatggactaaaattctgtggtcttgtaaggagaccttccgaatgcagcttgggagactactagtgcatattttgtcgccagcccacgctgcacaagagagaaagcaaatttttgaaatagttcatgaaccaaatcatcaggaaatactacgagactgtctcagcccatccctacaacatggagccaagttagttttgtatttgtcagagttgatacataatcaccaaggtgaattgactgaagaagagctaggcacagcagaactgcttatgaatgctttgaagttatgtggtcacaagtgcatccctcccagtgcatcaacaaaagcagaccttattaaaatgatcaaagaggaacaaaagaaatatgaaactgaagaaggagtgaataaagctgcttggcagaaaacagttaacaataatcaacaaagtctctttcagcgtctggattcaaaatcaaaggatatatctaaaatagctgcagatatcacccaggcagtgtctctctcccaaggaaatgagagaaaaaaggtgatccagcatattagaggaatgtataaagtagatttgagtgccagcagacattggcaggaacttattcagcagctgacacatgatagagcagtatggtatgaccccatctactatccaacctcatggcagttggatccaacagaagggccaaatcgagagaggagacgtttacagagatgttatttaactattccaaataagtatctccttagggatagacagaaatcagaagatgttgtcaaaccaccactctcttacctgtttgaagacaaaactcattcttctttctcttctactgtcaaagacaaagctgcaagtgaatctataagagtgaatcgaagatgcatcagtgttgcaccatctagagagacagctggtgaattgttactaggtaaatgtggaatgtattttgtggaagataatgcttctgatacagttgaaagttcgagccttcagggagagttggaaccagcatcattttcctggacatatgaagaaattaaagaagttcacaagcgttggtggcaattgagagataatgctgtagaaatctttctaacaaatggcagaacactcctgttggcatttgataacaccaaggttcgtgatgatgtataccacaatatactcacaaataacctccctaatcttctggaatatggtaacatcaccgctctgacaaatttatggtatactgggcaaattactaattttgaatatttgactcacttaaacaaacatgctggccgatccttcaatgatctcatgcagtatcctgtgttcccatttatacttgctgactacgttagtgagacacttgacctcaatgatctgttgatatacagaaatctctctaaacctatagctgttcagtataaagaaaaagaagatcgttatgtggacacatacaagtacttggaggaagagtaccgcaaaggagccagagaagatgaccccatgcctcccgtgcagccctatcactatggctcccactattccaatagcggcactgtgcttcacttcctggtcaggatgcctcctttcactaaaatgtttttagcctatcaagatcaaagttttgacattccagacagaacttttcattctacaaatacaacttggcgactctcatcttttgaatctatgactgatgtgaaagaacttatcccagagtttttctatcttccagagttcctagttaaccgtgaaggttttgattttggtgtgcgtcagaatggtgaacgggttaatcacgtcaaccttcccccttgggcgcgtaatgatcctcgtctttttatcctcatccatcggcaggctctagagtctgactacgtgtcgcagaacatctgtcagtggattgacttggtgtttgggtataagcaaaaggggaaggcttctgttcaagcgatcaatgtttttcatcctgctacatattttggaatggatgtctctgcagttgaagatccagttcagagacgagcgctagaaaccatgataaaaacctacgggcagactccccgtcagctgttccacatggcccatgtgagcagacctggagccaagctcaatattgaaggagagcttccagctgctgtggggttgctagtgcagtttgctttcagggagacccgagaacaggtcaaagaaatcacctatccgagtcctttgtcatggataaaaggcttgaaatggggggaatacgtgggttcccccagtgctccagtacctgtggtctgcttcagccagccccacggagaaagatttggctctctccaggctctgcccaccagagcaatctgtggtttgtcacggaatttctgtcttctgatgacatatagcaaggaacaaggtgtgagaagcatgaacagtacggacattcagtggtcagccatcctgagctggggatatgctgataatattttaaggttgaagagtaaacaaagtgagcctccagtaaactttattcaaagttcacaacagtaccaggtgactagttgtgcttgggtgcctgacagttgccagctgtttactggaagcaaatgcggtgtcatcacagcctacacaaacagatttacaagcagcacgccatcagaaatagaaatggagactcaaatacatctctatggtcacacagaagagataaccagcttatttgtttgcaaaccatacagtatactgataagtgtgagcagagacggaacctgcatcatatgggatttaaacaggttatgctatgtacaaagtctggcgggacacaaaagccctgtcacagctgtctctgccagtgaaacctcaggtgatattgctactgtgtgtgattcagctggcggaggcagtgacctcagactctggacggtgaacggggatctcgttggacatgtccactgcagggagatcatctgttccgtggctttctccaaccagcctgagggagtatctatcaatgtaatcgctgggggattagaaaatggaattgtaaggttatggagcacatgggacttaaagcctgtgagagaaattacatttcccaaatcaaataagcccatcatcagccttacattttcttgtgatggccaccatttgtacacagcaaacagtgatgggaccgtgattgcctggtgtcggaaggaccagcagcgcttgaaacagccaatgttctattccttccttagcagctatgcagccgggtgaatgcgaatgaacttcacgttctccaaagcactttaactccaaactagatttgttgacttcaccagttttaggaggttgaacctaaagaaatggatgactggacaaaccatccaaataatgataaagtctattcatctgcacaaaattctgaagagtcacatgatcctaagaggaaagttctgttctattttagtgataatctggaagattgtgtcaatatgcactagccaacaagttttaagcctcgcatggtacattaaaatgatattcttaaaattttttcccaccaaggtattccaaagaaaatattaaggtctcccctttttctatgattccaaaaggaccagtagaatttaaattggttggttgattgtttatataaaacacactaaaattatattttaaaagtttactgccatgaaatactcctcccaccacacacacatgctccaaaagaggaaagaaaaaaagataatttttaggacttgataattgctttctttgagaagcaaattattcagtaggtgcctctgtaccaaatattttatggaatatctaaatactaaaataaactatgaatgaatctcaaaattaggcagtttttgccagttgctttcttagctcaaaggagaaccagaatttttttgacagccacaaacaagaatacaggtatcttggatttcagacacattctgtttcttcataaaaattttacttaaaatctgtaacgctagatattgactatccttagttgagtcactgaggtttaaacacaatggtaagtcttaaagtctgctatttacagagcattgaatctgtaccaatttgcaatagaaagccttcagtatgcaagaagtttgcatgggtattaagaacacagcctaaataaggcatttgatctaatctgcaggaagaattttcttccccaaaacagaattataaaagcttactttaaacaggaggcagaataattcttttaggaaaccatttcattctgtttctactaacctataccatctgagaattctaggaagaataataaaatctcgtgtattccacagcaaacttacataccataaagacagaattcctaaacatcttggagccgtctgtctctcccatatgatggctgtctgtatatttttacttggggtgctgctttattggctttgaaaacactgtcagataagctcagtaatatgttaccatgggataaaaatatgtatccctgcctaagaataacttgtgcatttgttatggaaatttaattcatatggtgtttacagtactacttttgtaacttccagactttctaaaacattctgcttaaaaaccatataaaatataattccaaagtctctgctgtcaagatagattcgagagaaagcacgtggccatgtatgctttaaccttaaactgcatacacatgtagtgatacctaggctgcatttagatcaccgtgtgctcaggccaggtgtgaatcctgaggtccatggaggtgcagagatgagattactcctattcacgttgaagtgatttgctttgttaacaaaaaattgcagctattgtctagctttcatttttttactgagaactttaaattagtcccctattagaatagggttgctactcatctttttttaaaaaccgaatttcatcatttatctaaagagaaaatatgcagaataactggtcttgttaagagtgcaatattatatttttatgtaaaaataaaaattaatttggggggattatttattcagcatgaaacctaatatgtatatgtttgaaatacttcataatgtgcatgttgtagcaaacatttctgtaaattatcacaagctctgttacctttatatacactgcctcttcaatttggaaataaatttcataaaaata

SEQ ID NO: 150366 - DNA, 12985 bp, Homo sapiens
  Payload ID: 9692
  Gene Symbol: LYST
  Gene Name: lysosomal trafficking regulator
  ENST ID: ENST00000389794
  CDS Start-End: 180-4328
cgcggcggcggcggcagcggcgtcggctcggggttctccgggagagggggagtgcgcggcggccgcagctgccacaaaccaggtgaagctttgttctaagaatatttgtttcatctagtttatgagtccaaatgatatagactgtaaatgtcacagcagtggtgaaagactgctcggtcatgagcaccgacagtaactcactggcacgtgaatttctgaccgatgtcaaccggctttgcaatgcagtggtccagagggtggaggccagggaggaagaagaggaggagacgcacatggcaacccttggacagtaccttgtccatggtcgaggatttctattacttaccaagctaaattctataattgatcaggcattgacatgtagagaagaactcctgactcttcttctgtctctccttccactggtatggaagatacctgtccaagaagaaaaggcaacagattttaacctaccgctctcagcagatataatcctgaccaaagaaaagaactcaagttcacaaagatccactcaggaaaaattacatttagaaggaagtgccctgtctagtcaggtttctgcaaaagtaaatgtttttcgaaaaagcagacgacagcgtaaaattacccatcgctattctgtaagagatgcaagaaagacacagctctccacctcagattcagaagccaattcagatgaaaaaggcatagcaatgaataagcatagaaggccccatctgctgcatcattttttaacatcgtttcctaaacaagaccaccccaaagctaaacttgaccgcttagcaaccaaagaacagactcctccagatgctatggctttggaaaattccagagagattattccaagacaggggtcaaacactgacattttaagtgagccagctgccttgtctgttatcagtaacatgaacaattctccatttgacttatgtcatgttttgttatctttattagaaaaagtttgtaagtttgacgttaccttgaatcataattctcctttagcagccagtgtagtgcccacactaactgaattcctagcaggctttggggactgctgcagtctgagcgacaacttggagagtcgagtagtttctgcaggttggaccgaagaaccggtggctttgattcaaaggatgctctttcgaacagtgttgcatcttctgtcagtagatgttagtactgcagagatgatgccagaaaatcttaggaaaaatttaactgaattgcttagagcagctttaaaaattagaatatgcctagaaaagcagcctgacccttttgcaccaagacaaaagaaaacactgcaggaggttcaggaagattttgtgttttcaaagtatcgtcatagagcccttcttttacctgagcttttggaaggagttcttcagattctgatctgttgtcttcaaagtgcagcttcaaatcccttctacttcagtcaagccatggatttggttcaagaattcattcagcatcatggatttaatttatttgaaacagcagttcttcaaatggaatggctggttttaagagatggagttcctcccgaggcctcagagcatttgaaagccctaataaatagtgtgatgaaaataatgagcactgtcaaaaaagtgaaatcagagcaacttcatcattcgatgtgtacaagaaaaaggcacagacgatgtgaatattctcattttatgcatcatcaccgagatctctcaggtcttctggtttcggcttttaaaaaccaggtttccaaaaacccatttgaagagactgcagatggagatgtttattatcctgagcggtgctgttgcattgcagtgtgtgcccatcagtgcttgcgcttactacagcaggcttccttgagcagcacttgtgtccagatcctatcgggtgttcataacattggaatatgctgttgtatggatcccaaatctgtaatcattcctttgctccatgcttttaaattgccagcactgaaaaattttcagcagcatatattgaatatccttaacaaacttattttggatcagttaggaggagcagagatatcaccaaaaattaaaaaagcagcttgtaatatttgtactgttgactctgaccaactagcccaattagaagagacactgcagggaaacttatgtgatgctgaactctcctcaagtttatccagtccttcttacagatttcaagggatcctgcccagcagtggatctgaagatttgttgtggaaatgggatgctttaaaggcttatcagaactttgtttttgaagaagacagattacatagtatacagattgcaaatcacatttgcaatttaatccagaaaggcaatatagttgttcagtggaaattatataattacatatttaatcctgtgctccaaagaggagttgaattagcacatcattgtcaacacctaagcgttacttcagctcaaagtcatgtatgtagccatcataaccagtgcttgcctcaggacgtgcttcagatttatgtaaaaactctgcctatcctgcttaaatccagggtaataagagatttgtttttgagttgtaatggagtaagtcaaataatcgaattaaattgcttaaatggtattcgaagtcattctctaaaagcatttgaaactctgataatcagcctaggggagcaacagaaagatgcctcagttccagatattgatgggatagacattgaacagaaggagttgtcctctgtacatgtgggtacttcttttcatcatcagcaagcttattcagattctcctcagagtctcagcaaattttatgctggcctcaaagaagcttatccaaagagacggaagactgttaaccaagatgttcatatcaacacaataaacctattcctctgtgtggcttttttatgcgtaagtaaagaagcagagtctgacagggagtcggccaatgactcagaagatacttctggctatgacagcacagccagcgagcctttaagtcatatgctgccatgtatatctctcgagagccttgtcttgccttctcctgaacatatgcaccaagcagcagacatttggtctatgtgtcgttggatctacatgttgagttcagtgttccagaaacagttttataggcttggtggtttccgagtatgccataagttaatatttatgataatacagaaactgttcagaagtcacaaagaggagcaaggaaaaaaggagggagatacaagtgtaaatgaaaaccaggatttaaacagaatttctcaacctaagagaactatgaaggaagatttattatctttggctataaaaagtgaccccataccatcagaactaggtagtctaaaaaagagtgctgacagtttaggtaaattagagttacagcatatttcttccataaatgtggaagaagtttcagctactgaagccgctcccgaggaagcaaagctatttacaagtcaagaaagtgagacctcacttcaaagtatacgacttttggaagcccttctggccatttgtcttcatggtgccagaactagtcaacagaagatggaattggagttacctaatcagaacttgtctgtggaaagtatattatttgaaatgagggaccatctttcccagtcaaaggtgattgaaacacaactagcaaagcctttatttgatgccctgcttcgagttgccctcgggaattattcagcagattttgaacataatgatgctatgactgagaagagtcatcaatctgcagaagaattgtcatcccagcctggtgatttttcagaagaagctgaggattctcagtgttgtagttttaaacttttagttgaagaagaaggttacgaagcagatagtgaaagcaatcctgaagatggcgaaacccaggatgatggggtagacttaaagtctgaaacagaaggtttcagtgcatcaagcagtccaaatgacttactcgaaaacctcactcaaggggaaataatttatcctgagatttgtatgctggaattaaatttgctttctgctagtaaagccaaacttgatgtgcttgcccatgtatttgagagttttttgaaaattattaggcagaaagaaaagaatgtttttctgctcatgcaacagggaactgtgaaaaatcttttaggagggttcttgagtattttaacacaggatgattctgattttcaagcatgccagagagtattggtggatcttttggtatctttgatgagttcaagaacatgttcagaagagctaacccttcttttgagaatatttctggagaaatctccttgtacaagagcgacagaccagaaggtgcagagtacataaatcctggtgaaagactcatagaagaaggatgtattcatataatttcactgggatccaaagcgttgatgatccaagtgtgggctgatccccacaatgccactcttatctttcgtgtgtgcatggattcaaatgatgacatgaaagctgttttactagcacaggttgaatcacaggagaatattttcctcccaagcaaatggcaacatttagtactcacctacttacagcagccccaagggaaaaggaggattcatgggaaaatctccatatgggtctctggacagaggaagcctgatgttactttggattttatgcttccaagaaaaacaagtttgtcatctgatagcaataaaacattttgcatgattggccattgtttatcatcccaagaagagtttttgcagttggctggaaaatgggacctgggaaatttgcttctcttcaacggagctaaggttggttcacaagaggccttttatctgtatgcttgtggacccaaccatacatctgtaatgccatgtaagtatggcaagccagtcaatgactactccaaatatattaataaagaaattttgcgatgtgaacaaatcagagaactttttatgaccaagaaagatgtggatattggtctcttaattgaaagtctttcagttgtttatacaacttactgtcctgctcagtataccatctatgaaccagtgattagacttaaaggtcaaatgaaaacccaactctctcaaagacccttcagctcaaaagaagttcagagcatcttattagaacctcatcatctaaagaatctccaacctactgaatataaaactattcaaggcattctgcacgaaattggtggaactggcatatttgtttttctctttgccagggttgttgaactcagtagctgtgaagaaactcaagcattagcactgcgagttatactctcattaattaaatacaaccaacaaagagtacatgaattagaaaattgtaatggactttctatgattcatcaggtgttgatcaaacaaaaatgcattgttgggttttacattttgaagacccttcttgaaggatgctgtggtgaagatattatttatatgaatgagaatggagagtttaagttggatgtagactctaatgctataatccaagatgttaagctgttagaggaactattgcttgactggaagatatggagtaaagcagagcaaggtgtttgggaaactttgctagcagctctagaagtcctcatcagagcagatcaccaccagcagatgtttaatattaagcagttattgaaagctcaagtggttcatcactttctactgacttgtcaggttttgcaggaatacaaagaggggcaactcacacccatgccccgagaggtttgtagatcatttgtgaaaattatagcagaagtccttggatctcctccagatttggaattattgacaattatcttcaatttccttttagcagttcaccctcctactaatacttacgtttgtcacaatcccacgaacttctacttttctttgcacatagatggcaagatctttcaggagaaagtgcggtcaatcatgtacctgaggcattccagcagtggaggaaggtcccttatgagccctggatttatggtaataagcccatctggttttactgcttcaccatatgaaggagagaattcctctaatattattccacaacagatggccgcccatatgctgcgttctagaagcctaccagcattccctacttcttcactactaacgcaatcacaaaaactgactggaagtttgggttgtagtatcgacaggttacaaaatattgcagatacttatgttgccacccaatcaaagaaacaaaattctttggggagttccgacacactgaaaaaaggcaaagaggacgcattcatcagtagctgtgagtctgcaaaaactgtttgtgaaatggaagctgtcctctcagcccaggtctctgtcagtgatgtcccaaagggagtgctgggatttccagtggtcaaagcagatcataaacagttgggagcagaacccaggtcagaagatgacagtcctggggatgagtcctgcccacgccgacctgattacctaaagggattggcctccttccagcgaagccacagcactattgcaagccttgggctagcttttccttcacagaacggatctgcagctgttggccgttggccaagtcttgttgatagaaacactgatgattgggaaaactttgcctattctcttggttatgagccaaattacaaccgaactgcaagtgctcacagtgtaactgaagactgtttggtacctatatgctgtggattatatgaactcctaagtggggttcttcttatcctgcctgatgttttgcttgaagatgtgatggacaagcttattcaagcagatacacttttggtcctcgttaaccacccatcaccagctatacaacaaggtgttattaaactattagatgcatattttgctagagcatctaaggaacaaaaagataaatttctgaagaatcgtggattttccttgctagccaaccagttgtatcttcatcgaggaactcaagaattgttagaatgcttcatcgaaatgttctttggtcgacatattggccttgatgaagaatttgatctggaagatgtgagaaacatgggattgtttcagaagtggtctgtcattcctattctgggactaatagagacctctctatatgacaacatactcttgcataatgctcttttacttcttctccaaattttaaattcttgttctaaggtagcagatatgttgctggataatggtctactctatgtgttatgtaatacagtagcagccctgaatggattagaaaagaacattcccatgagtgaatataaattgcttgcttgtgatatacagcaacttttcatagcagttacaattcatgcttgcagttcctcaggctcacaatattttagggttattgaagaccttattgtaatgcttggatatcttcaaaatagcaaaaacaagaggacacaaaatatggctgttgcactacagcttagagttctccaggctgctatggaatttataaggaccaccgcaaatcatgactctgaaaacctcacagattcactccagtcaccttctgctccccatcatgcagtagttcaaaagcggaaaagcattgctggtcctcgaaaatttccccttgctcaaactgaatcgcttctgatgaaaatgcgttcagtggcaaatgatgagcttcatgtgatgatgcaacggagaatgagccaagagaaccctagccaagcaactgaaacggaacttgcgcagagactacagaggctcactgttttagcagtcaacaggattatttatcaagaatttaattcagacattattgacattttgagaactccagaaaatgtaactcaaagcaagacctcagttttccagaccgaaatttctgaggaaaatattcatcatgaacagtcttctgttttcaatccatttcagaaagaaatttttacatatctggtagaaggattcaaagtatctattggttcaagtaaagccagtggttccaagcagcaatggactaaaattctgtggtcttgtaaggagaccttccgaatgcagcttgggagactactagtgcatattttgtcgccagcccacgctgcacaagagagaaagcaaatttttgaaatagttcatgaaccaaatcatcaggaaatactacgagactgtctcagcccatccctacaacatggagccaagttagttttgtatttgtcagagttgatacataatcaccaaggtgaattgactgaagaagagctaggcacagcagaactgcttatgaatgctttgaagttatgtggtcacaagtgcatccctcccagtgcatcaacaaaagcagaccttattaaaatgatcaaagaggaacaaaagaaatatgaaactgaagaaggagtgaataaagctgcttggcagaaaacagttaacaataatcaacaaagtctctttcagcgtctggattcaaaatcaaaggatatatctaaaatagctgcagatatcacccaggcagtgtctctctcccaaggaaatgagagaaaaaaggtgatccagcatattagaggaatgtataaagtagatttgagtgccagcagacattggcaggaacttattcagcagctgacacatgatagagcagtatggtatgaccccatctactatccaacctcatggcagttggatccaacagaagggccaaatcgagagaggagacgtttacagagatgttatttaactattccaaataagtatctccttagggatagacagaaatcagaagatgttgtcaaaccaccactctcttacctgtttgaagacaaaactcattcttctttctcttctactgtcaaagacaaagctgcaagtgaatctataagagtgaatcgaagatgcatcagtgttgcaccatctagagagacagctggtgaattgttactaggtaaatgtggaatgtattttgtggaagataatgcttctgatacagttgaaagttcgagccttcagggagagttggaaccagcatcattttcctggacatatgaagaaattaaagaagttcacaagcgttggtggcaattgagagataatgctgtagaaatctttctaacaaatggcagaacactcctgttggcatttgataacaccaaggttcgtgatgatgtataccacaatatactcacaaataacctccctaatcttctggaatatggtaacatcaccgctctgacaaatttatggtatactgggcaaattactaattttgaatatttgactcacttaaacaaacatgctggccgatccttcaatgatctcatgcagtatcctgtgttcccatttatacttgctgactacgttagtgagacacttgacctcaatgatctgttgatatacagaaatctctctaaacctatagctgttcagtataaagaaaaagaagatcgttatgtggacacatacaagtacttggaggaagagtaccgcaaaggagccagagaagatgaccccatgcctcccgtgcagccctatcactatggctcccactattccaatagcggcactgtgcttcacttcctggtcaggatgcctcctttcactaaaatgtttttagcctatcaagatcaaagttttgacattccagacagaacttttcattctacaaatacaacttggcgactctcatcttttgaatctatgactgatgtgaaagaacttatcccagagtttttctatcttccagagttcctagttaaccgtgaaggttttgattttggtgtgcgtcagaatggtgaacgggttaatcacgtcaaccttcccccttgggcgcgtaatgatcctcgtctttttatcctcatccatcggcaggctctagagtctgactacgtgtcgcagaacatctgtcagtggattgacttggtgtttgggtataagcaaaaggggaaggcttctgttcaagcgatcaatgtttttcatcctgctacatattttggaatggatgtctctgcagttgaagatccagttcagagacgagcgctagaaaccatgataaaaacctacgggcagactccccgtcagctgttccacatggcccatgtgagcagacctggagccaagctcaatattgaaggagagcttccagctgctgtggggttgctagtgcagtttgctttcagggagacccgagaacaggtcaaagaaatcacctatccgagtcctttgtcatggataaaaggcttgaaatggggggaatacgtgggttcccccagtgctccagtacctgtggtctgcttcagccagccccacggagaaagatttggctctctccaggctctgcccaccagagcaatctgtggtttgtcacggaatttctgtcttctgatgacatatagcaaggaacaaggtgtgagaagcatgaacagtacggacattcagtggtcagccatcctgagctggggatatgctgataatattttaaggttgaagagtaaacaaagtgagcctccagtaaactttattcaaagttcacaacagtaccaggtgactagttgtgcttgggtgcctgacagttgccagctgtttactggaagcaaatgcggtgtcatcacagcctacacaaacagatttacaagcagcacgccatcagaaatagaaatggagactcaaatacatctctatggtcacacagaagagataaccagcttatttgtttgcaaaccatacagtatactgataagtgtgagcagagacggaacctgcatcatatgggatttaaacaggttatgctatgtacaaagtctggcgggacacaaaagccctgtcacagctgtctctgccagtgaaacctcaggtgatattgctactgtgtgtgattcagctggcggaggcagtgacctcagactctggacggtgaacggggatctcgttggacatgtccactgcagggagatcatctgttccgtggctttctccaaccagcctgagggagtatctatcaatgtaatcgctgggggattagaaaatggaattgtaaggttatggagcacatgggacttaaagcctgtgagagaaattacatttcccaaatcaaataagcccatcatcagccttacattttcttgtgatggccaccatttgtacacagcaaacagtgatgggaccgtgattgcctggtgtcggaaggaccagcagcgcttgaaacagccaatgttctattccttccttagcagctatgcagccgggtgaatgcgaatgaacttcacgttctccaaagcactttaactccaaactagatttgttgacttcaccagttttaggaggttgaacctaaagaaatggatgactggacaaaccatccaaataatgataaagtctattcatctgcacaaaattctgaagagtcacatgatcctaagaggaaagttctgttctattttagtgataatctggaagattgtgtcaatatgcactagccaacaagttttaagcctcgcatggtacattaaaatgatattcttaaaattttttcccaccaaggtattccaaagaaaatattaaggtctcccctttttctatgattccaaaaggaccagtagaatttaaattggttggttgattgtttatataaaacacactaaaattatattttaaaagtttactgccatgaaatactcctcccaccacacacacatgctccaaaagaggaaagaaaaaaagataatttttaggacttgataattgctttctttgagaagcaaattattcagtaggtgcctctgtaccaaatattttatggaatatctaaatactaaaataaactatgaatgaatctcaaaattaggcagtttttgccagttgctttcttagctcaaaggagaaccagaatttttttgacagccacaaacaagaatacaggtatcttggatttcagacacattctgtttcttcataaaaattttacttaaaatctgtaacgctagatattgactatccttagttgagtcactgaggtttaaacacaatggtaagtcttaaagtctgctatttacagagcattgaatctgtaccaatttgcaatagaaagccttcagtatgcaagaagtttgcatgggtattaagaacacagcctaaataaggcatttgatctaatctgcaggaagaattttcttccccaaaacagaattataaaagcttactttaaacaggaggcagaataattcttttaggaaaccatttcattctgtttctactaacctataccatctgagaattcctaaacatcttggagccgtctgtctctcccatatgatggctgtctgtatatttttacttggggtgctgctttattggctttgaaaacactgtcagataagctcagtaatatgttaccatgggataaaaatatgtatccctgcctaagaataacttgtgcatttgttatggaaatttaattcatatggtgtttacagtactacttttgtaacttccagactttctaaaacattctgcttaaaaaccatataaaatataattccaaagtctctgctgtcaagatagattcgagagaaagcacgtggccatgtatgctttaaccttaaactgcatacacatgtagtgatacctaggctgcatttagatcaccgtgtgctcaggccaggtgtgaatcctgaggtccatggaggtgcagagatgagattactcctattcacgttgaagtgatttgctttgttaacaaaaaattgcagctattgtctagctttcatttttttactgagaactttaaattagtcccctattagaatagggttgctactcatctttttttaaaaaccgaatttcatcatttatctaaagagaaaatatgcagaataactggtcttgttaagagtgcaatattatatttttatgtaaaaataaaaattaatttggggggattatttattcagcatgaaacctaatatgtatatgtttgaaatacttcataatgtgcatgttgtagcaaacatttctgtaaattatcacaagctctgttacctttatatacactgcctcttcaatttggaaataaatttc

SEQ ID NO: 150367 - DNA, 542 bp, Homo sapiens
  Payload ID: 9692
  Gene Symbol: LYST
  Gene Name: lysosomal trafficking regulator
  ENST ID: ENST00000487530
  CDS Start-End: 1-542
cattcccatgagtgaatataaattgcttgcttgtgatatacagcaacttttcatagcagttacaattcatgcttgcagttcctcaggctcacaatattttagggttattgaagaccttattgtaatgcttggatatcttcaaaatagcaaaaacaagaggacacaaaatatggctgttgcactacagcttagagttctccaggctgctatggaatttataaggaccaccgcaaatcatgactctgaaaacctcacagattcactccagtcaccttctgctccccatcatgcagtagttcaaaagcggaaaagcattgctggttcaattccaatgaagggttccattattcctcatctaccaagacatcattttggttcctatggtcaacttccgatgcccttctccttcggtccattaaatcaagactcatccccccagttttctcctggatgcactacctgtgttgtacctcctggagcaggtcctcgaaaatttccccttgctcaaactgaatcgcttctgatgaaaatgcgttcagtgg

SEQ ID NO: 150368 - DNA, 2699 bp, Homo sapiens
  Payload ID: 9693
  Gene Symbol: LAMP1
  Gene Name: lysosomal-associated membrane protein 1
  Uniprot ID: P11279
  ENST ID: ENST00000332556
  CDS Start-End: 195-1448
gtgacaagcgctgccggccgcggtgtcttcttcgtgccggcgtcgcagtggccgggcctcttgcgtctggtaacgccgctgtctctaacgccagcccttggcgcccgcgccccgccaccgcagcgcccggcagtccgcggcccaaccgccgcccgcgcccccgctccccgcaccgtacccggccgcctcgcgccatggcggcccccggcagcgcccggcgacccctgctgctgctactgctgttgctgctgctcggcctcatgcattgtgcgtcagcagcaatgtttatggtgaaaaatggcaacgggaccgcgtgcataatggccaacttctctgctgccttctcagtgaactacgacaccaagagtggccctaagaacatgacctttgacctgccatcagatgccacagtggtgctcaaccgcagctcctgtggaaaagagaacacttctgaccccagtctcgtgattgcttttggaagaggacatacactcactctcaatttcacgagaaatgcaacacgttacagcgtccagctcatgagttttgtttataacttgtcagacacacaccttttccccaatgcgagctccaaagaaatcaagactgtggaatctataactgacatcagggcagatatagataaaaaatacagatgtgttagtggcacccaggtccacatgaacaacgtgaccgtaacgctccatgatgccaccatccaggcgtacctttccaacagcagcttcagccggggagagacacgctgtgaacaagacaggccttccccaaccacagcgccccctgcgccacccagcccctcgccctcacccgtgcccaagagcccctctgtggacaagtacaacgtgagcggcaccaacgggacctgcctgctggccagcatggggctgcagctgaacctcacctatgagaggaaggacaacacgacggtgacaaggcttctcaacatcaaccccaacaagacctcggccagcgggagctgcggcgcccacctggtgactctggagctgcacagcgagggcaccaccgtcctgctcttccagttcgggatgaatgcaagttctagccggtttttcctacaaggaatccagttgaatacaattcttcctgacgccagagaccctgcctttaaagctgccaacggctccctgcgagcgctgcaggccacagtcggcaattcctacaagtgcaacgcggaggagcacgtccgtgtcacgaaggcgttttcagtcaatatattcaaagtgtgggtccaggctttcaaggtggaaggtggccagtttggctctgtggaggagtgtctgctggacgagaacagcatgctgatccccatcgctgtgggtggtgccctggcggggctggtcctcatcgtcctcatcgcctacctcgtcggcaggaagaggagtcacgcaggctaccagactatctagcctggtgcacgcaggcacagcagctgcaggggcctctgttcctttctctgggcttagggtcctgtcgaaggggaggcacactttctggcaaacgtttctcaaatctgcttcatccaatgtgaagttcatcttgcagcatttactatgcacaacagagtaactatcgaaatgacggtgttaattttgctaactgggttaaatattttgctaactggttaaacattaatatttaccaaagtaggattttgagggtgggggtgctctctctgagggggtgggggtgccgctgtctctgaggggtgggggtgccgctgtctctgaggggtgggggtgccgctctctctgagggggtgggggtgccgctttctctgagggggtgggggtgccgctctctctgagggggtgggggtgctgctctctccgaggggtggaatgccgctgtctctgaggggtgggggtgccgctctaaattggctccatatcatttgagtttagggttctggtgtttggtttcttcattctttactgcactcagatttaagccttacaaagggaaagcctctggccgtcacacgtaggacgcatgaaggtcactcgtggtgaggctgacatgctcacacattacaacagtagagagggaacatcctaagacagaggaactccagagatgagtgtctggagcgcttcagttcagctttaaaggccaggacgggccacacgtggctggcggcctcgttccagtggcggcacgtccttgggcgtctctaatgtctgcagctcaagggctggcacttttttaaatataaaaatgggtgttatttttatttttatttgtaaagtgatttttggtcttctgttgacattcggggtgatcctgttctgcgctgtgtacaatgtgagatcggtgcgttctcctgatgttttgccgtggcttggggattgtacacgggaccagctcacgtaatgcattgcctgtaacaatgtaataaaaagcctctttctttttggggtgggccttgtccttctgtcagctaaaatgggagctcatgagagaaggacgtcagggaaacggggttgagggtggtctcggtgcagagagaagggtgtcagggaaacggggggtgagggtggtcttggtgccagacgtagggaatggtgttgggagtggcccgagtgcctggcacagttgtctggttcattcatgtaacatgataatttttaaatcattaaaaaaattacctttcatacaga

SEQ ID NO: 150369 - DNA, 1867 bp, Homo sapiens
  Payload ID: 9694
  Gene Symbol: LAMP2
  Gene Name: lysosomal-associated membrane protein 2
  Uniprot ID: P13473
  ENST ID: ENST00000200639
  CDS Start-End: 138-1370
ccgattcctggcttttgcaaggctgtggtcggtggtcatcagtgctcttgacccaggtccagcgagccttttccctggtgttgcagctgttgttgtaccgccgccgtcgccgccgtcgccgcctgctctgcggggtcatggtgtgcttccgcctcttcccggttccgggctcagggctcgttctggtctgcctagtcctgggagctgtgcggtcttatgcattggaacttaatttgacagattcagaaaatgccacttgcctttatgcaaaatggcagatgaatttcacagtacgctatgaaactacaaataaaacttataaaactgtaaccatttcagaccatggcactgtgacatataatggaagcatttgtggggatgatcagaatggtcccaaaatagcagtgcagttcggacctggcttttcctggattgcgaattttaccaaggcagcatctacttattcaattgacagcgtctcattttcctacaacactggtgataacacaacatttcctgatgctgaagataaaggaattcttactgttgatgaacttttggccatcagaattccattgaatgacctttttagatgcaatagtttatcaactttggaaaagaatgatgttgtccaacactactgggatgttcttgtacaagcttttgtccaaaatggcacagtgagcacaaatgagttcctgtgtgataaagacaaaacttcaacagtggcacccaccatacacaccactgtgccatctcctactacaacacctactccaaaggaaaaaccagaagctggaacctattcagttaataatggcaatgatacttgtctgctggctaccatggggctgcagctgaacatcactcaggataaggttgcttcagttattaacatcaaccccaatacaactcactccacaggcagctgccgttctcacactgctctacttagactcaatagcagcaccattaagtatctagactttgtctttgctgtgaaaaatgaaaaccgattttatctgaaggaagtgaacatcagcatgtatttggttaatggctccgttttcagcattgcaaataacaatctcagctactgggatgcccccctgggaagttcttatatgtgcaacaaagagcagactgtttcagtgtctggagcatttcagataaatacctttgatctaagggttcagcctttcaatgtgacacaaggaaagtattctacagctcaagactgcagtgcagatgacgacaacttccttgtgcccatagcggtgggagctgccttggcaggagtacttattctagtgttgctggcttattttattggtctcaagcaccatcatgctggatatgagcaattttagaatctgcaacctgattgattatataaaaatacatgcaaataacaagattttcttacctctcagttgttgaaacactttgcttcttaaaattgatatgttgaaactttaattcttttatcaatcccagcattttgagatcagtctttattaataaaacctgttctctttaatcagcttaaaatccaaagtgtcatatttactggtcctggagacaaacttgttcaaaagaacatcaacgtgcaatgttttaaggtctatcttaagaagccctggccaaattttgatcctaaccttgaagtatgccttgaacttattaacatggccattataagaataaaatatgtagttgtgtcttaatggaattaataaatgtcatttcactactggtgttctgtttcaatgtataaggactatagtgatttaaactcatcaatgtgcctttgcataaagttcattaaataaatattgatgtggtataaatgcccatcagatatgct

SEQ ID NO: 150370 - DNA, 4030 bp, Homo sapiens
  Payload ID: 9694
  Gene Symbol: LAMP2
  Gene Name: lysosomal-associated membrane protein 2
  Uniprot ID: P13473
  ENST ID: ENST00000371335
  CDS Start-End: 138-1370
ccgattcctggcttttgcaaggctgtggtcggtggtcatcagtgctcttgacccaggtccagcgagccttttccctggtgttgcagctgttgttgtaccgccgccgtcgccgccgtcgccgcctgctctgcggggtcatggtgtgcttccgcctcttcccggttccgggctcagggctcgttctggtctgcctagtcctgggagctgtgcggtcttatgcattggaacttaatttgacagattcagaaaatgccacttgcctttatgcaaaatggcagatgaatttcacagtacgctatgaaactacaaataaaacttataaaactgtaaccatttcagaccatggcactgtgacatataatggaagcatttgtggggatgatcagaatggtcccaaaatagcagtgcagttcggacctggcttttcctggattgcgaattttaccaaggcagcatctacttattcaattgacagcgtctcattttcctacaacactggtgataacacaacatttcctgatgctgaagataaaggaattcttactgttgatgaacttttggccatcagaattccattgaatgacctttttagatgcaatagtttatcaactttggaaaagaatgatgttgtccaacactactgggatgttcttgtacaagcttttgtccaaaatggcacagtgagcacaaatgagttcctgtgtgataaagacaaaacttcaacagtggcacccaccatacacaccactgtgccatctcctactacaacacctactccaaaggaaaaaccagaagctggaacctattcagttaataatggcaatgatacttgtctgctggctaccatggggctgcagctgaacatcactcaggataaggttgcttcagttattaacatcaaccccaatacaactcactccacaggcagctgccgttctcacactgctctacttagactcaatagcagcaccattaagtatctagactttgtctttgctgtgaaaaatgaaaaccgattttatctgaaggaagtgaacatcagcatgtatttggttaatggctccgttttcagcattgcaaataacaatctcagctactgggatgcccccctgggaagttcttatatgtgcaacaaagagcagactgtttcagtgtctggagcatttcagataaatacctttgatctaagggttcagcctttcaatgtgacacaaggaaagtattctacagcccaagagtgttcgctggatgatgacaccattctaatcccaattatagttggtgctggtctttcaggcttgattatcgttatagtgattgcttacgtaattggcagaagaaaaagttatgctggatatcagactctgtaacactaatcaatacgtgatctctgttacaaaagaaaaaagcaagtacaagttccaacatgcaatactggtcaacttaaggtatatttagttgcagtccagctctttagaatgggtggtatgggggatttcaaacttaaacaaaaaactatcaactacaaattagttgcctgactttggtttttccaaccaaggaatttaaaactgttatttttacagcaaaagatgtgcaaaatcactggattataagttctattttactgtcttgaattagtatttcagtgttttcattttagacattcagactaaaaatacaccgtttagaaaaaacaatttttgaaaaagagattttttttccctgcaggtagttgagttggaacaacatgttctaccgtggatttgtacttgctccttttgctctttttgtgtgtgtgtgtgtgtgtgtgtgtgtgtgtgtgtgtgtgatttttgtttgcaggttaacttagctactttggcattgctgcatatttgacctttgagagatataatagtagatttgaacaggggctggtattattatgttcttagcaataaatgcttttctaatgccttttgaatacatttgtatttatgtggctgtaatgacaaaagatacaaaagctttttaaaatttagagtaggtattaatcttattgtttaatcttttttttaaaaaaactggatatttcaatcttttaaattgcaatatataagactattccaactgggcatttcaatccattttttaggtgctttagagataattgcttgccagtgccaattgagggcattagtactttgtgctcataaattggcctctgtatgcagtactaaaattaatgcagatttctctttagccttccaacatttcttgttgatagtgatgtattttattattttctttttcttaagaaatgccagtgtgtcctagaacctagataacgaagtgcacttacacttataaaataacttgcatctaggctgggcgtggcggctcacgcctgtaatcccagcactttgggaggccgaagtgggtggatcacttgaggccaggagtttgagaccagcctggccaacatggtgaaaccccatctctatcagaaatacaaaaaattagctgggcgtggtggtgggcgcctgtaatcccagttactcgggaggctgaggcaggagaatcacttgaacccgggaggcagaggttgcggtgagccaagagcgcaccattgcactccagcctgggcgacaaaaacgaaactccatctcaaaacaaaacaaaacaaaacaaacaaacaaacaaaacttgcatctaaccaaaaagtcttggttttatcttaatccattaaaaagttgttctttgtttccagcttgcattgattgctacaacatcactaatttggctttcacatttaaatggttctgtgctaatcaaaactttcgttgttattattcattatggtagaatcatttttaattcacgtgctttgtgttcagttttgtggtctgagagatgtaccaattgtcaaattaccgtgtaccacctaatgtttataggagaaagcaaaatacatcagcttggtagttaacacatcaaatatttcttgctgcttctaggagaacttttttggtgtgtgttggaatggctgagcaaatattaaaattgttaatatgcagccatatatggaaggttcctgtggggttgttttttcgtgttttttttttttttgtggtgggattatgtgcctcccattcactagaaaatgagaaaattgtctgggttccaaaatattgacattgaatggatcaatacacacacacagacatatatatatatatgcacacatatataggcagttgcatgctagcatgggtatttttataacaatataactgagttatattggaattataaatattttccgtcacttaaatttgttctttgtttagcctgaaaacctttatggctcaagatcagattcctgactaacccctctcttagagctacagcgagctgcattaccagcttaaaacacttcttagggattaaatatagatgtaatttttcaaaatcgtttttaatttaaactgtgttttagtgtaaaattgttaaccttgtaagatggataatgtgtataagaatgtaggccttaactatttcacatgagtcaaaacaaagcagctttaaaaaaataattggaagcacaagtgcatggcactgactgaatgctgttaatatttctaaaagtttctacattcagattatatgcctgattcatagtaaaatacctctaataaacactgttttatagaaaacctgacttcagtgaatatttttgtattttacatgggccagtttatatactgctatttacactattatttcctatagctacatgttctttgtaccttttgtagttttatttgtattactagattcataccttgatggtaacgctctatctggttttgggtgtttttcatgttttagcatttgtataaagaaactggtccatgtaaatactttccatgttttttcttcaaatgtttaaaccactagttgatgtatggtatctttagatatttgcctgtctgtttgctcaaaattgcttctaaaacaataaagattcttttatttcttaaggcaa

SEQ ID NO: 150371 - DNA, 2089 bp, Homo sapiens
  Payload ID: 9694
  Gene Symbol: LAMP2
  Gene Name: lysosomal-associated membrane protein 2
  Uniprot ID: P13473
  ENST ID: ENST00000434600
  CDS Start-End: 197-1432
gagattggctgtaagcaagaaagagccccgcccctagtcttatgactcgcactgaagcgccgattcctggcttttgcaaggctgtggtcggtggtcatcagtgctcttgacccaggtccagcgagccttttccctggtgttgcagctgttgttgtaccgccgccgtcgccgccgtcgccgcctgctctgcggggtcatggtgtgcttccgcctcttcccggttccgggctcagggctcgttctggtctgcctagtcctgggagctgtgcggtcttatgcattggaacttaatttgacagattcagaaaatgccacttgcctttatgcaaaatggcagatgaatttcacagtacgctatgaaactacaaataaaacttataaaactgtaaccatttcagaccatggcactgtgacatataatggaagcatttgtggggatgatcagaatggtcccaaaatagcagtgcagttcggacctggcttttcctggattgcgaattttaccaaggcagcatctacttattcaattgacagcgtctcattttcctacaacactggtgataacacaacatttcctgatgctgaagataaaggaattcttactgttgatgaacttttggccatcagaattccattgaatgacctttttagatgcaatagtttatcaactttggaaaagaatgatgttgtccaacactactgggatgttcttgtacaagcttttgtccaaaatggcacagtgagcacaaatgagttcctgtgtgataaagacaaaacttcaacagtggcacccaccatacacaccactgtgccatctcctactacaacacctactccaaaggaaaaaccagaagctggaacctattcagttaataatggcaatgatacttgtctgctggctaccatggggctgcagctgaacatcactcaggataaggttgcttcagttattaacatcaaccccaatacaactcactccacaggcagctgccgttctcacactgctctacttagactcaatagcagcaccattaagtatctagactttgtctttgctgtgaaaaatgaaaaccgattttatctgaaggaagtgaacatcagcatgtatttggttaatggctccgttttcagcattgcaaataacaatctcagctactgggatgcccccctgggaagttcttatatgtgcaacaaagagcagactgtttcagtgtctggagcatttcagataaatacctttgatctaagggttcagcctttcaatgtgacacaaggaaagtattctacagctgaagaatgttctgctgactctgacctcaactttcttattcctgttgcagtgggtgtggccttgggcttccttataattgttgtctttatctcttatatgattggaagaaggaaaagtcgtactggttatcagtctgtgtaatcagttaaatctagtgtttgtttgtttttttcaattagaagttacgtttccattggctaaaagccaggacatgctgtgcaatagattgtttaagatatgcagactaacttcagtgagttcctagctaacttgggcatgagtacacttatttaagacaaaatatattaggaccaatttttttctgttttttttcttcctttgttaaagtataattaaaagaaaaattgtggcttagaattttttaagtaaataatgattttaagcccctggatccaattatgaaagcatttttgctgatgtgtaattttatatgttacagttacttatattttactactttgatgttatttgcaaaatcaaaggtgttaaagaatttaacttgcttcaggaaataaattcaagaacatagtggattcattttcattggtggcagacacgaaatttggttcatgataagacttcctttccccacctcctgatcagcattatttaaatctgtatttttctgttagttaagaaagaaatggcttcatgatattgtatttaatagcaaaagtttggctgtcttcttcattactgttaatagctactatattttaacaaggagatttctttttttgttgttgttgttctagagtttggaatatactgattatc

SEQ ID NO: 150372 - DNA, 1069 bp, Homo sapiens
  Payload ID: 9694
  Gene Symbol: LAMP2
  Gene Name: lysosomal-associated membrane protein 2
  ENST ID: ENST00000486593
  CDS Start-End: 1-776
gcaatagtttatcaactttggaaaagaatgatgttgtccaacactactgggatgttcttgtacaagcttttgtccaaaatggcacagtgagcacaaatgagttcctgtgtgataaagacaaaacttcaacagtggcacccaccatacacaccactgtgccatctcctactacaacacctactccaaaggaaaaaccagaagctggaacctattcagttaataatggcaatgatacttgtctgctggctaccatggggctgcagctgaacatcactcaggataaggttgcttcagttattaacatcaaccccaatacaactcactccacaggcagctgccgttctcacactgctctacttagactcaatagcagcaccattaagtatctagactttgtctttgctgtgaaaaatgaaaaccgattttatctgaaggaagtgaacatcagcatgtatttggttaatggctccgttttcagcattgcaaataacaatctcagctactgggatgcccccctgggaagttcttatatgtgcaacaaagagcagactgtttcagtgtctggagcatttcagataaatacctttgatctaagggttcagcctttcaatgtgacacaaggaaagtattctacagcccaagagtgttcgctggatgatgacaccattctaatcccaattatagttggtgctggtctttcaggcttgattatcgttatagtgattgcttacgtaattggcagaagaaaaagttatgctggatatcagactctgtaacactaatcaatacgtgatctctgttacaaaagaaaaaagcaagtacaagttccaacatgcaatactggtcaacttaagctcaagactgcagtgcagatgacgacaacttccttgtgcccatagcggtgggagctgccttggcaggagtacttattctagtgttgctggcttattttattggtctcaagcaccatcatgctggatatgagcaattttagaatctgcaacctgattgattatataaaaatacatgcaaataacaagattttcttacctctcagttgttgaaacac

SEQ ID NO: 150373 - DNA, 3375 bp, Homo sapiens
  Payload ID: 9695
  Gene Symbol: LAMP3
  Gene Name: lysosomal-associated membrane protein 3
  Uniprot ID: Q9UQV4
  ENST ID: ENST00000265598
  CDS Start-End: 257-1507
accacgcgcgtgcggtaaacggtcccagaggcccgggccccggcggctgcgccgagtccccgcccctccctgctccgtaggggtaggagggggccggcggagtttccctccccgcccagcggccctgggcgggcttttcggctgcttctcataagcaggtggtttcgtttctccggcacaggtaggtttctctggcaccgattcggggcctgcccggacttcgccgcacgctgcagaacctcgcccagcgcccaccatgccccggcagctcagcgcggcggccgcgctcttcgcgtccctggccgtaattttgcacgatggcagtcaaatgagagcaaaagcatttccagaaaccagagattattctcaacctactgcagcagcaacagtacaggacataaaaaaacctgtccagcaaccagctaagcaagcacctcaccaaactttagcagcaagattcatggatggtcatatcacctttcaaacagcggccacagtaaaaattccaacaactaccccagcgactacaaaaaacactgcaaccaccagcccaattacctacaccctggtcacaacccaggccacacccaacaactcacacacagctcctccagttactgaagttacagtcggccctagcttagccccttattcactgccacccaccatcaccccaccagctcatacaactggaaccagttcatcaaccgtcagccacacaactgggaacaccactcaacccagtaaccagaccacccttccagcaactttatcgatagcactgcacaaaagcacaaccggtcagaagcctgttcaacccacccatgccccaggaacaacggcagctgcccacaataccacccgcacagctgcacctgcctccacggttcctgggcccacccttgcacctcagccatcgtcagtcaagactggaatttatcaggttctaaacggaagcagactctgtataaaagcagagatggggatacagctgattgttcaagacaaggagtcggttttttcacctcggagatacttcaacatcgaccccaacgcaacgcaagcctctgggaactgtggcacccgaaaatccaaccttctgttgaattttcagggcggatttgtgaatctcacatttaccaaggatgaagaatcatattatatcagtgaagtgggagcctatttgaccgtctcagatccagagacaatttaccaaggaatcaaacatgcggtggtgatgttccagacagcagtcgggcattccttcaagtgcgtgagtgaacagagcctccagttgtcagcccacctgcaggtgaaaacaaccgatgtccaacttcaagcctttgattttgaagatgaccactttggaaatgtggatgagtgctcgtctgactacacaattgtgcttcctgtgattggggccatcgtggttggtctctgccttatgggtatgggtgtctataaaatccgcctaaggtgtcaatcatctggataccagagaatctaattgttgcccggggggaatgaaaataatggaatttagagaactctttcatcccttccaggatggatgttgggaaattccctcagagtgtgggtccttcaaacaatgtaaaccaccatcttctattcaaatgaagtgagtcatgtgtgatttaagttcaggcagcacatcaatttctaaatactttttgtttattttatgaaagatatagtgagctgtttattttctagtttcctttagaatattttagccactcaaagtcaacatttgagatatgttgaattaacataatatatgtaaagtagaataagccttcaaattataaaccaagggtcaattgtaactaatactactgtgtgtgcattgaagattttattttacccttgatcttaacaaagcctttgctttgttatcaaatggactttcagtgcttttactatctgtgttttatggtttcatgtaacatacatattcctggtgtagcacttaactccttttccactttaaatttgtttttgttttttgagacggagtttcactcttgtcacccaggctggagtacagtggcacgatctcggcttatggcaacctccgcctcccgggttcaagtgattctcctgcttcagcttcccgagtagctgggattacaggcacacactaccacgcctggctaatttttgtatttttattatagacggggtttcaccatgttggccagactggtcttgaactcttgacctcaggtgatccacccacctcagcctcccaaagtgctgggattacaggcatgagccattgcgcccggccttaaatgttttttttaatcatcaaaaagaacaacatatctcaggttgtctaagtgtttttatgtaaaaccaacaaaaagaacaaatcagcttatattttttatcttgatgactcctgctccagaatcgctagactaagaattaggtggctacagatggtagaactaaacaataagcaagagacaataataatggcccttaattattaacaaagtgccagagtctaggctaagcactttatctatatctcatttcattctcacaacttataggtgaatgagtaaactgagacttaagggaactgaatcacttaaatgtcacctggctaactgatggcagagccagagcttgaattcatgttggtctgacatcaaggtctttggtcttctccctacaccaagttacctacaagaacaatgacaccacactctgcctgaaggctcacacctcataccagcatacgctcaccttacagggaaatgggtttatccaggatcatgagacattagggtagatgaaaggagagctttgcagataacaaaatagcctatccttaataaatcctccactctctggaaggagactgaggggctttgtaaaacattagtcagttgctcatttttatgggattgcttagctgggctgtaaagatgaaggcatcaaataaactcaaagtatttttaaatttttttgataatagagaaacttcgctaaccaactgttctttcttgagtgtatagccccatcttgtggtaacttgctgcttctgcacttcatatccatatttcctattgttcactttattctgtagagcagcctgccaagaattttatttctgctgttttttttgctgctaaagaaaggaactaagtcaggatgttaacagaaaagtccacataaccctagaattcttagtcaaggaataattcaagtcagcctagagaccatgttgactttcctcatgtgtttccttatgactcagtaagttggcaaggtcctgactttagtcttaataaaacattgaattgtagtaaaggtttttgtaataaaaacttactttggaga

SEQ ID NO: 150374 - DNA, 1453 bp, Homo sapiens
  Payload ID: 9695
  Gene Symbol: LAMP3
  Gene Name: lysosomal-associated membrane protein 3
  ENST ID: ENST00000466939
  CDS Start-End: 119-1297
aactgtctccgtccctaccgcccggctaacatgctcaagcagggggcgcggtggcccttgcttgtaacatgaatgctaggaatgttagggaagagtaattttgcacgatggcagtcaaatgagagcaaaagcatttccagaaaccagagattattctcaacctactgcagcagcaacagtacaggacataaaaaaacctgtccagcaaccagctaagcaagcacctcaccaaactttagcagcaagattcatggatggtcatatcacctttcaaacagcggccacagtaaaaattccaacaactaccccagcgactacaaaaaacactgcaaccaccagcccaattacctacaccctggtcacaacccaggccacacccaacaactcacacacagctcctccagttactgaagttacagtcggccctagcttagccccttattcactgccacccaccatcaccccaccagctcatacaactggaaccagttcatcaaccgtcagccacacaactgggaacaccactcaacccagtaaccagaccacccttccagcaactttatcgatagcactgcacaaaagcacaaccggtcagaagcctgttcaacccacccatgccccaggaacaacggcagctgcccacaataccacccgcacagctgcacctgcctccacggttcctgggcccacccttgcacctcagccatcgtcagtcaagactggaatttatcaggttctaaacggaagcagactctgtataaaagcagagatggggatacagctgattgttcaagacaaggagtcggttttttcacctcggagatacttcaacatcgaccccaacgcaacgcaagcctctgggaactgtggcacccgaaaatccaaccttctgttgaattttcagggcggatttgtgaatctcacatttaccaaggatgaagaatcatattatatcagtgaagtgggagcctatttgaccgtctcagatccagagacaatttaccaaggaatcaaacatgcggtggtgatgttccagacagcagtcgggcattccttcaagtgcgtgagtgaacagagcctccagttgtcagcccacctgcaggtgaaaacaaccgatgtccaacttcaagcctttgattttgaagatgaccactttggaaatgtggatgagtgctcgtctgactacacaattgtgcttcctgtgattggggccatcgtggttggtctctgccttatgggtatgggtgtctataaaatccgcctaaggtgtcaatcatctggataccagagaatctaattgttgcccggggggaatgaaaataatggaatttagagaactctttcatcccttccaggatggatgttgggaaattccctcagagtgtgggtccttcaaacaatgtaaaccaccatcttctattcaaatgaagtgagtcatgtgtgatttaagttc

SEQ ID NO: 150375 - DNA, 835 bp, Homo sapiens
  Payload ID: 9695
  Gene Symbol: LAMP3
  Gene Name: lysosomal-associated membrane protein 3
  ENST ID: ENST00000476015
  CDS Start-End: 296-835
ggagtcggcagcgcgagctcccagccagacctagcgcctctgggctgtgctcctgttgcttcccgcaaaccgcggtcctggcgaggcctgggcgtggagcgcggctgccgcagactccctgggaagacatggagtcagggtgcttaggggtttttaggctcctgctcgcctagtggctggctttctcccggctgagaagcgtctctgggttcccagaaaggtaggtttctctggcaccgattcggggcctgcccggacttcgccgcacgctgcagaacctcgcccagcgcccaccatgccccggcagctcagcgcggcggccgcgctcttcgcgtccctggccgtaattttgcacgatggcagtcaaatgagagcaaaagcatttccagaaaccagagattattctcaacctactgcagcagcaacagtacaggacataaaaaaacctgtccagcaaccagctaagcaagcacctcaccaaactttagcagcaagattcatggatggtcatatcacctttcaaacagcggccacagtaaaaattccaacaactaccccagcgactacaaaaaacactgcaaccaccagcccaattacctacaccctggtcacaacccaggccacacccaacaactcacacacagctcctccagttactgaagttacagtcggccctagcttagccccttattcactgccacccaccatcaccccaccagctcatacaactggaaccagttcatcaaccgtcagccacacaactgggaacaccactcaacccagtaaccagaccacccttccagcaactttatcgatagcactgcacaaaagcaca

SEQ ID NO: 150376 - DNA, 829 bp, Homo sapiens
  Payload ID: 9695
  Gene Symbol: LAMP3
  Gene Name: lysosomal-associated membrane protein 3
  ENST ID: ENST00000470251
  CDS Start-End: 401-829
ggcccgggccccggcggctgcgccgagtccccgcccctccctgctccgtaggggtaggagggggccggcggagtttccctccccgcccagcggccctgggcgggcttttcggctgcttctcataagcaggtggtttcgtttctccggcacaggtaggtttctctggcaccgattcggggcctgcccggacttcgccgcacgctgcagaacctcgcccagcgcccaccatgccccggcagctcagcgcggcggccgcgctcttcgcgtccctggccgggctcatcagcacatggtaattaacaatgatggacatggcttcctggcactctctgcatgccaggcactgttcgcagtgctttaatccacaaaacagcttttaattttgcacgatggcagtcaaatgagagcaaaagcatttccagaaaccagagattattctcaacctactgcagcagcaacagtacaggacataaaaaaacctgtccagcaaccagctaagcaagcacctcaccaaactttagcagcaagattcatggatggtcatatcacctttcaaacagcggccacagtaaaaattccaacaactaccccagcgactacaaaaaacactgcaaccaccagcccaattacctacaccctggtcacaacccaggccacacccaacaactcacacacagctcctccagttactgaagttacagtcggccctagcttagccccttattcactgccacccaccatcaccccaccagctcatacaactggaaccagttcatcaaccgtcagccacacaactgggaacaccactcaacccagtaaccagaccacc

SEQ ID NO: 150377 - DNA, 2039 bp, Homo sapiens
  Payload ID: 9696
  Gene Symbol: LAMP5
  Gene Name: lysosomal-associated membrane protein family, member 5
  Uniprot ID: Q9UJQ1
  ENST ID: ENST00000246070
  CDS Start-End: 493-1335
tgcgttttcagaagacagtactccagtgataaggtatctacaccacttaataactgtacctggtaaggagatttaataaggctgagggtggtattaagtttctcagaacagactcatctttgcggatgcagttgcagaacaggaaacagacccagggagaagtttagtccccccagatctcattggccctccgcacaagccaagccacagccactcctgccacacaatcggattgctttcagcactcgcagccgtggaccgccgtgcggtcctttcctccgcagtgagccgatttgctctgccagcagctgtcggtgccgcgctcgacaccgagtcctagctaggcgctcacagaatacgcgctccctccctcccccttctctgtcccccgcctctcgctcaccccggcccactccagcggcgactttgagggattccctctctggcggcctctgcagcagcacagccggcctcattcggggcactgcgagtatggatctccaaggaagaggggtccccagcatcgacagacttcgagttctcctgatgttgttccatacaatggctcaaatcatggcagaacaagaagtggaaaatctctcaggcctttccactaaccctgaaaaagatatatttgtggtgcgggaaaatgggacgacgtgtctcatggcagagtttgcagccaaatttattgtaccttatgatgtgtgggccagcaactacgtagatctgatcacagaacaggccgatatcgcattgacccggggagctgaggtgaagggccgctgtggccacagccagtcggagctgcaagtgttctgggtggatcgcgcatatgcactcaaaatgctctttgtaaaggaaagccacaacatgtccaagggacctgaggcgacttggaggctgagcaaagtgcagtttgtctacgactcctcggagaaaacccacttcaaagacgcagtcagtgctgggaagcacacagccaactcgcaccacctctctgccttggtcacccccgctgggaagtcctatgagtgtcaagctcaacaaaccatttcactggcctctagtgatccgcagaagacggtcaccatgatcctgtctgcggtccacatccaaccttttgacattatctcagattttgtcttcagtgaagagcataaatgcccagtggatgagcgggagcaactggaagaaaccttgcccctgattttggggctcatcttgggcctcgtcatcatggtaacactcgcgatttaccacgtccaccacaaaatgactgccaaccaggtgcagatccctcgggacagatcccagtataagcacatgggctagaggccgttaggcaggcaccccctattcctgctcccccaactggatcaggtagaacaacaaaagcacttttccatcttgtacacgagatacaccaacatagctacaatcaaacaggcctgggtatctgaggcttgcttggcttgtgtccatgcttaaacccacggaagggggagactctttcggatttgtagggtgaaatggcaattattctctccatgctggggaggaggggaggagggtctcagacagctttcgtgctcatggtggcttggctttgactctccaaagagcaataaatgccacttggagctgtatctggccccaaagtttagggattgaaaacatgcttctttgaggaggaaacccctttaggttcagaagaatatggggtgctttgctcccttggacacagctggcttatcctatacagttgtcaatgcacacagaatacaacctcatgctccctgcagcaagacccctgaaagtgattcatgcttctggctggcattctgcatgtttagtgattgtcttgggaatgtttcactgctacccgcatccagcgactgcagcaccagaaaacgactaatgtaactatgcagagttgtttggacttcttcctgtgccaggtccaagtcgggggacctgaagaatcaatctgtgtgagtctgtttttcaaaatgaaataaaacacactattctctggc

SEQ ID NO: 150378 - DNA, 1309 bp, Homo sapiens
  Payload ID: 9696
  Gene Symbol: LAMP5
  Gene Name: lysosomal-associated membrane protein family, member 5
  Uniprot ID: Q9UJQ1
  ENST ID: ENST00000427562
  CDS Start-End: 496-1206
agatgcgttttcagaagacagtactccagtgataaggtatctacaccacttaataactgtacctggtaaggagatttaataaggctgagggtggtattaagtttctcagaacagactcatctttgcggatgcagttgcagaacaggaaacagacccagggagaagtttagtccccccagatctcattggccctccgcacaagccaagccacagccactcctgccacacaatcggattgctttcagcactcgcagccgtggaccgccgtgcggtcctttcctccgcagtgagccgatttgctctgccagcagctgtcggtgccgcgctcgacaccgagtcctagctaggcgctcacagaatacgcgctccctccctcccccttctctgtcccccgcctctcgctcaccccggcccactccagcggcgactttgagggattccctctctggcggcctctgcagcagcacagccggcctcattcggggcactgcgagtatggatctccaaggaagaggggtccccagcatcgacagacttcgagttctcctgatgttgttccatacaatggctcaaatcatggcagaacaagaagtggaaaatctctcaggcctttccactaaccctgaaaaagatatatttgtggtgcgggaaaatgggacgacgtgtctcatggcagagtttgcagccaaatttattgtaccttatgatgtgtgggccagcaactacgtagatgaaagccacaacatgtccaagggacctgaggcgacttggaggctgagcaaagtgcagtttgtctacgactcctcggagaaaacccacttcaaagacgcagtcagtgctgggaagcacacagccaactcgcaccacctctctgccttggtcacccccgctgggaagtcctatgagtgtcaagctcaacaaaccatttcactggcctctagtgatccgcagaagacggtcaccatgatcctgtctgcggtccacatccaaccttttgacattatctcagattttgtcttcagtgaagagcataaatgcccagtggatgagcgggagcaactggaagaaaccttgcccctgattttggggctcatcttgggcctcgtcatcatggtaacactcgcgatttaccacgtccaccacaaaatgactgccaaccaggtgcagatccctcgggacagatcccagtataagcacatgggctagaggccgttaggcaggcaccccctattcctgctcccccaactggatcaggtagaacaacaaaagcacttttccatcttgtacacgagatacaccaacatagcta

SEQ ID NO: 150379 - DNA, 1530 bp, Homo sapiens
  Payload ID: 9697
  Gene Symbol: LYZ
  Gene Name: lysozyme
  Uniprot ID: P61626
  ENST ID: ENST00000261267
  CDS Start-End: 69-515
gttaaaagatgttaaatactggggccagctcaccctggtcagcctagcactctgacctagcagtcaacatgaaggctctcattgttctggggcttgtcctcctttctgttacggtccagggcaaggtctttgaaaggtgtgagttggccagaactctgaaaagattgggaatggatggctacaggggaatcagcctagcaaactggatgtgtttggccaaatgggagagtggttacaacacacgagctacaaactacaatgctggagacagaagcactgattatgggatatttcagatcaatagccgctactggtgtaatgatggcaaaaccccaggagcagttaatgcctgtcatttatcctgcagtgctttgctgcaagataacatcgctgatgctgtagcttgtgcaaagagggttgtccgtgatccacaaggcattagagcatgggtggcatggagaaatcgttgtcaaaacagagatgtccgtcagtatgttcaaggttgtggagtgtaactccagaattttccttcttcagctcattttgtctctctcacattaagggagtaggaattaagtgaaaggtcacactaccattatttccccttcaaacaaataatatttttacagaagcaggagcaaaatatggcctttcttctaagagatataatgttcactaatgtggttattttacattaagcctacaacatttttcagtttgcaaatagaactaatactggtgaaaatttacctaaaaccttggttatcaaatacatctccagtacattccgttctttttttttttgagacagtctcgctctgtcgcccaggctggagtgcagtggcgcaatctcggctcactgcaacctccacctcccgggttcacgccattctcctgcctcagcctcccgagtagctgggattacgggcgcccgccaccacgcccggctaattttttgtatttttagtagagacagggtttcaccgtgttagccaggatggtctcgatctcctgaccttgtgatccacccacctcggcctcccaaagtgctgggattacaggcgtgagccactgcgcccggccacattcagttcttatcaaagaaataacccagacttaatcttgaatgatacgattatgcccaatattaagtaaaaaatataagaaaaggttatcttaaatagatcttaggcaaaataccagctgatgaaggcatctgatgccttcatctgttcagtcatctccaaaaacagtaaaaataaccactttttgttgggcaatatgaaatttttaaaggagtagaataccaaatgatagaaacagactgcctgaattgagaattttgatttcttaaagtgtgtttctttctaaattgctgttccttaatttgattaatttaattcatgtattatgattaaatctgaggcagatgagcttacaagtattgaaataattactaattaatcacaaatgtgaagttatgcatgatgtaaaaaatacaaacattctaattaaaggctttgcaacaca

SEQ ID NO: 150380 - DNA, 669 bp, Homo sapiens
  Payload ID: 9697
  Gene Symbol: LYZ
  Gene Name: lysozyme
  ENST ID: ENST00000549690
  CDS Start-End: 26-439
ctagcactctgacctagcagtcaacatgaaggctctcattgttctggggcttgtcctcctttctgttacggtccagggcaaggtctttgaaaggtgtgagttggccagaactctgaaaagattgggaatggatggctacaggggaatcagcctagcaaactggatgtgtttggccaaatgggagagtggttacaacacacgagctacaaactacaatgctggagacagaagcactgattatgggatatttcagatcaatagccgctactggtgtaatgatggcaaaaccccaggagcagttaatgcctgtcatttatcctgcagtgggtggcatggagaaatcgttgtcaaaacagagatgtccgtcagtatgttcaaggttgtggagtgtaactccagaattttccttcttcagctcattttgtctctctcacattaagggagtaggaattaagtgaaaggtcacactaccattatttccccttcaaacaaataatatttttacagaagcaggagcaaaatatggcctttcttctaagagatataatgttcactaatgtggttattttacattaagcctacaacatttttcagtttgcaaatagaactaatactggtgaaaatttacctaaaaccttggttatcaaatacatctccagtacattccgt

SEQ ID NO: 150381 - DNA, 558 bp, Homo sapiens
  Payload ID: 9697
  Gene Symbol: LYZ
  Gene Name: lysozyme
  ENST ID: ENST00000548839
  CDS Start-End: 24-338
agcactctgacctagcagtcaacatgaaggctctcattgttctggggcttgtcctcctttctgttacggtccagggcaaggtctttgaaaggtgtgagttggccagaactctgaaaagattgggaatggatggctacaggggaatcagcctagcaaactggatgtgtttggccaaatgggagagtggttacaacacacgagctacaaactacaatgctggagacagaagcactgattatgggatatttcagatcaatagccgctactggtgtaatgatggcaaaaccccaggagcagttaatgcctgtcatttatcctgcagtggtaagacaagctaatatttgaccaatctggttatacttacaagaattgagactcaatacaaatgaaaaagccttgaaaggttcatgagggacctagaaaaactacatctcaacttccagaaagtcattattattttcctcataattccctgagtaagaaattaaagaagtggtatcataaaaggttgatgttttttaatatacagaagtttctggaatgacctattaatttact

SEQ ID NO: 150382 - DNA, 990 bp, Homo sapiens
  Payload ID: 9698
  Gene Symbol: LYG1
  Gene Name: lysozyme G-like 1
  Uniprot ID: Q8N1E2
  ENST ID: ENST00000308528
  CDS Start-End: 251-835
ataatttatgagatgtcataaatctctccaaaataggatgagatgaacacttttaacaagagaacaggactctatataaatcgctgtgggctcaccacctctaaggaggagcactgactgaagacagaaaaattgatgaactgaagaagacatggtccattatgccttacaaacttacacagtgctttgggaattccaaagtactcagtggagagaggtgtttcaggagccgtagagccagatcgtcatcatgtctgcattgtggctgctgctgggcctccttgccctgatggacttgtctgaaagcagcaactggggatgctatggaaacatccaaagcctggacacccctggagcatcttgtgggattggaagacgtcacggcctgaactactgtggagttcgtgcttctgaaaggctggctgaaatagacatgccatacctcctgaaatatcaacccatgatgcaaaccattggccaaaagtactgcatggatcctgccgtgatcgctggtgtcttgtccaggaagtctcccggtgacaaaattctggtcaacatgggcgataggactagcatggtgcaggaccctggctctcaagctcccacatcctggattagtgagtctcaggtttcccagacaactgaagttctgactactagaatcaaagaaatccagaggaggtttccaacctggacccctgaccagtacctgagaggtggactctgtgcctacagtgggggtgctggctatgtccgaagcagccaggacctgagctgtgacttctgcaatgatgtccttgcacgagccaagtacctcaagagacatggcttctaacatctcagatgaaacccaagaccatgatcacatatgcagcctcaaatgttacacagataaaactagccaagggcacctgtaactgggaatctgagtttgacctaaaagtcattaaaataacatgaatcacattaaaggaagaattttgacctgca

SEQ ID NO: 150383 - DNA, 1038 bp, Homo sapiens
  Payload ID: 9698
  Gene Symbol: LYG1
  Gene Name: lysozyme G-like 1
  Uniprot ID: Q8N1E2
  ENST ID: ENST00000409448
  CDS Start-End: 318-902
gttgctatgttgcccaggctggtcttgaagtgccttgacctcctaaagtgttggaaccacagacgtgagccactccacccagcctaaaacttcatcttctttggatgagatgaacacttttaacaagagaacaggactctatataaatcgctgtgggctcaccacctctaaggaggagcactgactgaagacagaaaaattgatgaactgaagaagacatggtccattatgccttacaaacttacacagtgctttgggaattccaaagtactcagtggagagaggtgtttcaggagccgtagagccagatcgtcatcatgtctgcattgtggctgctgctgggcctccttgccctgatggacttgtctgaaagcagcaactggggatgctatggaaacatccaaagcctggacacccctggagcatcttgtgggattggaagacgtcacggcctgaactactgtggagttcgtgcttctgaaaggctggctgaaatagacatgccatacctcctgaaatatcaacccatgatgcaaaccattggccaaaagtactgcatggatcctgccgtgatcgctggtgtcttgtccaggaagtctcccggtgacaaaattctggtcaacatgggcgataggactagcatggtgcaggaccctggctctcaagctcccacatcctggattagtgagtctcaggtttcccagacaactgaagttctgactactagaatcaaagaaatccagaggaggtttccaacctggacccctgaccagtacctgagaggtggactctgtgcctacagtgggggtgctggctatgtccgaagcagccaggacctgagctgtgacttctgcaatgatgtccttgcacgagccaagtacctcaagagacatggcttctaacatctcagatgaaacccaagaccatgatcacatatgcagcctcaaatgttacacagataaaactagccaagggcacctgtaactgggaatctgagtttgacctaaaagtcattaaaataacatgaatcacattaaa

SEQ ID NO: 150384 - DNA, 862 bp, Homo sapiens
  Payload ID: 9699
  Gene Symbol: LYG2
  Gene Name: lysozyme G-like 2
  Uniprot ID: Q86SG7
  ENST ID: ENST00000333017
  CDS Start-End: 114-752
gtaaaagcttgaagtgcagtttgctgctgagtacagaagacctttgcaaacagagaggggagattttctctgtaaggttgcaaacaaggtcctggaagataagattccccgccatgttatcctccgtggtgttttggggactaattgccctcattggcacttccaggggctcataccccttcagtcactcaatgaagcctcacctacatccacgcctgtaccacggctgctatggggacatcatgaccatgaagacctctggggccacttgtgatgcaaacagtgtgatgaactgcgggatccgtggttctgaaatgtttgctgagatggatttgagggccataaaaccttaccagactctgatcaaagaagtcgggcagagacattgcgtggaccctgctgtcatcgcagccatcatctccagggaaagccatggcggatctgtcctgcaagacggctgggaccacaggggacttaaatttggcttgatgcagcttgataaacaaacgtaccaccctgtcggtgcctgggatagcaaagagcacctttcacaggctactgggattctaacagagagaattaaggcaatccagaaaaaattccccacgtggagtgttgctcagcacctcaaaggtggtctctcagcttttaagtcaggaattgaagcgattgccaccccatcggacatagacaatgacttcgtcaatgatatcattgctcgagctaagttctataaaagacaaagcttctaggcaaagctctgtgggtgggccaggttggcagagtgctcagatggccgcctttgagagttttacgtgaatgtgttgtatacaacactggcaaagaaatgattaaaatcatg

SEQ ID NO: 150385 - DNA, 878 bp, Homo sapiens
  Payload ID: 9699
  Gene Symbol: LYG2
  Gene Name: lysozyme G-like 2
  ENST ID: ENST00000409679
  CDS Start-End: 146-694
agcctatgttacaggacaaaggccgtcgctttgtaaaagcttgaagtgcagtttgctgctgagtacagaagacctttgcaaacagagaggggagattttctctgtaaggttgcaaacaaggtcctggaagataagattccccgccatgttatcctccgtggtgttttggggactaattgccctcattggcacttccaggggctcataccccttcagtcactcaatgaagcctcacctacatccacgcctgtaccacggctgctatggggacatcatgaccatgaagacctctggggccacttgtgatgcaaacagtgtgatgaactgcgggatccgtggttctgaaatgtttgctgagatggatttgagggccataaaaccttaccagactctgatcaaagaagtcgggcagagacattgcgtggaccctgctgtcatcgcagccatcatctccagggaaagccatggcggatctgtcctgcaagacggctgggaccacaggggacttaaatttggcttgatgcagcttgataaacaaacgtaccaccctgtcggtgcctgggatagcaaagagcacctttcacaggctactgggattctaacagagagaattaaggcaatccagaaaaaattccccacgtggagtgttgctcagcacctcaaaggtaggctgtattctgagtactttgtttaaatgagcaatgaatgagaccactgaaggccagtgtgacccgagactccctgggagcatttccacggggtcagcagtggccctgggaggagctgtctagaggctgcatttgcattccctgaaccactgagttactttgagaggtcctccatcctcaacctccatttcctcttctgcagaatgttgg

SEQ ID NO: 150386 - DNA, 778 bp, Homo sapiens
  Payload ID: 9699
  Gene Symbol: LYG2
  Gene Name: lysozyme G-like 2
  Uniprot ID: Q86SG7
  ENST ID: ENST00000409238
  CDS Start-End: 22-660
tggaagataagattccccgccatgttatcctccgtggtgttttggggactaattgccctcattggcacttccaggggctcataccccttcagtcactcaatgaagcctcacctacatccacgcctgtaccacggctgctatggggacatcatgaccatgaagacctctggggccacttgtgatgcaaacagtgtgatgaactgcgggatccgtggttctgaaatgtttgctgagatggatttgagggccataaaaccttaccagactctgatcaaagaagtcgggcagagacattgcgtggaccctgctgtcatcgcagccatcatctccagggaaagccatggcggatctgtcctgcaagacggctgggaccacaggggacttaaatttggcttgatgcagcttgataaacaaacgtaccaccctgtcggtgcctgggatagcaaagagcacctttcacaggctactgggattctaacagagagaattaaggcaatccagaaaaaattccccacgtggagtgttgctcagcacctcaaaggtggtctctcagcttttaagtcaggaattgaagcgattgccaccccatcggacatagacaatgacttcgtcaatgatatcattgctcgagctaagttctataaaagacaaagcttctaggcaaagctctgtgggtgggccaggttggcagagtgctcagatggccgcctttgagagttttacgtgaatgtgttgtatacaacactggcaaagaaatgattaaaatcatgaaagaaaa

SEQ ID NO: 150387 - DNA, 766 bp, Homo sapiens
  Payload ID: 9699
  Gene Symbol: LYG2
  Gene Name: lysozyme G-like 2
  Uniprot ID: Q86SG7
  ENST ID: ENST00000423800
  CDS Start-End: 22-558
tggaagataagattccccgccatgttatcctccgtggtgttttggggactaattgccctcattggcacttccaggggctcataccccttcagtcactcaatgaagcctcacctacatccacgcctgtaccacggctgctatggggacatcatgaccatgaagacctctggggccacttgtgatgcaaacagtgtgatgaactgcgggatccgtggttctgaaatgtttgctgagatggatttgagggccataaaaccttaccagactctgatcaaagaagtcgggcagagacattgcgtggaccctgctgtcatcgcagccatcatctccagggaaagccatggcggatctgtcctgcaagacggctgggaccacaggggacttaaatttggcttgatgcagcttgataaacaaacgtaccaccctgtcggtgcctgggatagcaaagagcacctttcacaggctactgggattctaacagagagaattaaggcaatccagaaaaaattccccacgtggagtgttgctcagcacctcaaaggttttttcctgttataagaaactgtcaacaactttccaaattgtctgaacaatgttactctgtggtctctcagcttttaagtcaggaattgaagcgattgccaccccatcggacatagacaatgacttcgtcaatgatatcattgctcgagctaagttctataaaagacaaagcttctaggcaaagctctgtgggtgggccaggttggcagagtgctcagatggc

SEQ ID NO: 150388 - DNA, 682 bp, Homo sapiens
  Payload ID: 9699
  Gene Symbol: LYG2
  Gene Name: lysozyme G-like 2
  ENST ID: ENST00000423306
  CDS Start-End: 174-682
acaggacgaaggtaagaaaagccagcctatgttacaggacaaaggccgtcgctttgtaaaagcttgaagtgcagtttgctgctgagtacagaagacctttgcaaacagagaggggagattttctctgtaaggttgcaaacaagagcaggtcctggaagataagattccccgccatgttatcctccgtggtgttttggggactaattgccctcattggcacttccaggggctcataccccttcagtcactcaatgaagcctcacctacatccacgcctgtaccacggctgctatggggacatcatgaccatgaagacctctggggccacttgtgatgcaaacagtgtgatgaactgcgggatccgtggttctgaaatgtttgctgagatggatttgagggccataaaaccttaccagactctgatcaaagaagtcgggcagagacattgcgtggaccctgctgtcatcgcagccatcatctccagggaaagccatggcggatctgtcctgcaagacggctgggaccacaggggacttaaatttggcttgatgcagcttgataaacaaacgtaccaccctgtcggtgcctgggatagcaaagagcacctttcacaggctactgggattctaacagagagaattaaggcaatccagaaaaaattccccacgtggagtgttgctca

SEQ ID NO: 150389 - DNA, 650 bp, Homo sapiens
  Payload ID: 9699
  Gene Symbol: LYG2
  Gene Name: lysozyme G-like 2
  Uniprot ID: Q86SG7
  ENST ID: ENST00000626374
  CDS Start-End: 114-650
gtaaaagcttgaagtgcagtttgctgctgagtacagaagacctttgcaaacagagaggggagattttctctgtaaggttgcaaacaaggtcctggaagataagattccccgccatgttatcctccgtggtgttttggggactaattgccctcattggcacttccaggggctcataccccttcagtcactcaatgaagcctcacctacatccacgcctgtaccacggctgctatggggacatcatgaccatgaagacctctggggccacttgtgatgcaaacagtgtgatgaactgcgggatccgtggttctgaaatgtttgctgagatggatttgagggccataaaaccttaccagactctgatcaaagaagtcgggcagagacattgcgtggaccctgctgtcatcgcagccatcatctccagggaaagccatggcggatctgtcctgcaagacggctgggaccacaggggacttaaatttggcttgatgcagcttgataaacaaacgtaccaccctgtcggtgcctgggatagcaaagagcacctttcacaggctactgggattctaacagagagaattaaggcaatccagaaaaaattccccacgtggagtgttgctcagcacctcaaaggttttttcctgttataa

SEQ ID NO: 150390 - DNA, 815 bp, Homo sapiens
  Payload ID: 9700
  Gene Symbol: LYZL1
  Gene Name: lysozyme-like 1
  Uniprot ID: Q6UWQ5
  ENST ID: ENST00000375500
  CDS Start-End: 58-642
tcttgagctaggaaaggattactcgcgcctcgttagaatcagacatggcttcaggggatgcaggacgctcccctgagctgcctgtcaccgactaagtggagcagtgtttcttccgcagactcaactgagaagtcagcctctggggcaggcaccaggaatctgccttttcagttctgtctccggcaggctttgaggatgaaggctgcgggcattctgaccctcattggctgcctggtcacaggcgccgagtccaaaatctacactcgttgcaaactggcaaaaatattctcgagggctggcctggacaattactggggcttcagccttggaaactggatctgcatggcatattatgagagcggctacaacaccacagcccagacggtcctggatgacggcagcatcgactatggcatcttccagatcaacagcttcgcgtggtgcagacgcggaaagctgaaggagaacaaccactgccatgtcgcctgctcagccttgatcactgatgacctcacagatgcaattatctgtgccaggaaaattgttaaagagacacaaggaatgaactattggcaaggctggaagaaacattgtgagggcagagacctgtccgagtggaaaaaaggctgtgaggtttcctaaactggaactggacccaggatgctttgcagcaacgccctaggatttgcagtgaatgtccaaatgcctgtgtcatcttgtcccgtttcctcccaatattccttctcaaacttggagagggaaaattaagctatacttttaagaaaataaatatttccatttaaatgtcttcaccc

SEQ ID NO: 150391 - DNA, 637 bp, Homo sapiens
  Payload ID: 9700
  Gene Symbol: LYZL1
  Gene Name: lysozyme-like 1
  ENST ID: ENST00000494304
  CDS Start-End: 1-321
aaaatctacactcgttgcaaactggcaaaaatattctcgagggctggcctggacaattactggggcttcagccttggaaactggatctgcatggcatattatgagagcggctacaacaccacagcccagacggtcctggatgacggcagcatcgactatggcatcttccagatcaacagcttcgcgtggtgcagacgcggaaagctgaaggagaacaaccactgccatgtcgcctgctcagccttgatcactgatgacctcacagatgcaattatctgtgccaggaaaattgttaaagagacacaaggaatgaactattgaagtcctcagcacatgttcttcatggaggtcatctttccctggactgcttggctactttagaagtcaaatcaagactagaagtatgaaagccaatcacaatttcccaacaattaggatccatcattcaccatttggttggtccctgctgctaagaattccaaactacaagggaaaaagttaaactcagctagatttccctgcctgctcaagaccacaaccccagtggcaacataattcttggtgaggatgaaaaaacgaaatctatacttgccttgagaaagcattcatgcaaaataaagcccagattcataagtaa

SEQ ID NO: 150392 - DNA, 818 bp, Homo sapiens
  Payload ID: 9701
  Gene Symbol: LYZL2
  Gene Name: lysozyme-like 2
  Uniprot ID: Q7Z4W2
  ENST ID: ENST00000375318
  CDS Start-End: 58-642
tcttgagctaggaaaggattactcgagccttgttagaatcagacatggcttcaggggatgcaggacgctcccctgagctgcctgtcaccgactaagtggagcagtgtttcttccgcagactcaactgagaagtcagcctctgcggcaggcaccaggaatctgccttttcagttctgtctccggcaggctttgaggatgaaggctgcgggcattctgaccctcattggctgcctggtcacaggcgccgagtccaaaatctacactcgttgcaaactggcaaaaatattctcgagggctggcctggacaattactggggcttcagccttggaaactggatctgcatggcgtattatgagagcggctacaacaccacagcccagacggtcctggatgacggcagcatcgactacggcatcttccagatcaacagcttcgcgtggtgcagacgcggaaagctgaaggagaacaaccactgccacgtcgcctgctcagccttggtcactgatgacctcacagatgcgattatctgtgccaagaaaattgttaaagagacacaaggaatgaactattggcaaggctggaagaaacactgtgaggggagagacctgtccgactggaaaaaagactgtgaggtttcctaaactggaactggacccaggatgctttgcagcaacgccctagggtttgcagtgaatgtccaaatgcctgtgtcatcttgtcccgtttcctcccaatattccttctcaaacttggagagggaaaattaagctatacttttaagaaaataaatatttccatttaaatgtcttcaccctga

SEQ ID NO: 150393 - DNA, 904 bp, Homo sapiens
  Payload ID: 9702
  Gene Symbol: LYZL4
  Gene Name: lysozyme-like 4
  Uniprot ID: Q96KX0
  ENST ID: ENST00000287748
  CDS Start-End: 277-717
gtcatggagaactcttgggtgcagacaagtggatgattaatgaagtagcatctgaaaaacccaaggaaccaaatgtaggtggagcaacttccctgcaacacacgtcgaagctgctgcagtggctgttcttcccctccccttggaaaggcaccaaaagccagcctttggaagggctggtggactgtgcccttctttcccttcagagaaccagtgtccctgtgactccacccactcatctggccaccgttgccctgacctgccaggagcctggagaagatgaaggcatccgtggttctctccctccttggctacctggtggttccaagtggtgcttacatcttggggcgttgcacagtggctaagaaactccacgatggaggcctggattattttgagggctatagccttgagaactgggtgtgcctggcctacttcgagagcaagttcaaccccatggccatctacgagaacacacgtgagggctacactggctttggcctctttcagatgcgtggcagtgactggtgtggcgaccatggcaggaaccgctgccatatgtcatgttccgctttactgaatcctaatttagagaagacaattaaatgtgccaagaccattgtaaaaggaaaagaagggatgggagcatggcccacctggtcccggtactgccagtactccgataccctggcacggtggctggatggttgcaagctgtagccacctgcatggcccctgcagcactcaccagttgcatcttgtgaatgaaggtgcttttctgcttgctgcttcagtcaatccttttgatgatctcaccactttaagagttccagatggaaaaagacaaaagtttgcttcatccggggatgcaggatgcagaataaaccaaactagttactcaacttgg

SEQ ID NO: 150394 - DNA, 838 bp, Homo sapiens
  Payload ID: 9702
  Gene Symbol: LYZL4
  Gene Name: lysozyme-like 4
  Uniprot ID: Q96KX0
  ENST ID: ENST00000441172
  CDS Start-End: 216-656
aagtagcatctgaaaaacccaaggaaccaaatgtaggtggagcaacttccctgcaacacacgtcgaagctgctgcagtggctgttcttcccctccccttggaaaggcaccaaaagccagcctttggaagggctggtggactgagaaccagtgtccctgtgactccacccactcatctggccaccgttgccctgacctgccaggagcctggagaagatgaaggcatccgtggttctctccctccttggctacctggtggttccaagtggtgcttacatcttggggcgttgcacagtggctaagaaactccacgatggaggcctggattattttgagggctatagccttgagaactgggtgtgcctggcctacttcgagagcaagttcaaccccatggccatctacgagaacacacgtgagggctacactggctttggcctctttcagatgcgtggcagtgactggtgtggcgaccatggcaggaaccgctgccatatgtcatgttccgctttactgaatcctaatttagagaagacaattaaatgtgccaagaccattgtaaaaggaaaagaagggatgggagcatggcccacctggtcccggtactgccagtactccgataccctggcacggtggctggatggttgcaagctgtagccacctgcatggcccctgcagcactcaccagttgcatcttgtgaatgaaggtgcttttctgcttgctgcttcagtcaatccttttgatgatctcaccactttaagagttccagatggaaaaagacaaaagtttgcttcatccggggatgcaggatgcagaataaaccaaactagttactcaa

SEQ ID NO: 150395 - DNA, 322 bp, Homo sapiens
  Payload ID: 9703
  Gene Symbol: LYZL6
  Gene Name: lysozyme-like 6
  ENST ID: ENST00000617692
  CDS Start-End: 1-260
agctggaggacttggatgggtttgagggttactccctgagtgactggctgtgcctggcttttgtggaaagcaagttcaacatatcaaagataaatgaaaatgcagacggaagctttgactatggcctcttccagatcaacagccactactggtgcaacgattataagagttactcggaaaacctttgccacgtagactgtcaaggcatccactgcgcaaaaaggattgtgtccggagcacgggggatgaacaactggtgaggaggacacggtgggactcagcgggcagagccccacgaaggaggacgtgacagagaaaaggg

SEQ ID NO: 150396 - DNA, 917 bp, Homo sapiens
  Payload ID: 9703
  Gene Symbol: LYZL6
  Gene Name: lysozyme-like 6
  Uniprot ID: O75951
  ENST ID: ENST00000618542
  CDS Start-End: 193-639
ggtgaggaagaagaggctcctactgtagacagccttgttctacagatcctcccagaaatctctgggccaggtggaacccagggtcagagagggatgggagagagattccccaggctctcagagaagatcagcagaaagtctgcaagaccctaagaaccatcagccctcagctgcacctcctcccctccaaggatgacaaaggcgctactcatctatttggtcagcagctttcttgccctaaatcaggccagcctcatcagtcgctgtgacttggcccaggtgctgcagctggaggacttggatgggtttgagggttactccctgagtgactggctgtgcctggcttttgtggaaagcaagttcaacatatcaaagataaatgaaaatgcagacggaagctttgactatggcctcttccagatcaacagccactactggtgcaacgattataagagttactcggaaaacctttgccacgtagactgtcaagatctgctgaatcccaaccttcttgcaggcatccactgcgcaaaaaggattgtgtccggagcacgggggatgaacaactgggtagaatggaggttgcactgttcaggccggccactcttctactggctgacaggatgccgcctgagatgaaacagggtgcgggtgcaccgtggagtcattccaagactcctgtcctcactcagggattcttcatttcttcttcctactgcctccacttcatgttattttcttcccttcccatttacaactaaaactgaccagagccccaggaataaatggttttcttggcttcctccttactcccatctggacccagtcccctggttcctgtctgttatttgtaaactgaggaccacaataaagaaatctttatatttatcgaaatattaaagcactcgctctgcaaa

SEQ ID NO: 150397 - DNA, 917 bp, Homo sapiens
  Payload ID: 9703
  Gene Symbol: LYZL6
  Gene Name: lysozyme-like 6
  Uniprot ID: O75951
  ENST ID: ENST00000612374
  CDS Start-End: 193-639
ggtgaggaagaagaggctcctactgtagacagccttgttctacagatcctcccagaaatctctgggccaggtggaacccagggtcagagagggatgggagagagattccccaggctctcagagaagatcagcagaaagtctgcaagaccctaagaaccatcagccctcagctgcacctcctcccctccaaggatgacaaaggcgctactcatctatttggtcagcagctttcttgccctaaatcaggccagcctcatcagtcgctgtgacttggcccaggtgctgcagctggaggacttggatgggtttgagggttactccctgagtgactggctgtgcctggcttttgtggaaagcaagttcaacatatcaaagataaatgaaaatgcagatggaagctttgactatggcctcttccagatcaacagccactactggtgcaacgattataagagttactcggaaaacctttgccacgtagactgtcaagatctgctgaatcccaaccttcttgcaggcatccactgcgcaaaaaggattgtgtccggagcacgggggatgaacaactgggtagaatggaggttgcactgttcaggccggccactcttctactggctgacaggatgccgcctgagatgaaacagggtgcgggtgcaccgtggagtcattccaagactcctgtcctcactcagggattcttcatttcttcttcctactgcctccacttcatgttattttcttcccttcccatttacaactaaaactgaccagagccccaggaataaatggttttcttggcttcctccttactcccatctggacccagtcccctggttcctgtctgttatttgtaaactgaggaccacaataaagaaatctttatatttatcgaaatattaaagcactcgctctgcaaa

SEQ ID NO: 150398 - DNA, 1047 bp, Homo sapiens
  Payload ID: 9703
  Gene Symbol: LYZL6
  Gene Name: lysozyme-like 6
  Uniprot ID: O75951
  ENST ID: ENST00000615905
  CDS Start-End: 336-782
tgttagttgggcagggctgaagtgtatgtggtgaggaagaagaggctcctactgtagacagccttgttctacagatcctcccagaaatctctgggccaggtggaacccagggtcagagagggatgggagagaggtttaattttccatgataaataaaaatctataaaataataaacaagagaaaagagattggaaacagccaggttggagcagtgagtgagtaaggaaacctggctgccctctccagattccccaggctctcagagaagatcagcagaaagtctgcaagaccctaagaaccatcagccctcagctgcacctcctcccctccaaggatgacaaaggcgctactcatctatttggtcagcagctttcttgccctaaatcaggccagcctcatcagtcgctgtgacttggcccaggtgctgcagctggaggacttggatgggtttgagggttactccctgagtgactggctgtgcctggcttttgtggaaagcaagttcaacatatcaaagataaatgaaaatgcagacggaagctttgactatggcctcttccagatcaacagccactactggtgcaacgattataagagttactcggaaaacctttgccacgtagactgtcaagatctgctgaatcccaaccttcttgcaggcatccactgcgcaaaaaggattgtgtccggagcacgggggatgaacaactgggtagaatggaggttgcactgttcaggccggccactcttctactggctgacaggatgccgcctgagatgaaacagggtgcgggtgcaccgtggagtcattccaagactcctgtcctcactcagggattcttcatttcttcttcctactgcctccacttcatgttattttcttcccttcccatttacaactaaaactgaccagagccccaggaataaatggttttcttggcttcctccttactcccatctggacccagtcccctggttcctgtctgttatttgtaaactgaggaccacaataaagaaatctttatatttatcgaaatattaaagca

SEQ ID NO: 150399 - DNA, 322 bp, Homo sapiens
  Payload ID: 9703
  Gene Symbol: LYZL6
  Gene Name: lysozyme-like 6
  ENST ID: ENST00000633033
  CDS Start-End: 1-260
agctggaggacttggatgggtttgagggttactccctgagtgactggctgtgcctggcttttgtggaaagcaagttcaacatatcaaagataaatgaaaatgcagatggaagctttgactatggcctcttccagatcaacagccactactggtgcaacgattataagagttactcggaaaacctttgccacgtagactgtcaaggcatccactgcgcaaaaaggattgtgtccggagcacgggggatgaacaactggtgaggaggacacggtgggactcagcgggcagagccccacgaaggaggacgtgacagagaaaaggg

SEQ ID NO: 150400 - DNA, 1047 bp, Homo sapiens
  Payload ID: 9703
  Gene Symbol: LYZL6
  Gene Name: lysozyme-like 6
  ENST ID: ENST00000632590
  CDS Start-End: 336-782
tgttagttgggcagggctgaagtgtatgtggtgaggaagaagaggctcctactgtagacagccttgttctacagatcctcccagaaatctctgggccaggtggaacccagggtcagagagggatgggagagaggtttaattttccatgataaataaaaatctataaaataataaacaagagaaaagagattggaaacagccaggttggagcagtgagtgagtaaggaaacctggctgccctctccagattccccaggctctcagagaagatcagcagaaagtctgcaagaccctaagaaccatcagccctcagctgcacctcctcccctccaaggatgacaaaggcgctactcatctatttggtcagcagctttcttgccctaaatcaggccagcctcatcagtcgctgtgacttggcccaggtgctgcagctggaggacttggatgggtttgagggttactccctgagtgactggctgtgcctggcttttgtggaaagcaagttcaacatatcaaagataaatgaaaatgcagatggaagctttgactatggcctcttccagatcaacagccactactggtgcaacgattataagagttactcggaaaacctttgccacgtagactgtcaagatctgctgaatcccaaccttcttgcaggcatccactgcgcaaaaaggattgtgtccggagcacgggggatgaacaactgggtagaatggaggttgcactgttcaggccggccactcttctactggctgacaggatgccgcctgagatgaaacagggtgcgggtgcaccgtggagtcattccaagactcctgtcctcactcagggattcttcatttcttcttcctactgcctccacttcatgttattttcttcccttcccatttacaactaaaactgaccagagccccaggaataaatggttttcttggcttcctccttactcccatctggacccagtcccctggttcctgtctgttatttgtaaactgaggaccacaataaagaaatctttatatttatcgaaatattaaagca

SEQ ID NO: 150401 - DNA, 5102 bp, Homo sapiens
  Payload ID: 9704
  Gene Symbol: LOX
  Gene Name: lysyl oxidase
  Uniprot ID: P28300
  ENST ID: ENST00000231004
  CDS Start-End: 301-1554
aaaatctctcctccttccttcactccagacactgcccgctctccgggactgccgcgccgctccccgttgccttccaggactgagaaaggggaaagggaagggtgccacgtccgagcagccgccttgactggggaagggtctgaatcccacccttggcattgcttggtggagactgagatacccgtgctccgctcgcctccttggttgaagatttctccttccctcacgtgatttgagccccgtttttattttctgtgagccacgtcctcctcgagcggggtcaatctggcaaaaggagtgatgcgcttcgcctggaccgtgctcctgctcgggcctttgcagctctgcgcgctagtgcactgcgcccctcccgccgccggccaacagcagcccccgcgcgagccgccggcggctccgggcgcctggcgccagcagatccaatgggagaacaacgggcaggtgttcagcttgctgagcctgggctcacagtaccagcctcagcgccgccgggacccgggcgccgccgtccctggtgcagccaacgcctccgcccagcagccccgcactccgatcctgctgatccgcgacaaccgcaccgccgcggcgcgaacgcggacggccggctcatctggagtcaccgctggccgccccaggcccaccgcccgtcactggttccaagctggctactcgacatctagagcccgcgaagctggcgcctcgcgcgcggagaaccagacagcgccgggagaagttcctgcgctcagtaacctgcggccgcccagccgcgtggacggcatggtgggcgacgacccttacaacccctacaagtactctgacgacaacccttattacaactactacgatacttatgaaaggcccagacctgggggcaggtaccggcccggatacggcactggctacttccagtacggtctcccagacctggtggccgacccctactacatccaggcgtccacgtacgtgcagaagatgtccatgtacaacctgagatgcgcggcggaggaaaactgtctggccagtacagcatacagggcagatgtcagagattatgatcacagggtgctgctcagatttccccaaagagtgaaaaaccaagggacatcagatttcttacccagccgaccaagatattcctgggaatggcacagttgtcatcaacattaccacagtatggatgagtttagccactatgacctgcttgatgccaacacccagaggagagtggctgaaggccacaaagcaagtttctgtcttgaagacacatcctgtgactatggctaccacaggcgatttgcatgtactgcacacacacagggattgagtcctggctgttatgatacctatggtgcagacatagactgccagtggattgatattacagatgtaaaacctggaaactatatcctaaaggtcagtgtaaaccccagctacctggttcctgaatctgactataccaacaatgttgtgcgctgtgacattcgctacacaggacatcatgcgtatgcctcaggctgcacaatttcaccgtattagaaggcaaagcaaaactcccaatggataaatcagtgcctggtgttctgaagtgggaaaaaatagactaacttcagtaggatttatgtattttgaaaaagagaacagaaaacaacaaaagaatttttgtttggactgttttcaataacaaagcacataactggattttgaacgcttaagtcatcattacttgggaaatttttaatgtttattatttacatcactttgtgaattaacacagtgtttcaattctgtaattacatatttgactctttcaaagaaatccaaatttctcatgttccttttgaaattgtagtgcaaaatggtcagtattatctaaatgaatgagccaaaatgactttgaactgaaacttttctaaagtgctggaactttagtgaaacataataataatgggtttatatatgtcatagcatagatgaatttagaaacaatgctcctactgtttaaatacatatggacacatctggtgctgagaaagaaacaaacacattaccattggtgtcaagaaatattactatatagcagagaaatggcaatacatgtactcagatagttacatccctatataaaaagtatgtttacatttaaaaaattagtagataacttcctttctttcaagtgcacaatttcattttgacttgagtcaacttttgttttggaacaaattaagtaagggagctgcccaatcctgtctgatatttcttgaggctgccctctatcattttatctttcccatgggcagagatgttgtaagtgggattcttaatatcaccattcttgggactggtatacataaggcagccgtgaaactggaaagtcattttgatgactgatgtgatacatccagaggtaaaatgcatttaaacatattaaagtatttgccaaagatacaattttcttgctgacataaaaatcacacaaacaagtcccccccaaaccacaactgtctctcaaatagcttaaaaaaattgaaaaacattttaggatttttcaagttttctagattttaaaaagatgttcagctattagaggaatgttaaaaattttatattatctagaacacaggaacatcatcctgggttattcaggaatcagtcacacatgtgtgtgtgtctgagatatagtctaaattagcaaagcacatagtattacatacttgaggggttggtgaacaaaggaaaaatatactttctgcaaaaccaaggactgtgctgcgtaatgagacagctgtgatttcatttgaaactgtgaaaccatgtgccataatagaattttgagaattttgcttttacctaaattcaagaaaatgaaattacacttttaagttagtggtgcttaagcataatttttcctatattaaccagtattaaaatctcaagtaagattttccagtgccagaacatgttaggtggaattttaaaagtgcctcggcatcctgtattacatgtcatagaattgtaaagtcaacatcaattactagtaatcattctgcactcactgggtgcatagcatggttagaggggctagagatggacagtcatcaactggcggatatagcggtacatatgatccttagccaccagggcacaagcttaccagtagacaatacagacagagcttttgttgagctgtaactgagctatggaatagcttctttgatgtacctctttgccttaaattgctttttagttctaagattgtagaatgatcctttcaaattgtaatcttttctaacagagatattttaatatacttgctttcttaaaaaacaaaaaaactactgtcagtattaatactgagccagactggcatctacagatttcagatctatcattttattgattcttaagcttgtattaaaaactaggcaatatcatcatggatacataggagaagacacatttacaatcattcattgggccttttatctgtctatccatccatcatcatttgaaggcctaatatatgccaagtactcacatggtatgcattgagacataaaaaagactgtctataacctcaataagtattaaaaatcccattattacccataaggttcatcttatttcatttttagggaataaaattacatgtctatgaaatttcaattttaagcactattgtttttcatgaccataatttatttttaaaaataaattaaaggttaattatatgcatgtatgtatttctaataattaaaaatgtgttcaatccctgaaatgtctgccttttaaatataacacctactatttggttaattttgacgatttttttttttcaattaggaagctaaaaatactactttattccttatatgaacattcatccccctcctggcacctctaaacacacccaaataactcacaagtactgatttaacactctgtattactgaacttctttgaactattttgaactttgaatctcttctctgaataactgccgaaactcaaagataataattagttgatgaaggttatcaattaataaaataacacagaccagtcttaccaaactctaaatacattttaaaaaataggaactggcaatgataaaaagaatgttgagtactgacaggagattggcttttacactaaaaaagacagaaaatggactaaataggaacataatttcagagtttatgagtcagtttacaatatgccatattagcgatctcatgatgattcagaccacagtctgggttaaagatgtcttgacctctgaggctagcataacatatatgagaatacaacttgcctatttccagaaaatctgtatatttttatagaataactttatttacaatttctatcatccaattactcactaggcattatttgtagtactttttttctctttgaaatctcataggatagtcacacttataaacattcccaatattcggattctagaagaaatgcaattcattaaaattttcctggcactgagagttaatctttagcagattgcatgaaaatactgaattcctggtaaggagatattttgttttaaaaataatgtgttttgatacgaatcagtgtattaactgataactaaaaagtactcttttttctatatatacatatttttttgaactcatattcacaatcaacatattcaatcagtgagttaagtctcattcctagctaccaaaattcctgggccacttttaaacactaaacatttcatttatcctctaagctaaaatggtgctgagttatttaaatctgaatgtaaaatgcattaaatcttagcttgtggtatataaacatttaattaatataaaactgcttgctataaactaagtaacatgtcatttggtgttaggtttttagtgaagttttagcttctcccaaatttttcaggaatgttatttgtaagacgtgtaacttttttgaagaactcttattttaaatgctcagacattggctttatgttcctctttgcattctcatattcttttattatacatctatactatgattgcaagattatataaaaatgccttgaataaatgatttcaagtgtc

SEQ ID NO: 150402 - DNA, 561 bp, Homo sapiens
  Payload ID: 9704
  Gene Symbol: LOX
  Gene Name: lysyl oxidase
  ENST ID: ENST00000508067
  CDS Start-End: 1-186
tacaacccctacaagtactctgacgacaacccttattacaactactacgatacttatgaaaggcccagacctgggggcaggtaccggcccggatacggcactggctacttccagtacgtacagcatacagggcagatgtcagagattatgatcacagggtgctgctcagatttccccaaagagtgaaaaaccaagggacatcagatttcttacccagccgaccaagatattcctgggaatggcacagttgtcatcaacattaccacagtatggatgagtttagccactatgacctgcttgatgccaacacccagaggagagtggctgaaggccacaaagcaagtttctgtcttgaagacacatcctgtgactatggctaccacaggcgatttgcatgtactgcacacacacagctggaggtgctataaggctgagtaataaatacttctcaagggagatgaaatataagtatagttttatgtcagactcttggattgagtcctggctgttatgatacctatggtgcagacatagactgccagtggattgatattacagatg

SEQ ID NO: 150403 - DNA, 2351 bp, Homo sapiens
  Payload ID: 9705
  Gene Symbol: LOXL1
  Gene Name: lysyl oxidase-like 1
  Uniprot ID: Q08397
  ENST ID: ENST00000261921
  CDS Start-End: 327-2051
attcattcagagtgggaaagcgccagccgagcggccagccagtgcggggctggccatgtaaggcccacaggcggtcctgcccgcccggtgccctgcggagagcctcgtgcagccctgggcaccgcccctgccctgccctgaccccttggccttgaaatgctgtcatcggaggagccgtcccgctcgggacaaggccagcatggacaaagctagagctggggcaagcaaggagccttcctgtcctcgaggccgtgggaagagaagcacgcccagggggccactcctgagagcctctctgtccaccaggcctctgcagaggggtcaccatggctctggcccgaggcagccggcagctgggggccctggtgtggggcgcctgcctgtgcgtgctggtgcacgggcagcaggcgcagcccgggcagggctcggaccccgcccgctggcggcagctgatccagtgggagaacaacgggcaggtgtacagcttgctcaactcgggctcagagtacgtgccggccggacctcagcgctccgagagtagctcccgggtgctgctggccggcgcgccccaggcccagcagcggcgcagccacgggagcccccggcgtcggcaggcgccgtccctgcccctgccggggcgcgtgggctcggacaccgtgcgcggccaggcgcggcacccattcggctttggccaggtgcccgacaactggcgcgaggtggccgtcggggacagcacgggcatggcccgggcccgcacctccgtctcccagcaacggcacgggggctccgcctcctcggtctcggcttcggccttcgccagcacctaccgccagcagccctcctacccgcagcagttcccctacccgcaggcgcccttcgtcagccagtacgagaactacgaccccgcgtcgcggacctacgaccagggtttcgtgtactaccggcccgcgggcggcggcgtgggcgcgggggcggcggccgtggcctcggcgggggtcatctacccctaccagccccgggcgcgctacgaggagtacggcggcggcgaagagctgcccgagtacccgcctcagggcttctacccggcccccgagaggccctacgtgccgccgccgccgccgccccccgacggcctggaccgccgctactcgcacagtctgtacagcgagggcacccccggcttcgagcaggcctaccctgaccccggtcccgaggcggcgcaggcccatggcggagacccacgcctgggctggtacccgccctacgccaacccgccgcccgaggcgtacgggccgccgcgcgcgctggagccgccctacctgccggtgcgcagctccgacacgcccccgccgggtggggagcggaacggcgcgcagcagggccgcctcagcgtgggcagcgtgtaccggcccaaccagaacggccgcggtctccctgacttggtcccagaccccaactatgtgcaagcatccacttatgtgcagagagcccacctgtactccctgcgctgtgctgcggaggagaagtgtctggccagcacagcctatgcccctgaggccaccgactacgatgtgcgggtgctactgcgcttcccccagcgcgtgaagaaccagggcacagcagacttcctccccaaccggccacggcacacctgggagtggcacagctgccaccagcattaccacagcatggacgagttcagccactacgacctactggatgcagccacaggcaagaaggtggccgagggccacaaggccagtttctgcctggaggacagcacctgtgacttcggcaacctcaagcgctatgcatgcacctctcatacccagggcctgagcccaggctgctatgacacctacaatgcggacatcgactgccagtggatcgacataaccgacgtgcagcctgggaactacatcctcaaggtgcacgtgaacccaaagtatattgttttggagtctgacttcaccaacaacgtggtgagatgcaacattcactacacaggtcgctacgtttctgcaacaaactgcaaaattgtccaatcctgatctccgggagggacagatggccaatctctccccttccaaagcaggccctgctccccgggcagcctcccgccgaggggcccagcccccaacccacaggcacggaggggcatccctccctgccggcctcagggagcgaacgtggatgaaaaccacagggattccggacgccagaccccattttatacttcacttttctctacagtgttgttttgttgttgttggtttttattttttatactttggccataccacagagctagattgcccaggtctgggctgaataaaacaaggtttttctac

SEQ ID NO: 150404 - DNA, 2786 bp, Homo sapiens
  Payload ID: 9705
  Gene Symbol: LOXL1
  Gene Name: lysyl oxidase-like 1
  ENST ID: ENST00000566011
  CDS Start-End: 796-2091
gggataatggtggaaggaacatgcaaagagggtgtgtcttaattagcactggctttagggaacaaggaaaagggagaacccgggagtacgggaaggaggctggggcagacaggagtcagaggcccattccagcccaaacgagaagccagtgagcaaggtggagaccagggatgctgtgaccaaagcagagaggaatgggcggggtggtgctgacaccccagccccgttctgcctgccagagccccacttaccaggcccgagtccccagaggtcccctcctactccctgctcgattcccttcctcagaggcaggtctgtggcttggctgggaactccagggactgagggagcactgcagctgtgggaccggcgcatagctaaaagccggcgggccatagggccccgcggaggaggccccagcaggcggaccaggaggccgaagcctcccgacgctcccagcctgttgcttattcattcagagtgggaaagcgccagccgagcggccagccagtgcggggctggccatgtaaggcccacaggcggtcctgcccgcccggtgccctgcggagagcctcgtgcagccctgggcaccgcccctgccctgccctgaccccttggccttgaaatgctgtcatcggaggagccgtcccgctcgggacaaggccagcatggacaaagctagagctggggcaagcaaggagccttcctgtcctcgaggccgtgggaagagaagcacgcccagggggccactcctgagagcctctctgtccaccaggcctctgcagaggggtcaccatggctctggcccgaggcagccggcagctgggggccctggtgtggggcgcctgcctgtgcgtgctggtgcacgggcagcaggcgcagcccgggcagggctcggaccccgcccgctggcggcagctgatccagtgggagaacaacgggcaggtgtacagcttgctcaactcgggctcagagtacgtgccggccggacctcagcgctccgagagtagctcccgggtgctgctggccggcgcgccccaggcccagcagcggcgcagccacgggagcccccggcgtcggcaggcgccgtccctgcccctgccggggcgcgtgggctcggacaccgtgcgcggccaggcgcggcacccattcggctttggccaggtgcccgacaactggcgcgaggtggccgtcggggacagcacgggcatggcccgggcccgcacctccgtctcccagcaacggcacgggggctccgcctcctcggtctcggcttcggccttcgccagcacctaccgccagcagccctcctacccgcagcagttcccctacccgcaggcgcccttcgtcagccagtacgagaactacgaccccgcgtcgcggacctacgaccagggtttcgtgtactaccggcccgcgggcggcggcgtgggcgcgggggcggcggccgtggcctcggcgggggtcatctacccctaccagccccgggcgcgctacgaggagtacggcggcggcgaagagctgcccgagtacccgcctcagggcttctacccggcccccgagaggccctacgtgccgccgccgccgccgccccccgacggcctggaccgccgctactcgcacagtctgtacagcgagggcacccccggcttcgagcaggcctaccctgaccccggtcccgaggcggcgcaggcccatggcggagacccacgcctgggctggtacccgccctacgccaacccgccgcccgaggcgtacgggccgccgcgcgcgctggagccgccctacctgccggtgcgcagctccgacacgcccccgccgggtggggagcggaacggcgcgcagcagggccgcctcagcgtgggcagcgtgtaccggcccaaccagaacggccgcgtaactcctgctcagactcctgcatgcccagggaggaaggtggaggggcaggaacaggacggacaggccccgggctctggcacatcctggggaacaagggaccacaaggacgggggcagtctccagacttcccctgggcgcttgaccccaggccttgcaggggagagagccagggcctccctcaggtctccctgacttggtcccagaccccaactatgtgcaagcatccacttatgtgcagagagcccacctgtactccctgcgctgtgctgcggaggagaagtgtctggccagcacagcctatgcccctgaggccaccgactacgatgtgcgggtgctactgcgcttcccccagcgcgtgaagaaccagggcacagcagacttcctccccaaccggccacggcacacctgggagtggcacagctgccaccagcattaccacagcatggacgagttcagccactacgacctactggatgcagccacaggcaagaaggtggccgagggccacaaggccagtttctgcctggaggacagcacctgtgacttcggcaacctcaagcgctatgcatgcacctctcatacccagggcctgagcccaggctgctatgacacctacaatgcggacatcgactgccagtggatcgacataaccgacgtgcagcctgggaactacatcctcaaggtgcacgtgaacccaaagtatattgttttggagtctgacttcaccaacaacgtggtgagatgcaacattcactacacaggtcgctacgtttctgcaacaaactgcaaaattgtccaatcctgatctccgggagggacagatggccaatctctccccttccaaagcaggccctgctccccgggcagcctcccgccgaggggcccag

SEQ ID NO: 150405 - DNA, 3549 bp, Homo sapiens
  Payload ID: 9706
  Gene Symbol: LOXL2
  Gene Name: lysyl oxidase-like 2
  Uniprot ID: Q9Y4K0
  ENST ID: ENST00000389131
  CDS Start-End: 371-2695
acaacaaaagaggccggaggccgggcctgctgcggcggccgccttcggggaagggggtgggtccggggaggggtttgccatcctcctctagttaaaagtaagggggaaaagagtaaacgcgcgactccagcgcgcggctacctacgcttggtgcttgctttctccagccatcggagaccagagccgccccctctgctcgagaaaggggctcagcggcggcggaagcggagggggaccaccgtggagagcgcggtcccagcccggccactgcggatccctgaaaccaaaaagctcctgctgcttctgtaccccgcctgtccctcccagctgcgcagggccccttcgtgggatcatcagcccgaagacagggatggagaggcctctgtgctcccacctctgcagctgcctggctatgctggccctcctgtcccccctgagcctggcacagtatgacagctggccccattaccccgagtacttccagcaaccggctcctgagtatcaccagccccaggcccccgccaacgtggccaagattcagctgcgcctggctgggcagaagaggaagcacagcgagggccgggtggaggtgtactatgatggccagtggggcaccgtgtgcgatgacgacttctccatccacgctgcccacgtcgtctgccgggagctgggctacgtggaggccaagtcctggactgccagctcctcctacggcaagggagaagggcccatctggttagacaatctccactgtactggcaacgaggcgacccttgcagcatgcacctccaatggctggggcgtcactgactgcaagcacacggaggatgtcggtgtggtgtgcagcgacaaaaggattcctgggttcaaatttgacaattcgttgatcaaccagatagagaacctgaatatccaggtggaggacattcggattcgagccatcctctcaacctaccgcaagcgcaccccagtgatggagggctacgtggaggtgaaggagggcaagacctggaagcagatctgtgacaagcactggacggccaagaattcccgcgtggtctgcggcatgtttggcttccctggggagaggacatacaataccaaagtgtacaaaatgtttgcctcacggaggaagcagcgctactggccattctccatggactgcaccggcacagaggcccacatctccagctgcaagctgggcccccaggtgtcactggaccccatgaagaatgtcacctgcgagaatgggctaccggccgtggtgagttgtgtgcctgggcaggtcttcagccctgacggaccctcaagattccggaaagcgtacaagccagagcaacccctggtgcgactgagaggcggtgcctacatcggggagggccgcgtggaggtgctcaaaaatggagaatgggggaccgtctgcgacgacaagtgggacctggtgtcggccagtgtggtctgcagagagctgggctttgggagtgccaaagaggcagtcactggctcccgactggggcaagggatcggacccatccacctcaacgagatccagtgcacaggcaatgagaagtccattatagactgcaagttcaatgccgagtctcagggctgcaaccacgaggaggatgctggtgtgagatgcaacacccctgccatgggcttgcagaagaagctgcgcctgaacggcggccgcaatccctacgagggccgagtggaggtgctggtggagagaaacgggtcccttgtgtgggggatggtgtgtggccaaaactggggcatcgtggaggccatggtggtctgccgccagctgggcctgggattcgccagcaacgccttccaggagacctggtattggcacggagatgtcaacagcaacaaagtggtcatgagtggagtgaagtgctcgggaacggagctgtccctggcgcactgccgccacgacggggaggacgtggcctgcccccagggcggagtgcagtacggggccggagttgcctgctcagaaaccgcccctgacctggtcctcaatgcggagatggtgcagcagaccacctacctggaggaccggcccatgttcatgctgcagtgtgccatggaggagaactgcctctcggcctcagccgcgcagaccgaccccaccacgggctaccgccggctcctgcgcttctcctcccagatccacaacaatggccagtccgacttccggcccaagaacggccgccacgcgtggatctggcacgactgtcacaggcactaccacagcatggaggtgttcacccactatgacctgctgaacctcaatggcaccaaggtggcagagggccacaaggccagcttctgcttggaggacacagaatgtgaaggagacatccagaagaattacgagtgtgccaacttcggcgatcagggcatcaccatgggctgctgggacatgtaccgccatgacatcgactgccagtgggttgacatcactgacgtgccccctggagactacctgttccaggttgttattaaccccaacttcgaggttgcagaatccgattactccaacaacatcatgaaatgcaggagccgctatgacggccaccgcatctggatgtacaactgccacataggtggttccttcagcgaagagacggaaaaaaagtttgagcacttcagcgggctcttaaacaaccagctgtccccgcagtaaagaagcctgcgtggtcaactcctgtcttcaggccacaccacatcttccatgggacttccccccaacaactgagtctgaacgaatgccacgtgccctcacccagcccggcccccaccctgtccagacccctacagctgtgtctaagctcaggaggaaagggaccctcccatcattcatggggggctgctacctgacccttggggcctgagaaggccttgcgggggtggggtttgtccacagagctgctggagcagcaccaagagccagtcttgaccgggatgaggcccacagacaggttgtcatcagcttgtcccattcaagccaccgagctcaccacagacacagtggagccgcgctcttctccagtgacacgtggacaaatgcgggctcatcagcccccccagagagggtcaggccgaaccccatttctcctcctcttaggtcattttcagcaaacttgaatatctagacctctcttccaatgaaaccctccagtctattatagtcacatagataatggtgccacgtgttttctgatttggtgagctcagacttggtgcttccctatccacagcccccaccccttgtttttcaagatactattattatattttcacagacttttgaagcacaaatttattggcatttaatattggacatctgggcccttggaagtacaaatctaaggaaaaaccaacccactgtgtaagtgactcatcttcctgttgttccaattctgtgggtttttgattcaacggtgctataaccagggtcctgggtgacagggcgctcactgagcaccatgtgtcatcacagacacttacacatacttgaaacttggaataaaagaaaga

SEQ ID NO: 150406 - DNA, 689 bp, Homo sapiens
  Payload ID: 9706
  Gene Symbol: LOXL2
  Gene Name: lysyl oxidase-like 2
  ENST ID: ENST00000518878
  CDS Start-End: 1-204
cggattcgagccatcctctcaacctaccgcaagcgcaccccagtgatggagggctacgtggaggtgaaggagggcaagacctggaagcagatctgtgacaagcactggacggccaagaattcccgcgtggtctgcggcatgtttggcttccctggggagaggacatacaataccaaagtgtacaacaacccctggtgcgactgagaggcggtgcctacatcggggagggccgcgtggaggtgctcaaaaatggagaatgggggaccgtctgcgacgacaagtgggacctggtgtcggccagtgtggtctgcagagagctgggctttgggagtgccaaagaggcagtcactggctcccgactggggcaagggatcggacccatccacctcaacgagatccagtgcacaggcaatgagaagtccattatagactgcaagttcaatgccgagtctcagggctgcaaccacgaggaggatgctggtgtgagatgcaacacccctgccatgggcttgcagaagaagctgcgcctgaacggcggccgcaatccctacgagggccgagtggaggtgctggtggagagaaacgggtcccttgtgtgggggatggtgtgtggccaaaactggggcatcgtggaggccatggtggtctgccgccagctgggcctgggattcgccagcaacgccttccag

SEQ ID NO: 150407 - DNA, 975 bp, Homo sapiens
  Payload ID: 9706
  Gene Symbol: LOXL2
  Gene Name: lysyl oxidase-like 2
  ENST ID: ENST00000524144
  CDS Start-End: 202-975
cctggacttcaatattgctggtggtggtgcaaactgcaatgcgtaccccagaagggaagctggcagcttaaaagttagcagcgtgtgtgccctttgattcagagagccacttgcgcgtggctctccggagagatttctacctgggtccatgaatggacttacggaaggattccttggtaatgattctgagtgactgtgttgatggaggcaagcaaggtcttggacaagtcaaaggcggcagccatcggagaccagagccgccccctctgctcgagaaaggggctcagcggcggcggaagcggagggggaccaccgtggagagcgcggtcccagcccggccactgcggatccctgaaaccaaaaagctcctgctgcttctgtaccccgcctgtccctcccagctgcgcagggccccttcgtgggatcatcagcccgaagacagggatggagaggcctctgtgctcccacctctgcagctgcctggctatgctggccctcctgtcccccctgagcctggcacagtatgacagctggccccattaccccgagtacttccagcaaccggctcctgagtatcaccagccccaggcccccgccaacgtggccaagattcagctgcgcctggctgggcagaagaggaagcacagcgagggccgggtggaggtgtactatgatggccagtggggcaccgtgtgcgatgacgacttctccatccacgctgcccacgtcgtctgccgggagctgggctacgtggaggccaagtcctggactgccagctcctcctacggcaagggagaagggcccatctggttagacaatctccactgtactggcaacgaggcgacccttgcagcatgcacctccaatggctggggcgtcactgactgcaagcacacggaggatgtcggtgtggtgtgcagcgacaaaaggattcctgggttcaaatttgacaattcgttgatcaaccagatagag

SEQ ID NO: 150408 - DNA, 620 bp, Homo sapiens
  Payload ID: 9706
  Gene Symbol: LOXL2
  Gene Name: lysyl oxidase-like 2
  ENST ID: ENST00000520349
  CDS Start-End: 1-620
gcgagaatgggctaccggccgtggtgagttgtgtgcctgggcaggtcttcagccctgacggaccctcaagattccggaaagcgtacaagccagagcaggaccgtgtgtctcttcagcaacccctggtgcgactgagaggcggtgcctacatcggggagggccgcgtggaggtgctcaaaaatggagaatgggggaccgtctgcgacgacaagtgggacctggtgtcggccagtgtggtctgcagagagctgggctttgggagtgccaaagaggcagtcactggctcccgactggggcaagggatcggacccatccacctcaacgagatccagtgcacaggcaatgagaagtccattatagactgcaagttcaatgccgagtctcagggctgcaaccacgaggaggatgctggtgtgagatgcaacacccctgccatgggcttgcagaagaagctgcgcctgaacggcggccgcaatccctacgagggccgagtggaggtgctggtggagagaaacgggtcccttgtgtgggggatggtgtgtggccaaaactggggcatcgtggaggccatggtggtctgccgccagctgggcctgggattcgccagcaacgccttccag

SEQ ID NO: 150409 - DNA, 746 bp, Homo sapiens
  Payload ID: 9706
  Gene Symbol: LOXL2
  Gene Name: lysyl oxidase-like 2
  ENST ID: ENST00000524168
  CDS Start-End: 330-746
cagccatcggagaccagagccgccccctctgctcgagaaaggggctcagcggcggcggaagcggagggggaccaccgtggagagcgcggtcccagcccggccactgcggatccctgaaaccaaatggagtctcgctctgtcacccaggctggagtacagtggcacgatcttggctgactgcaagctttgcctcccgggttcaagcgattctcctgcctcaagcctcctgagtaactgggactacagaaagctcctgctgcttctgtaccccgcctgtccctcccagctgcgcagggccccttcgtgggatcatcagcccgaagacagggatggagaggcctctgtgctcccacctctgcagctgcctggctatgctggccctcctgtcccccctgagcctggcacagtatgacagctggccccattaccccgagtacttccagcaaccggctcctgagtatcaccagccccaggcccccgccaacgtggccaagattcagctgcgcctggctgggcagaagaggaagcacagcgagggccgggtggaggtgtactatgatggccagtggggcaccgtgtgcgatgacgacttctccatccacgctgcccacgtcgtctgccgggagctgggctacgtggaggccaagtcctggactgccagctcctcctacggcaagggagaagggcccatctggttagacaatctccactgtactggcaacgaggcgacccttgcagcatgcacc

SEQ ID NO: 150410 - DNA, 763 bp, Homo sapiens
  Payload ID: 9706
  Gene Symbol: LOXL2
  Gene Name: lysyl oxidase-like 2
  ENST ID: ENST00000519243
  CDS Start-End: 477-763
cggaggccgggcctgctgcggcggccgccttcggggaagggggtgggtccggggaggggtttgccatcctcctctagttaaaagtaagggggaaaagagtaaacgcgcgactccagcgcgcggctacctacgcttggtgcttgctttctccagccatcggagaccagagccgccccctctgctcgagaaaggggctcagcggcggcggaagcggagggggaccaccgtggagagcgcggtcccagcccggccactgcggatccctgaaaccaagttctgaactcccggtctccccagtccctggaggctgcctgcagctttgcttagcttctcagcctgttgatcactgccgtggaattggcgagtatcttccgggggaaagcagagacaaaaaaagctcctgctgcttctgtaccccgcctgtccctcccagctgcgcagggccccttcgtgggatcatcagcccgaagacagggatggagaggcctctgtgctcccacctctgcagctgcctggctatgctggccctcctgtcccccctgagcctggcacagtatgacagctggccccattaccccgagtacttccagcaaccggctcctgagtatcaccagccccaggcccccgccaacgtggccaagattcagctgcgcctggctgggcagaagaggaagcacagcgagggccgggtggaggtgtactatgatggccagtggggcaccgtgtgcgatgacgacttctccatccacgctgcccacgtcgt

SEQ ID NO: 150411 - DNA, 892 bp, Homo sapiens
  Payload ID: 9706
  Gene Symbol: LOXL2
  Gene Name: lysyl oxidase-like 2
  ENST ID: ENST00000520871
  CDS Start-End: 239-892
gaattgccagacttcaagtgctggcagtgatgcggggcctggacttcaatattgctggtggtggtgcaaactgcaatgcgtaccccagaagggaagctggcagcttaaaagttagcagcgtgtgtgccctttgattcagagagccacttgcgcgtggctctccggagagatttctacctgggtccatgaatggacttacggaaggattccttggtaatgattctgagtgactgtgttgatggaggcaagcaaggtcttggacaagtcaaaggcggcagaaagctcctgctgcttctgtaccccgcctgtccctcccagctgcgcagggccccttcgtgggatcatcagcccgaagacagggatggagaggcctctgtgctcccacctctgcagctgcctggctatgctggccctcctgtcccccctgagcctggcacagtatgacagctggccccattaccccgagtacttccagcaaccggctcctgagtatcaccagccccaggcccccgccaacgtggccaagattcagctgcgcctggctgggcagaagaggaagcacagcgagggccgggtggaggtgtactatgatggccagtggggcaccgtgtgcgatgacgacttctccatccacgctgcccacgtcgtctgccgggagctgggctacgtggaggccaagtcctggactgccagctcctcctacggcaagggagaagggcccatctggttagacaatctccactgtactggcaacgaggcgacccttgcagcatgcacctccaatggctggggcgtcactgactgcaagcacacggaggatgtcggtgtggtgtgcagcgacaaaaggattcctgggttcaaatttgacaattcgttgatcaaccagatagag

SEQ ID NO: 150412 - DNA, 588 bp, Homo sapiens
  Payload ID: 9706
  Gene Symbol: LOXL2
  Gene Name: lysyl oxidase-like 2
  ENST ID: ENST00000518083
  CDS Start-End: 134-588
tatttgtgttgaggggaccagctgttagtctttctgctgctctttctaagaaagctcctgctgcttctgtaccccgcctgtccctcccagctgcgcagggccccttcgtgggatcatcagcccgaagacagggatggagaggcctctgtgctcccacctctgcagctgcctggctatgctggccctcctgtcccccctgagcctggcacagtatgacagctggccccattaccccgagtacttccagcaaccggctcctgagtatcaccagccccaggcccccgccaacgtggccaagattcagctgcgcctggctgggcagaagaggaagcacagcgagggccgggtggaggtgtactatgatggccagtggggcaccgtgtgcgatgacgacttctccatccacgctgcccacgtcgtctgccgggagctgggctacgtggaggccaagtcctggactgccagctcctcctacggcaagggagaagggcccatctggttagacaatctccactgtactggcaacgaggcgacccttgcagcatgcacctccaatggctggggcgtcactgactgcaagcacacgga

SEQ ID NO: 150413 - DNA, 559 bp, Homo sapiens
  Payload ID: 9706
  Gene Symbol: LOXL2
  Gene Name: lysyl oxidase-like 2
  ENST ID: ENST00000523833
  CDS Start-End: 257-559
aaacgcgcgactccagcgcgcggctacctacgcttggtgcttgctttctccagccatcggagaccagagccgccccctctgctcgagaaaggggctcagcggcggcggaagcggagggggaccaccgtggagagcgcggtcccagcccggccactgcggatccctgaaaccaaaaagctcctgctgcttctgtaccccgcctgtccctcccagctgcgcagggccccttcgtgggatcatcagcccgaagacagggatggagaggcctctgtgctcccacctctgcagctgcctggctatgctggccctcctgtcccccctgagcctggcacagtatgacagctggccccattaccccgagtacttccagcaaccggctcctgagtatcaccagccccaggcccccgccaacgtggccaagattcagctgcacctggtattggcacggagatgtcaacagcaacaaagtggtcatgagtggagtgaagtgctcgggaacggagctgtccctggcgcactgccgccacgacggggaggacgtggcctgcccccagggcgg

SEQ ID NO: 150414 - DNA, 3502 bp, Homo sapiens
  Payload ID: 9707
  Gene Symbol: LOXL3
  Gene Name: lysyl oxidase-like 3
  Uniprot ID: P58215
  ENST ID: ENST00000264094
  CDS Start-End: 73-2334
taggactgatctccaggaccagcactcttctcccagcccttagggtcctgctcggccaaggccttccctgccatgcgacctgtcagtgtctggcagtggagcccctgggggctgctgctgtgcctgctgtgcagttcgtgcttggggtctccgtccccttccacgggccctgagaagaaggccgggagccaggggcttcggttccggctggctggcttccccaggaagccctacgagggccgcgtggagatacagcgagctggtgaatggggcaccatctgcgatgatgacttcacgctgcaggctgcccacatcctctgccgggagctgggcttcacagaggccacaggctggacccacagtgccaaatatggccctggaacaggccgcatctggctggacaacttgagctgcagtgggaccgagcagagtgtgactgaatgtgcctcccggggctgggggaacagtgactgtacgcacgatgaggatgctggggtcatctgcaaagaccagcgcctccctggcttctcggactccaatgtcattgaggtagagcatcacctgcaagtggaggaggtgcgaattcgacccgccgttgggtggggcagacgacccctgcccgtgacggaggggctggtggaagtcaggcttcctgacggctggtcgcaagtgtgcgacaaaggctggagcgcccacaacagccacgtggtctgcgggatgctgggcttccccagcgaaaagagggtcaacgcggccttctacaggctgctagcccaacggcagcaacactcctttggtctgcatggggtggcgtgcgtgggcacggaggcccacctctccctctgttccctggagttctatcgtgccaatgacaccgccaggtgccctggggggggccctgcagtggtgagctgtgtgccaggccctgtctacgcggcatccagtggccagaagaagcaacaacagtcgaagcctcagggggaggcccgtgtccgtctaaagggcggcgcccaccctggagagggccgggtagaagtcctgaaggccagcacatggggcacagtctgtgaccgcaagtgggacctgcatgcagccagcgtggtgtgtcgggagctgggcttcgggagtgctcgagaagctctgagtggcgctcgcatggggcagggcatgggtgctatccacctgagtgaagttcgctgctctggacaggagctctccctctggaagtgcccccacaagaacatcacagctgaggattgttcacatagccaggatgccggggtccggtgcaacctaccttacactggggcagagaccaggatccgactcagtgggggccgcagccaacatgaggggcgagtcgaggtgcaaatagggggacctgggccccttcgctggggcctcatctgtggggatgactgggggaccctggaggccatggtggcctgtaggcaactgggtctgggctacgccaaccacggcctgcaggagacctggtactgggactctgggaatataacagaggtggtgatgagtggagtgcgctgcacagggactgagctgtccctggatcagtgtgcccatcatggcacccacatcacctgcaagaggacagggacccgcttcactgctggagtcatctgttctgagactgcatcagatctgttgctgcactcagcactggtgcaggagaccgcctacatcgaagaccggcccctgcatatgttgtactgtgctgcggaagagaactgcctggccagctcagcccgctcagccaactggccctatggtcaccggcgtctgctccgattctcctcccagatccacaacctgggacgagctgacttcaggcccaaggctgggcgccactcctgggtgtggcacgagtgccatgggcattaccacagcatggacatcttcactcactatgatatcctcaccccaaatggcaccaaggtggctgagggccacaaagctagtttctgtctcgaagacactgagtgtcaggaggatgtctccaagcggtatgagtgtgccaactttggagagcaaggcatcactgtgggttgctgggatctctaccggcatgacattgactgtcagtggattgacatcacggatgtgaagccaggaaactacattctccaggttgtcatcaacccaaactttgaagtagcagagagtgactttaccaacaatgcaatgaaatgtaactgcaaatatgatggacatagaatctgggtgcacaactgccacattggtgatgccttcagtgaagaggccaacaggaggtttgaacgctaccctggccagaccagcaaccagattatctaagtgccactgccctctgcaaaccaccactggcccctaatggcaggggtctgaggctgccattacctcaggagcttaccaagaaacccatgtcagcaaccgcactcatcagaccatgcactatggatgtggaactgtcaagcagaagttttcaccctccttcagaggccagctgtcagtatctgtagccaagcatgggaatctttgctcccaggcccagcaccgagcagaacagaccagagcccaccacaccacaaagagcagcacctgactaactgcccacaaaagatggcagcagctcattttctttaataggaggtcaggatggtcagctccagtatctcccctaagtttagggggatacagctttacctctagccttttggtgggggaaaagatccagccctcccacctcattttttactataatatgttgctaggtataattttattttatataaaaagtgtttctgtgattcttcagagcccaggagtcagtgctggtggttggagggacctgcccccactggttcatttaaccctctgtctcggtgccctcagaacctcagccagaaaggcaaggaggaaatcagagcaggagcctcatactcttggtgatctattcattctgtgacctcaggggtcacatataaggtcagtgtttctcgtccccgccggatctgcactgccaactgggattgggttcgaacagcttcataaacatcttcagcattttgtaccatctgctccccaatggccaaaatcacatcaccaggccgcagaccagccctatagagaaaaatggacagagagaaaggaaggagtacaaagcctagttcaaggacacatgcacaccttgcccatccccatatcacactgcagcctctccctcaccggtgtgcaggggagcccaggatgactttatggatgagtacaccatgctgaacatcgggaaagcttggttctcgaagctgtagttcagcaaggatgctgaaagtacacagatcaccctattagccaaacccaggcattctccccatcctgagttccacctcaagtctctcatcaacacattgataaatatatggacaggacatgggctaggtactacaaaatacaatggcaactcactttctgtcttctagcaataaagtgcaacatgtacataaaa

SEQ ID NO: 150415 - DNA, 2398 bp, Homo sapiens
  Payload ID: 9707
  Gene Symbol: LOXL3
  Gene Name: lysyl oxidase-like 3
  Uniprot ID: P58215
  ENST ID: ENST00000393937
  CDS Start-End: 96-1922
tttttttttttttttggaagtcctaggactgatctccaggaccagcactcttctcccagcccttagggtcctgctcggccaaggccttccctgccatgcgacctgtcagtgtctggcagtggagcccctgggggctgctgctgtgcctgctgtgcagttcgtgcttggggtctccgtccccttccacgggccctgagaagaaggccgggagccaggggcttcggttccggctggctggcttccccaggaagccctacgagggccgcgtggagatacagcgagctggtgaatggggcaccatctgcgatgatgacttcacgctgcaggctgcccacatcctctgccgggagctgggcttcacagaggccacaggctggacccacagtgccaaatatggccctggaacaggccgcatctggctggacaacttgagctgcagtgggaccgagcagagtgtgactgaatgtgcctcccggggctgggggaacagtgactgtacgcacgatgaggatgctggggtcatctgcaaagaccagcgcctccctggcttctcggactccaatgtcattgaggcccgtgtccgtctaaagggcggcgcccaccctggagagggccgggtagaagtcctgaaggccagcacatggggcacagtctgtgaccgcaagtgggacctgcatgcagccagcgtggtgtgtcgggagctgggcttcgggagtgctcgagaagctctgagtggcgctcgcatggggcagggcatgggtgctatccacctgagtgaagttcgctgctctggacaggagctctccctctggaagtgcccccacaagaacatcacagctgaggattgttcacatagccaggatgccggggtccggtgcaacctaccttacactggggcagagaccaggatccgactcagtgggggccgcagccaacatgaggggcgagtcgaggtgcaaatagggggacctgggccccttcgctggggcctcatctgtggggatgactgggggaccctggaggccatggtggcctgtaggcaactgggtctgggctacgccaaccacggcctgcaggagacctggtactgggactctgggaatataacagaggtggtgatgagtggagtgcgctgcacagggactgagctgtccctggatcagtgtgcccatcatggcacccacatcacctgcaagaggacagggacccgcttcactgctggagtcatctgttctgagactgcatcagatctgttgctgcactcagcactggtgcaggagaccgcctacatcgaagaccggcccctgcatatgttgtactgtgctgcggaagagaactgcctggccagctcagcccgctcagccaactggccctatggtcaccggcgtctgctccgattctcctcccagatccacaacctgggacgagctgacttcaggcccaaggctgggcgccactcctgggtgtggcacgagtgccatgggcattaccacagcatggacatcttcactcactatgatatcctcaccccaaatggcaccaaggtggctgagggccacaaagctagtttctgtctcgaagacactgagtgtcaggaggatgtctccaagcggtatgagtgtgccaactttggagagcaaggcatcactgtgggttgctgggatctctaccggcatgacattgactgtcagtggattgacatcacggatgtgaagccaggaaactacattctccaggttgtcatcaacccaaactttgaagtagcagagagtgactttaccaacaatgcaatgaaatgtaactgcaaatatgatggacatagaatctgggtgcacaactgccacattggtgatgccttcagtgaagaggccaacaggaggtttgaacgctaccctggccagaccagcaaccagattatctaagtgccactgccctctgcaaaccaccactggcccctaatggcaggggtctgaggctgccattacctcaggagcttaccaagaaacccatgtcagcaaccgcactcatcagaccatgcactatggatgtggaactgtcaagcagaagttttcaccctccttcagaggccagctgtcagtatctgtagccaagcatgggaatctttgctcccaggcccagcaccgagcagaacagaccagagcccaccacaccacaaagagcagcacctgactaactgcccacaaaagatggcagcagctcattttctttaataggaggtcaggatggtcagctccagtatctcccctaagtttagggggatacagctttacctctagccttttggtgggggaaaagatccagccctcccacctcattttttactataatatgttgctaggtataattttattttatataaaaagtgtttctgtgattc

SEQ ID NO: 150416 - DNA, 2005 bp, Homo sapiens
  Payload ID: 9707
  Gene Symbol: LOXL3
  Gene Name: lysyl oxidase-like 3
  ENST ID: ENST00000409986
  CDS Start-End: 99-1859
gcatttttttttttttttggaagtcctaggactgatctccaggaccagcactcttctcccagcccttagggtcctgctcggccaaggccttccctgccatgcgacctgtcagtgtctggcagtggagcccctgggggctgctgctgtgcctgctgtgcagttcgtgcttggggtctccgtccccttccacgggccctgagaagaaggccgggagccaggggcttcggttccggctggctggcttccccaggaagccctacgagggccgcgtggagatacagcgagctggtgaatggggcaccatctgcgatgatgacttcacgctgcaggctgcccacatcctctgccgggagctgggcttcacagaggccacaggctggacccacagtgccaaatatggccctggaacaggccgcatctggctggacaacttgagctgcagtgggaccgagcagagtgtgactgaatgtgcctcccggggctgggggaacagtgactgtacgcacgatgaggatgctggggtcatctgcaaagaccagcgcctccctggcttctcggactccaatgtcattgaggcccgtgtccgtctaaagggcggcgcccaccctggagagggccgggtagaagtcctgaaggccagcacatggggcacagtctgtgaccgcaagtgggacctgcatgcagccagcgtggtgtgtcgggagctgggcttcgggagtgctcgagaagctctgagtggcgctcgcatggggcagggcatgggtgctatccacctgagtgaagttcgctgctctggacaggagctctccctctggaagtgcccccacaagaacatcacagctgaggattgttcacatagccaggatgccggggtccggtgcaacctaccttacactggggcagagaccaggatccgactcagtgggggccgcagccaacatgaggggcgagtcgaggtgcaaatagggggacctgggccccttcgctggggcctcatctgtggggatgactgggggaccctggaggccatggtggcctgtaggcaactgggtctgggctacgccaaccacggcctgcaggagacctggtactgggactctgggaatataacagaggtggtgatgagtggagtgcgctgcacagggactgagctgtccctggatcagtgtgcccatcatggcacccacatcacctgcaagaggacagggacccgcttcactgctggagtcatctgttctgagactgcatcagatctgttgctgcactcagcactggtgcaggagaccgcctacatcgaagaccggcccctgcatatgttgtactgtgctgcggaagagaactgcctggccagctcagcccgctcagccaactggccctatggtcaccggcgtctgctccgattctcctcccagatccacaacctgggacgagctgacttcaggcccaaggctgggcgccactcctgggtgtggcacgagtgccatgggcattaccacagcatggacatcttcactcactatgatatcctcaccccaaatggcaccaaggtggctgagggccacaaagctagtttctgtctcgaagacactgagtgtcaggaggatgtctccaagcggtatgagtgtgccaactttggagagcaaggcatcactgtgggttgctgggatctctaccggcatgacattgactgtcagtggattgacatcacggatgtgaagccaggaaactacattctccaggttgtcatcaacccaaactttgaagtagcagagagtgactttaccaacaatgcaatgaaatgtaactgcaaatatgatggacatagaatctgggtgcacaactgccacattggtatttgatgggaagagcaacccaggaagattaggggatgggagggaaagacgttcattctcttttccatagcttgtttctccatcttcccaccttcctgtagagctctcagtccctccacttctacccacccttctccacagtgcatctatct

SEQ ID NO: 150417 - DNA, 2897 bp, Homo sapiens
  Payload ID: 9707
  Gene Symbol: LOXL3
  Gene Name: lysyl oxidase-like 3
  ENST ID: ENST00000409549
  CDS Start-End: 451-2544
atactgagtgcttagttctttgcctatcactttctatccgttgtctctctcctctgtgtctttctggttttctctctctcattcccacagtctcccttcctctcacatcctgtctgtctgggtcttcctctctctctacgtgtctcttgctcagtctctatctctttttattgacccttctctgactctcgatctctcatagttgtctcttatctctgggtctctcaggctgtgcctctatgacctgtgcctcagcccttatttaatgtgtttctctccctgtctcttggtccctggggctctttctctcctgttgtctctcgctgtctctgtcttactcagtgtctgtttttctttcgtgacttctccctctctttctgactctgggccccactcaatctgtttctctcacgcacactttgtctctggggcacccaggccttccctgccatgcgacctgtcagtgtctggcagtggagcccctgggggctgctgctgtgcctgctgtgcagttcgtgcttggggtctccgtccccttccacgggccctgagaagaaggccgggagccaggggcttcggttccggctggctggcttccccaggaagccctacgagggccgcgtggagatacagcgagctggtgaatggggcaccatctgcgatgatgacttcacgctgcaggctgcccacatcctctgccgggagctgggcttcacagaggccacaggctggacccacagtgccaaatatggccctggaacaggccgcatctggctggacaacttgagctgcagtgggaccgagcagagtgtgactgaatgtgcctcccggggctgggggaacagtgactgtacgcacgatgaggatgctggggtcatctgcaaagaccagcgcctccctggcttctcggactccaatgtcattgaggtagagcatcacctgcaagtggaggaggtgcgaattcgacccgccgttgggtggggcagacgacccctgcccgtgacggaggggctggtggaagtcaggcttcctgacggctggtcgcaagtgtgcgacaaaggctggagcgcccacaacagccacgtggtctgcgggatgctgggcttccccagcgaaaagagggtcaacgcggccttctacaggctgctagcccaacggcagcaacactcctttggtctgcatggggtggcgtgcgtgggcacggaggcccacctctccctctgttccctggagttctatcgtgccaatgacaccgccaggtgccctggggggggccctgcagtggtgagctgtgtgccaggccctgtctacgcggcatccagtggccagaagaagcaacaacagtcgaagcctcagggggaggcccgtgtccgtctaaagggcggcgcccaccctggagagggccgggtagaagtcctgaaggccagcacatggggcacagtctgtgaccgcaagtgggacctgcatgcagccagcgtggtgtgtcgggagctgggcttcgggagtgctcgagaagctctgagtggcgctcgcatggggcagggcatgggtgctatccacctgagtgaagttcgctgctctggacaggagctctccctctggaagtgcccccacaagaacatcacagctgaggattgttcacatagccaggatgccggggtccggtgcaacctaccttacactggggcagagaccagggagacctggtactgggactctgggaatataacagaggtggtgatgagtggagtgcgctgcacagggactgagctgtccctggatcagtgtgcccatcatggcacccacatcacctgcaagaggacagggacccgcttcactgctggagtcatctgttctgagactgcatcagatctgttgctgcactcagcactggtgcaggagaccgcctacatcgaagaccggcccctgcatatgttgtactgtgctgcggaagagaactgcctggccagctcagcccgctcagccaactggccctatggtcaccggcgtctgctccgattctcctcccagatccacaacctgggacgagctgacttcaggcccaaggctgggcgccactcctgggtgtggcacgagtgccatgggcattaccacagcatggacatcttcactcactatgatatcctcaccccaaatggcaccaaggtggctgagggccacaaagctagtttctgtctcgaagacactgagtgtcaggaggatgtctccaagcggtatgagtgtgccaactttggagagcaaggcatcactgtgggttgctgggatctctaccggcatgacattgactgtcagtggattgacatcacggatgtgaagccaggaaactacattctccaggttgtcatcaacccaaactttgaagtagcagagagtgactttaccaacaatgcaatgaaatgtaactgcaaatatgatggacatagaatctgggtgcacaactgccacattggtgatgccttcagtgaagaggccaacaggaggtttgaacgctaccctggccagaccagcaaccagattatctaagtgccactgccctctgcaaaccaccactggcccctaatggcaggggtctgaggctgccattacctcaggagcttaccaagaaacccatgtcagcaaccgcactcatcagaccatgcactatggatgtggaactgtcaagcagaagttttcaccctccttcagaggccagctgtcagtatctgtagccaagcatgggaatctttgctcccaggcccagcaccgagcagaacagaccagagcccaccacaccacaaagagcagcacctgactaactgcccacaaaagatggcagcagctcattttctttaataggaggtcaggatggtcagctccagtatctcccctaagtttag

SEQ ID NO: 150418 - DNA, 2431 bp, Homo sapiens
  Payload ID: 9707
  Gene Symbol: LOXL3
  Gene Name: lysyl oxidase-like 3
  ENST ID: ENST00000409249
  CDS Start-End: 14-1429
ggccttccctgccatgcgacctgtcagtgtctggcagtggagcccctgggggctgctgctgtgcctgctgtgcagttcgtgcttggggtctccgtccccttccacgggccctgagaagaaggccgggagccaggggcttcggttccggctggctggcttccccaggaagccctacgagggccgcgtggagatacagcgagctggtgaatggggcaccatctgcgatgatgacttcacgctgcaggctgcccacatcctctgccgggagctgggcttcacagaggccacaggctggacccacagtgccaaatatggccctggaacaggccgcatctggctggacaacttgagctgcagtgggaccgagcagagtgtgactgaatgtgcctcccggggctgggggaacagtgactgtacgcacgatgaggatgctggggtcatctgcaaagaccagcgcctccctggcttctcggactccaatgtcattgaggtagagcatcacctgcaagtggaggaggtgcgaattcgacccgccgttgggtggggcagacgacccctgcccgtgacggaggggctggtggaagtcaggcttcctgacggctggtcgcaagtgtgcgacaaaggctggagcgcccacaacagccacgtggtctgcgggatgctgggcttccccagcgaaaagagggtcaacgcggccttctacaggctgctagcccaacggcagcaacactcctttggtctgcatggggtggcgtgcgtgggcacggaggcccacctctccctctgttccctggagttctatcgtgccaatgacaccgccaggtgccctggggggggccctgcagtggtgagctgtgtgccaggccctgtctacgcggcatccagtggccagaagaagcaacaacagtcgaagcctcagggggaggcccgtgtccgtctaaagggcggcgcccaccctggagagggccgggtagaagtcctgaaggccagcacatggggcacagtctgtgaccgcaagtgggacctgcatgcagccagcgtggtgtgtcgggagctgggcttcgggagtgctcgagaagctctgagtggcgctcgcatggggcaggatgtctccaagcggtatgagtgtgccaactttggagagcaaggcatcactgtgggttgctgggatctctaccggcatgacattgactgtcagtggattgacatcacggatgtgaagccaggaaactacattctccaggttgtcatcaacccaaactttgaagtagcagagagtgactttaccaacaatgcaatgaaatgtaactgcaaatatgatggacatagaatctgggtgcacaactgccacattggtgatgccttcagtgaagaggccaacaggaggtttgaacgctaccctggccagaccagcaaccagattatctaagtgccactgccctctgcaaaccaccactggcccctaatggcaggggtctgaggctgccattacctcaggagcttaccaagaaacccatgtcagcaaccgcactcatcagaccatgcactatggatgtggaactgtcaagcagaagttttcaccctccttcagaggccagctgtcagtatctgtagccaagcatgggaatctttgctcccaggcccagcaccgagcagaacagaccagagcccaccacaccacaaagagcagcacctgactaactgcccacaaaagatggcagcagctcattttctttaataggaggtcaggatggtcagctccagtatctcccctaagtttagggggatacagctttacctctagccttttggtgggggaaaagatccagccctcccacctcattttttactataatatgttgctaggtataattttattttatataaaaagtgtttctgtgattcttcagagcccaggagtcagtgctggtggttggagggacctgcccccactggttcatttaaccctctgtctcggtgccctcagaacctcagccagaaaggcaaggaggaaatcagagcaggagcctcatactcttggtgatctattcattctgtgacctcaggggtcacatataaggtcagtgtttctcgtccccgccggatctgcactgccaactgggattgggttcgaacagcttcataaacatcttcagcattttgtaccatctgctccccaatggccaaaatcacatcaccaggccgcagaccagccctatagagaaaaatggacagagagaaaggaaggagtacaaagcctagttcaaggacacatgcacaccttgcccatccccatatcacactgcagcctctccctcaccggtgtgcaggggagcccaggatgactttatggatgagtacaccatgctgaacatcgggaaagcttggttctcgaagctgtagttcagcaaggatgctgaaagtacacaga

SEQ ID NO: 150419 - DNA, 1001 bp, Homo sapiens
  Payload ID: 9707
  Gene Symbol: LOXL3
  Gene Name: lysyl oxidase-like 3
  ENST ID: ENST00000413469
  CDS Start-End: 92-1001
cccgggcttctgaggcgtctaccttcccaggtagggctgtacaaggagttctccagcatctccagggcagaaagcttaggccttccctgccatgcgacctgtcagtgtctggcagtggagcccctgggggctgctgctgtgcctgctgtgcagttcgtgcttggggtctccgtccccttccacgggccctgagaagaaggccgggagccaggggcttcggttccggctggctggcttccccaggaagccctacgagggccgcgtggagatacagcgagctggtgaatggggcaccatctgcgatgatgacttcacgctgcaggctgcccacatcctctgccgggagctgggcttcacagaggccacaggctggacccacagtgccaaatatggccctggaacaggccgcatctggctggacaacttgagctgcagtgggaccgagcagagtgtgactgaatgtgcctcccggggctgggggaacagtgactgtacgcacgatgaggatgctggggtcatctgcaaagaccagcgcctccctggcttctcggactccaatgtcattgaggtagagcatcacctgcaagtggaggaggtgcgaattcgacccgccgttgggtggggcagacgacccctgcccgtgacggaggggctggtggaagtcaggcttcctgacggctggtcgcaagtgtgcgacaaaggctggagcgcccacaacagccacgtggtctgcgggatgctgggcttccccagcgaaaagagggtcaacgcggccttctacaggctgctagcccaacggcagcaacactcctttggtctgcatggggtggcgtgcgtgggcacggaggcccacctctccctctgttccctggagttctatcgtgccaatgacaccgccaggtgccctggggggggccctgcagtggtgagctgtgtgccaggccctgtctacgcggcatccagtggccagaagaagcaacaacagtcgaagcctcaggggg

SEQ ID NO: 150420 - DNA, 539 bp, Homo sapiens
  Payload ID: 9707
  Gene Symbol: LOXL3
  Gene Name: lysyl oxidase-like 3
  ENST ID: ENST00000420535
  CDS Start-End: 1-539
gcgacaaaggctggagcgcccacaacagccacgtggtctgcgggatgctgggcttccccagcgaaaagagggtcaacgcggccttctacaggcccgtgtccgtctaaagggcggcgcccaccctggagagggccgggtagaagtcctgaaggccagcacatggggcacagtctgtgaccgcaagtgggacctgcatgcagccagcgtggtgtgtcgggagctgggcttcgggagtgctcgagaagctctgagtggcgctcgcatggggcagggcatgggtgctatccacctgagtgaagttcgctgctctggacaggagctctccctctggaagtgcccccacaagaacatcacagctgaggattgttcacatagccaggatgccggggtccggtgcaacctaccttacactggggcagagaccaggatccgactcagtgggggccgcagccaacatgaggggcgagtcgaggtgcaaatagggggacctgggccccttcgctggggcctcatctgtggggatgactgggggaccctgg

SEQ ID NO: 150421 - DNA, 3653 bp, Homo sapiens
  Payload ID: 9708
  Gene Symbol: LOXL4
  Gene Name: lysyl oxidase-like 4
  Uniprot ID: Q96JB6
  ENST ID: ENST00000260702
  CDS Start-End: 152-2422
ggctggggggccgcgggcgggaggcggataaaaaggccccagggcgcccggggagggagcccgttagcgctgctccgccgcggcgcccgcccagccccggactgtccgcgctccatctggtatcttggcctcagctgtccttgaagtcaccatggcgtggtccccaccagccaccctctttctgttcctgctgctgctaggccagccccctcccagcaggccacagtcactgggcaccactaagctccggctggtgggcccagagagcaagccagaggagggccgcctggaggtgctgcaccagggccagtggggcaccgtgtgtgatgacaactttgctatccaggaggccacagtggcttgccgccagctgggcttcgaagctgccttgacctgggcccacagtgccaagtacggccaaggggagggacccatctggctggacaatgtgcgctgtgtgggcacagagagctccttggaccagtgcgggtctaatggctggggagtcagtgactgcagtcactcagaagacgtaggggtgatatgccacccccggcgccatcgtggctacctttctgaaactgtctccaatgcccttgggccccagggccggcggctggaggaggtgcggctcaagcccatccttgccagtgccaagcagcatagcccagtgaccgagggagccgtggaggtgaagtatgagggccactggcggcaggtgtgtgaccagggctggaccatgaacaacagcagggtggtgtgcgggatgctgggcttccccagcgaggtgcctgtcgacagccactactacaggaaagtctgggatctgaagatgagggaccctaagtctaggctgaagagcctgacgaataagaactccttctggatccaccaggtcacctgcctggggacagagccccacatggccaactgccaggtgcaggtggctccagcccggggcaagctgcggccagcctgcccaggtggcatgcacgctgtggtcagctgtgtggcagggcctcacttccgcccaccgaagacaaagccacaacgcaaagggtcctgggcagaggagccgagggtgcgcctgcgctccggggcccaggtgggcgagggccgggtggaagtgctcatgaaccgccagtggggcacggtctgtgaccacaggtggaacctcatctctgccagtgtcgtgtgtcgtcagctgggctttggctctgctcgggaggccctctttggggcccggctgggccaagggctagggcccatccacctgagtgaggtgcgctgcaggggatatgagcggaccctcagcgactgccctgccctggaagggtcccagaatggttgccaacatgagaatgatgctgctgtcaggtgcaatgtccctaacatgggctttcagaatcaggtgcgcttggctggtgggcgtatccctgaggaggggctattggaggtgcaggtggaggtgaacggggtcccacgctgggggagcgtgtgcagtgaaaactgggggctcaccgaagccatggtggcctgccgacagctcggcctgggttttgccatccatgcctacaaggaaacctggttctggtcggggacgccaagggcccaggaggtggtgatgagtggggtgcgctgctcaggcacagagctggccctgcagcagtgccagaggcacgggccggtgcactgctcccacggtggcgggcgcttcctggctggagtctcctgcatggacagtgcaccagacctggtgatgaacgcccagctagtgcaggagacggcctacttggaggaccgcccgctcagccagctgtattgtgcccacgaggagaactgcctctccaagtctgcggatcacatggactggccctacggataccgccgcctattgcgcttctccacacagatctacaatctgggccggactgactttcgtccaaagactggacgcgatagctgggtttggcaccagtgccacaggcattaccacagcattgaggtcttcacccactacgacctcctcactctcaatggctccaaggtggctgaggggcacaaggccagcttctgtctggaggacacaaactgccccacaggactgcagcggcgctacgcatgtgccaactttggagaacagggagtgactgtaggctgctgggacacctaccggcatgacattgattgccagtgggtggatatcacagatgtgggccccgggaattatatcttccaggtgattgtgaacccccactatgaagtggcagagtcagatttctccaacaatatgctgcagtgccgctgcaagtatgatgggcaccgggtctggctgcacaactgccacacagggaattcatacccagccaatgcagaactctccctggagcaggaacagcgtctcaggaacaacctcatctgaagctgtcactgcacactcctagctgctgccgatacaccagatacctcagcttattggagccatgcccttcacagagtcccaactcagaggaaaagggccagtgccaaggggcaccaagaacctgctcaggaagccttttgatggcaagatcaccaatccagatggtattgctccctcaggatggctctgggcctgcccctaagggcctgtggcctatggaatatgtcctccaggctttgctcagctgagctcctcttctgtaaggaaacccagtcatccctgaatcttgccacagagatccgggattcaggagctctcagtttcttagggatggactatggcccagtcccccatctaagtggtgctttgcaaatgtcttggaggagtataggacagaggaccaaaatacacagcaggtagtgttagctctctgctaggagctcaaagcaacacaacttgtatcaaaatcacaactggcagagaagctggtggatccaatcctttcttcatctgttgttatttagaactcacctctcacactctgttctttagtgtccttacctttatcttaccacacacatgggtgtttctattatccttggaagcacagacctcgggcatccccttattgcctgatgggccaacaccaacagttacggagtgcttgagaaggggcaagtttcacagaaatggccagatagggccttcctacagagcagcaagagtaggccaagcagaaagactgctgaggtaacacggaccccagcccctgtcagggcctctgccaaggaaataatatggaccatttacctggcaggcagtctgctctctctcaggatcaccacgcatctcaggattggtctaaacttcaagtctcaaccaagtgtctgaagtgaactttgcattgaataaatttttgccatggaaagaacatcaaacaagccactcatctctacagagataagaaaacaagtttggcagagcaagagacagaagaccgtggagaaatcagaagggggaacagtcagtttagttaaggatggaacctgggaaaggccaccattcctgcttgatggggctctgatttgctcttgctcaagtggaataaaaccccatggtcttcttgacatgattcttgatcttttctccactgagacacacttaagtgatgatccttacaggactgacaccctaatgccaataaaagttgctcattatggactgctacaaa

SEQ ID NO: 150422 - DNA, 2005 bp, Homo sapiens
  Payload ID: 9709
  Gene Symbol: KARS
  Gene Name: lysyl-tRNA synthetase
  Uniprot ID: Q15046
  ENST ID: ENST00000302445
  CDS Start-End: 41-1834
gtactatcctccttacttttgggtcgggccctccgggaagatggcggccgtgcaggcggccgaggtgaaagtggatggcagcgagccgaaactgagcaagaatgagctgaagagacgcctgaaagctgagaagaaagtagcagagaaggaggccaaacagaaagagctcagtgagaaacagctaagccaagccactgctgctgccaccaaccacaccactgataatggtgtgggtcctgaggaagagagcgtggacccaaatcaatactacaaaatccgcagtcaagcaattcatcagctgaaggtcaatggggaagacccatacccacacaagttccatgtagacatctcactcactgacttcatccaaaaatatagtcacctgcagcctggggatcacctgactgacatcaccttaaaggtggcaggtaggatccatgccaaaagagcttctgggggaaagctcatcttctatgatcttcgaggagagggggtgaagttgcaagtcatggccaattccagaaattataaatcagaagaagaatttattcatattaataacaaactgcgtcggggagacataattggagttcaggggaatcctggtaaaaccaagaagggtgagctgagcatcattccgtatgagatcacactgctgtctccctgtttgcatatgttacctcatcttcactttggcctcaaagacaaggaaacaaggtatcgccagagatacttggacttgatcctgaatgactttgtgaggcagaaatttatcatccgctctaagatcatcacatatataagaagtttcttagatgagctgggattcctagagattgaaactcccatgatgaacatcatcccagggggagccgtggccaagcctttcatcacttatcacaacgagctggacatgaacttatatatgagaattgctccagaactctatcataagatgcttgtggttggtggcatcgaccgggtttatgaaattggacgccagttccggaatgaggggattgatttgacgcacaatcctgagttcaccacctgtgagttctacatggcctatgcagactatcacgatctcatggaaatcacggagaagatggtttcagggatggtgaagcatattacaggcagttacaaggtcacctaccacccagatggcccagagggccaagcctacgatgttgacttcaccccacccttccggcgaatcaacatggtagaagagcttgagaaagccctggggatgaagctgccagaaacgaacctctttgaaactgaagaaactcgcaaaattcttgatgatatctgtgtggcaaaagctgttgaatgccctccacctcggaccacagccaggctccttgacaagcttgttggggagttcctggaagtgacttgcatcaatcctacattcatctgtgatcacccacagataatgagccctttggctaaatggcaccgctctaaagagggtctgactgagcgctttgagctgtttgtcatgaagaaagagatatgcaatgcgtatactgagctgaatgatcccatgcggcagcggcagctttttgaagaacaggccaaggccaaggctgcaggtgatgatgaggccatgttcatagatgaaaacttctgtactgccctggaatatgggctgccccccacagctggctggggcatgggcattgatcgagtcgccatgtttctcacggactccaacaacatcaaggaagtacttctgtttcctgccatgaaacccgaagacaagaaggagaatgtagcaaccactgatacactggaaagcacaacagttggcacttctgtctagaaaataataattgcaagttgtataactcaggcgtctttgcatttctgcgaaagatcaaggtctgcaagggaattcttgtgtgctgctttccatttgacaccgcagttctgttcagccatcagaagagagacaaggaattaaaaatttctttttaatcctgttaccaaataa

SEQ ID NO: 150423 - DNA, 2421 bp, Homo sapiens
  Payload ID: 9709
  Gene Symbol: KARS
  Gene Name: lysyl-tRNA synthetase
  Uniprot ID: Q15046
  ENST ID: ENST00000319410
  CDS Start-End: 123-2000
acttttgggtcgggccctccgggaagatggcggccgtgcaggcggccgaggtgaaagtggatggcagcgagccgaaactgagcaagaagtggtggtaatcattagttccagggtgctctgccatgttgacgcaagctgctgtaaggcttgttagggggtccctgcgcaaaacctcctgggcagagtggggtcacagggaactgcgactgggtcaacttgctcctttcacagcgcctcacaaggacaagtcattttctgatcaaagaagtgagctgaagagacgcctgaaagctgagaagaaagtagcagagaaggaggccaaacagaaagagctcagtgagaaacagctaagccaagccactgctgctgccaccaaccacaccactgataatggtgtgggtcctgaggaagagagcgtggacccaaatcaatactacaaaatccgcagtcaagcaattcatcagctgaaggtcaatggggaagacccatacccacacaagttccatgtagacatctcactcactgacttcatccaaaaatatagtcacctgcagcctggggatcacctgactgacatcaccttaaaggtggcaggtaggatccatgccaaaagagcttctgggggaaagctcatcttctatgatcttcgaggagagggggtgaagttgcaagtcatggccaattccagaaattataaatcagaagaagaatttattcatattaataacaaactgcgtcggggagacataattggagttcaggggaatcctggtaaaaccaagaagggtgagctgagcatcattccgtatgagatcacactgctgtctccctgtttgcatatgttacctcatcttcactttggcctcaaagacaaggaaacaaggtatcgccagagatacttggacttgatcctgaatgactttgtgaggcagaaatttatcatccgctctaagatcatcacatatataagaagtttcttagatgagctgggattcctagagattgaaactcccatgatgaacatcatcccagggggagccgtggccaagcctttcatcacttatcacaacgagctggacatgaacttatatatgagaattgctccagaactctatcataagatgcttgtggttggtggcatcgaccgggtttatgaaattggacgccagttccggaatgaggggattgatttgacgcacaatcctgagttcaccacctgtgagttctacatggcctatgcagactatcacgatctcatggaaatcacggagaagatggtttcagggatggtgaagcatattacaggcagttacaaggtcacctaccacccagatggcccagagggccaagcctacgatgttgacttcaccccacccttccggcgaatcaacatggtagaagagcttgagaaagccctggggatgaagctgccagaaacgaacctctttgaaactgaagaaactcgcaaaattcttgatgatatctgtgtggcaaaagctgttgaatgccctccacctcggaccacagccaggctccttgacaagcttgttggggagttcctggaagtgacttgcatcaatcctacattcatctgtgatcacccacagataatgagccctttggctaaatggcaccgctctaaagagggtctgactgagcgctttgagctgtttgtcatgaagaaagagatatgcaatgcgtatactgagctgaatgatcccatgcggcagcggcagctttttgaagaacaggccaaggccaaggctgcaggtgatgatgaggccatgttcatagatgaaaacttctgtactgccctggaatatgggctgccccccacagctggctggggcatgggcattgatcgagtcgccatgtttctcacggactccaacaacatcaaggaagtacttctgtttcctgccatgaaacccgaagacaagaaggagaatgtagcaaccactgatacactggaaagcacaacagttggcacttctgtctagaaaataataattgcaagttgtataactcaggcgtctttgcatttctgcgaaagatcaaggtctgcaagggaattcttgtgtgctgctttccatttgacaccgcagttctgttcagccatcagaagagagacaaggaattaaaaatttctttttaatcctgttaccaaataagccatttgtctcttctctttacttttagaatatcaacttttttccccagacttctggcctaatgaatgtttaggattttaccatcttattcatttaacaaatttgtattaatgtctgccctgtgccaggcattattctaagagattggggacacagcagggaacaaaagccaagttcctgcttttgtggaaattgtattctttctttggggtagggagaagaagtagacaaacaaaaaaacaagtaaata

SEQ ID NO: 150424 - DNA, 459 bp, Homo sapiens
  Payload ID: 9709
  Gene Symbol: KARS
  Gene Name: lysyl-tRNA synthetase
  ENST ID: ENST00000568378
  CDS Start-End: 82-285
gcggccgaggtgaaagtggatggcagcgagccgaaactgagcaagaagtggtggtaatcattagttccagggtgctctgccatgttgacgcaagctgctgtaaggcttgttagggggtccctgcgcaaaacctcctgggcagagtggggtcacagggaactgcgactgggtcaacttgctcctttcacagcgcctcacaaggacaagtcattttctgatcaaagaagtacttctgtttcctgccatgaaacccgaagacaagaaggagaatgtagcaaccactgatacactggaaagcacaacagttggcacttctgtctagaaaataataattgcaagttgtataactcaggcgtctttgcatttctgcgaaagatcaaggtctgcaagggaattcttgtgtgctgctttccatttgacaccgcagttctgttcagccatcagaagagagacaaggaa

SEQ ID NO: 150425 - DNA, 644 bp, Homo sapiens
  Payload ID: 9709
  Gene Symbol: KARS
  Gene Name: lysyl-tRNA synthetase
  ENST ID: ENST00000566772
  CDS Start-End: 1-315
attcatattaataacaaactgcgtcggggagacataattggagttcaggggaatcctggtaaaaccaagaagggtgagctgagcatcattccgtatgagatcacactgctgtctccctgtttgcatatgttacctcatcttcactttggcctcaaagacaaggaaacaaggtatcgccagagatacttggacttgatcctgaatgactttgtgaggcagaaatttatcatccgctctaagatcatcacatatataagaagtttcttagatgagctgggattcctagaggtaaggagagttccttgcctgacgtgatgagctgccttgcaatgcttgcctcctcctctcccttgccttccttttccaaagcgtatcctgtgtcaggatccttcatgcctaatgagaatgtccccttttcttgccatcgtctctgttctaccttgtcctgattaggaaggcaggacctgacttccaagataatggacaaggtatagggccatccacatgctaatgatgtcacattcaatatgtattcacgtcattttgcttttttgtagcattaagaaatattttttgattatatgagaaaggcaaacacacgtaccataaaacaaattcaaacaataaattaaatagaagcaaaa

SEQ ID NO: 150426 - DNA, 1942 bp, Homo sapiens
  Payload ID: 9709
  Gene Symbol: KARS
  Gene Name: lysyl-tRNA synthetase
  ENST ID: ENST00000564578
  CDS Start-End: 106-480
tccgggaagatggcggccgtgcaggcggccgaggtgaaagtggatggcagcgagccgaaactgagcaagaagtggtggtaatcattagttccagggtgctctgccatgttgacgcaagctgctgtaaggcttgttagggggtccctgcgcaaaacctcctgggcagagtggggtcacagggaactgcgactgggtcaacttgctcctttcacagcgcctcacaaggacaagtcattttctgatcaaagaagtgagctgaagagacgcctgaaagctgagaagaaagtagcagagaaggaggccaaacagaaagagctcagtgagaaacagctaagccaagccactgctgctgccaccaaccacaccactgataatggtgtgggtcctgaggaagagagcgtggacccaaatgtaggatccatgccaaaagagcttctgggggaaagctcatcttctatgatcttcgaggagagggggtgaagttgcaagtcatggccaattccagaaattataaatcagaagaagaatttattcatattaataacaaactgcgtcggggagacataattggagttcaggggaatcctggtaaaaccaagaagggtgagctgagcatcattccgtatgagatcacactgctgtctccctgtttgcatatgttacctcatcttcactttggcctcaaagacaaggaaacaaggtatcgccagagatacttggacttgatcctgaatgactttgtgaggcagaaatttatcatccgctctaagatcatcacatatataagaagtttcttagatgagctgggattcctagagattgaaactcccatgatgaacatcatcccagggggagccgtggccaagcctttcatcacttatcacaacgagctggacatgaacttatatatgagaattgctccagaactctatcataagatgcttgtggttggtggcatcgaccgggtttatgaaattggacgccagttccggaatgaggggattgatttgacgcacaatcctgagttcaccacctgtgagttctacatggcctatgcagactatcacgatctcatggaaatcacggagaagatggtttcagggatggtgaagcatattacaggcagttacaaggtcacctaccacccagatggcccagagggccaagcctacgatgttgacttcaccccacccttccggcgaatcaacatggtagaagagcttgagaaagccctggggatgaagctgccagaaacgaacctctttgaaactgaagaaactcgcaaaattcttgatgatatctgtgtggcaaaagctgttgaatgccctccacctcggaccacagccaggctccttgacaagcttgttggggagttcctggaagtgacttgcatcaatcctacattcatctgtgatcacccacagataatgagccctttggctaaatggcaccgctctaaagagggtctgactgagcgctttgagctgtttgtcatgaagaaagagatatgcaatgcgtatactgagctgaatgatcccatgcggcagcggcagctttttgaagaacaggccaaggccaaggctgcaggtgatgatgaggccatgttcatagatgaaaacttctgtactgccctggaatatgggctgccccccacagctggctggggcatgggcattgatcgagtcgccatgtttctcacggactccaacaacatcaaggaagtacttctgtttcctgccatgaaacccgaagacaagaaggagaatgtagcaaccactgatacactggaaagcacaacagttggcacttctgtctagaaaataataattgcaagttgtataactcaggcgtctttgcatttctgcgaaagatcaaggtctgcaagggaattcttgtgtgctgctttccatttgacaccgcagttctgttcagccatcagaag

SEQ ID NO: 150427 - DNA, 801 bp, Homo sapiens
  Payload ID: 9709
  Gene Symbol: KARS
  Gene Name: lysyl-tRNA synthetase
  ENST ID: ENST00000562875
  CDS Start-End: 13-243
ccctccgggaagatggcggccgtgcaggcggccgaggtgaaagtggatggcagcgagccgaaactgagcaagaatgagctgaagagacgcctgaaagctgagaagaaagtagcagagaaggaggccaaacagaaagagctcagtgagaaacagctaagccaagccactgctgctgccaccaaccacaccactgataatggtgtgggtcctgaggaagagagcgtggacccaaataaattataaatcagaagaagaatttattcatattaataacaaactgcgtcggggagacataattggagttcaggggaatcctggtaaaaccaagaagggtgagctgagcatcattccgtatgagatcacactgctgtctccctgtttgcatatgttacctcatcttcactttggcctcaaagacaaggaaacaaggtatcgccagagatacttggacttgatcctgaatgactttgtgaggcagaaatttatcatccgctctaagatcatcacatatataagaagtttcttagatgagctgggattcctagagattgaaactcccatgatgaacatcatcccagggggagccgtggccaagcctttcatcacttatcacaacgagctggacatgaacttatatatgagaattgctccagaactctatcataagatgcttgtggttggtggcatcgaccgggtttatgaaattggacgccagttccggaatgaggggattgatttgacgcacaatcctgagttcaccacctgtgagttctacatggcctatgcagactatcacgatct

SEQ ID NO: 150428 - DNA, 649 bp, Homo sapiens
  Payload ID: 9709
  Gene Symbol: KARS
  Gene Name: lysyl-tRNA synthetase
  ENST ID: ENST00000566249
  CDS Start-End: 1-259
ggatggcagcgagccgaaactgagcaagaatgagctgaagagacgcctgaaagctgagaagaaagtagcagagaaggaggccaaacagaaagagctcagtgagaaacagctaagccaagccactgctgctgccaccaaccacaccactgataatggtgtgggtcctgaggaagagagcgtggacccaaatgtaggatccatgccaaaagagcttctgggggaaagctcatcttctatgatcttcgaggagagggggtgaagttgcaagtcatggccaattccagaaattataaatcagaagaagaatttattcatattaataacaaactgcgtcggggagacataattggagttcaggggaatcctggtaaaaccaagaagggtgagctgagcatcattccgtatgagatcacactgctgtctccctgtttgcatatgttacctcatcttcactttggcctcaaagacaaggaaacaaggtatcgccagagatacttggacttgatcctgaatgactttgtgaggcagaaatttatcatccgctctaagatcatcacatatataagaagtttcttagatgagctgggattcctagagattgaaactcccatgatgaacatcatcccagggggagccgtggccaagcctt

SEQ ID NO: 150429 - DNA, 994 bp, Homo sapiens
  Payload ID: 9709
  Gene Symbol: KARS
  Gene Name: lysyl-tRNA synthetase
  ENST ID: ENST00000570215
  CDS Start-End: 227-994
cgggccctccgggaagatggcggccgtgcaggcggccgaggtgaaagtggatggcagcgagccgaaactgagcaagaagtgagtgtcgctgcgagtctttaaagcctttgcggtaggagagtctgggctgggaagcgccgcgaggttcccaccaaggctgctgtgccggggccttcttgccggctctcgtgggtggtggtaatcattagttccagggtgctctgccatgttgacgcaagctgctgtaaggcttgttagggggtccctgcgcaaaacctcctgggcagagtggggtcacagggaactgcgactgggtcaacttgctcctttcacagcgcctcacaaggacaagtcattttctgatcaaagaagtgagctgaagagacgcctgaaagctgagaagaaagtagcagagaaggaggccaaacagaaagagctcagtgagaaacagctaagccaagccactgctgctgccaccaaccacaccactgataatggtgtgggtcctgaggaagagagcgtggacccaaatcaatactacaaaatccgcagtcaagcaattcatcagctgaaggtcaatggggaagacccatacccacacaagttccatgtagacatctcactcactgacttcatccaaaaatatagtcacctgcagcctggggatcacctgactgacatcaccttaaaggtggcaggtaggatccatgccaaaagagcttctgggggaaagctcatcttctatgatcttcgaggagagggggtgaagttgcaagtcatggccaattccagaaattataaatcagaagaagaatttattcatattaataacaaactgcgtcggggagacataattggagttcaggggaatcctggtaaaaccaagaagggtgagctgagcatcattccgtatgagatcacactgctgtctccctgtttgcatatgttacctcatcttcactttggcctcaaagacaaggaaacaaggtatcgc

SEQ ID NO: 150430 - DNA, 870 bp, Homo sapiens
  Payload ID: 9709
  Gene Symbol: KARS
  Gene Name: lysyl-tRNA synthetase
  ENST ID: ENST00000568682
  CDS Start-End: 563-870
cctccgggaagatggcggccgtgcaggcggccgaggtgaaagtggatggcagcgagccgaaactgagcaagaagtgagaagttaattcactcgtccaagtcacataattgacaagtgtgttggaatttagtcccaggcagcctgactacaaagatgtgagctgaagagacgcctgaaagctgagaagaaagtagcagagaaggaggccaaacagaaagagctcagtgagaaacagctaagccaagccactgctgctgccaccaaccacaccactgataatggtgtgggtcctgaggaagagagcgtggacccaaatcaatactacaaaatccgcagtcaagcaattcatcagctgaaggtcaatggggaagacccatacccacacaagttccatgtagacatctcactcactgacttcatccaaaaatatagtcacctgcagcctggggatcacctgactgacatcaccttaaaggtggcaggtaggatccatgccaaaagagcttctgggggaaagctcatcttctatgatcttcgaggagagggggtgaagttgcaagtcatggccaattccagaaattataaatcagaagaagaatttattcatattaataacaaactgcgtcggggagacataattggagttcaggggaatcctggtaaaaccaagaagggtgagctgagcatcattccgtatgagatcacactgctgtctccctgtttgcatatgttacctcatcttcactttggcctcaaagacaaggaaacaaggtatcgccagagatacttggacttgatcctgaatgactttgtgaggcagaaatttatcatccgctctaagatcatcacatatataagaagtttcttaga

SEQ ID NO: 150431 - DNA, 3182 bp, Homo sapiens
  Payload ID: 9710
  Gene Symbol: MB21D1
  Gene Name: Mab-21 domain containing 1
  Uniprot ID: Q8N884
  ENST ID: ENST00000370315
  CDS Start-End: 96-1664
agtagtgcttggtttccaacagctgctgctggctcttcctcttgcggccttttcctgaaacggattcttctttcggggaacagaaagcgccagccatgcagccttggcacggaaaggccatgcagagagcttccgaggccggagccactgcccccaaggcttccgcacggaatgccaggggcgccccgatggatcccaccgagtctccggctgcccccgaggccgccctgcctaaggcgggaaagttcggccccgccaggaagtcgggatcccggcagaaaaagagcgccccggacacccaggagaggccgcccgtccgcgcaactggggcccgcgccaaaaaggcccctcagcgcgcccaggacacgcagccgtctgacgccaccagcgcccctggggcagaggggctggagcctcctgcggctcgggagccggctctttccagggctggttcttgccgccagaggggcgcgcgctgctccacgaagccaagacctccgcccgggccctgggacgtgcccagccccggcctgccggtctcggcccccattctcgtacggagggatgcggcgcctggggcctcgaagctccgggcggttttggagaagttgaagctcagccgcgatgatatctccacggcggcggggatggtgaaaggggttgtggaccacctgctgctcagactgaagtgcgactccgcgttcagaggcgtcgggctgctgaacaccgggagctactatgagcacgtgaagatttctgcacctaatgaatttgatgtcatgtttaaactggaagtccccagaattcaactagaagaatattccaacactcgtgcatattactttgtgaaatttaaaagaaatccgaaagaaaatcctctgagtcagtttttagaaggtgaaatattatcagcttctaagatgctgtcaaagtttaggaaaatcattaaggaagaaattaacgacattaaagatacagatgtcatcatgaagaggaaaagaggagggagccctgctgtaacacttcttattagtgaaaaaatatctgtggatataaccctggctttggaatcaaaaagtagctggcctgctagcacccaagaaggcctgcgcattcaaaactggctttcagcaaaagttaggaagcaactacgactaaagccattttaccttgtacccaagcatgcaaaggaaggaaatggtttccaagaagaaacatggcggctatccttctctcacatcgaaaaggaaattttgaacaatcatggaaaatctaaaacgtgctgtgaaaacaaagaagagaaatgttgcaggaaagattgtttaaaactaatgaaataccttttagaacagctgaaagaaaggtttaaagacaaaaaacatctggataaattctcttcttatcatgtgaaaactgccttctttcacgtatgtacccagaaccctcaagacagtcagtgggaccgcaaagacctgggcctctgctttgataactgcgtgacatactttcttcagtgcctcaggacagaaaaacttgagaattattttattcctgaattcaatctattctctagcaacttaattgacaaaagaagtaaggaatttctgacaaagcaaattgaatatgaaagaaacaatgagtttccagtttttgatgaattttgagattgtatttttagaaagatctaagaactagagtcaccctaaatcctggagaatacaagaaaaatttgaaaaggggccagacgctgtggctcacacctgtaatcccagctctttggaggccgaggcaggcggatcacttgaggtcaggagtttgagaccagcctgaccaacatggtgaaactccatctctactaaaaatataaaaattagccgggcatggtgatgcatgcctgtaatcccagctactcgggaggcttagacatgagaatcacttgaacccaggaggtggaggttgcagtgagtcaagatggcaccactgcactccatcctgggtgacagagcaagacttcctctcaaaaaataaataaataaataagaaaaataaattaggaaattattaaaataattttttagaaaagcaacaaaataacaaaaattagtgactgtaataattggaatgtttgaaatttgtcacagcaataattgactaaaatgaatgtaaataattattcagttttcagtttgttgtaataaactctaatcagtataaaggattgactatcctaggaaaaagattagtcaaggaataagaagcaaaagtagtatttgaaatctaaaaacattaccatgtttgctttatcatgcaggcaaataaataaataaatgacatttttaggttggaataaaaaaagataaagtacatattgccttaattaaattcatcaagttcttactgaaaaacagctctccgccgtgcctggccaggaaatacataattttttttttttttttttagatggagtctcgctctgtcgcccaggctggagtccagtggcatgatcttggctcactgcaagctctgcttcctgggttcatgccattctcctgcctcagccttccgagtagctgggactacaggtgcccgccaccacatccggctaattttttgtatttttagtaaagatggggtttcaccatgttagccaggatggtctcgatctccttaccttgtgatccgcccgccttggcctcccaaagtgctgggattacaggtgtgagccaccacgcctggctgaaatacataatcttaaaagaaaacataagatactttattttaatatacgtgactaaatgtaaaacctaacttattttctgttatctatttatttttactttcagtaacactttttttattttaggtagcattcagcctagaggcaactgctgtttgttaaatatttcctgttcatatattttgcacattttcttatgggttagttttcttctcattgttttgggaagttcttaatatatttggggtatttatctttcattcgttgtctgtgtaacaaataacttctgccatatgggttgtctgcacattttttggtgtcttttagtaaacaaggtttttttgttttgtattgttttgtttattgtaaagatttttaaattttaatggagttgatttcttttctcattcaagcttttgagaataaattggagttgaatttttta

SEQ ID NO: 150432 - DNA, 1917 bp, Homo sapiens
  Payload ID: 9710
  Gene Symbol: MB21D1
  Gene Name: Mab-21 domain containing 1
  Uniprot ID: Q8N884
  ENST ID: ENST00000370318
  CDS Start-End: 79-1422
aacagctgctgctggctcttcctcttgcggccttttcctgaaacggattcttctttcggggaacagaaagcgccagccatgcagccttggcacggaaaggccatgcagagagcttccgaggccggagccactgcccccaaggcttccgcacggaatgccaggggcgccccgatggatcccaccgagtctccggctgcccccgaggccgccctgcctaaggcgggaaagttcggccccgccaggaagtcgggatcccggcagaaaaagagcgccccggacacccaggagaggccgcccgtccgcgcaactggggcccgcgccaaaaaggcccctcagcgcgcccaggacacgcagccgtctgacgccaccagcgcccctggggcagaggggctggagcctcctgcggctcgggagccggctctttccagggctggttcttgccgccagaggggcgcgcgctgctccacgaagccaagacctccgcccgggccctgggacgtgcccagccccggcctgccggtctcggcccccattctcgtacggagggatgcggcgcctggggcctcgaagctccgggcggttttggagaagttgaagctcagccgcgatgatatctccacggcggcggggatggtgaaaggggttgtggaccacctgctgctcagactgaagtgcgactccgcgttcagaggcgtcgggctgctgaacaccgggagctactatgagcacgtgaagatttctgcacctaatgaatttgatgtcatgtttaaactggaagtccccagaattcaactagaagaatattccaacactcgtgcatattactttgtgaaatttaaaagaaatccgaaagaaaatcctctgagtcagtttttagaaggtgaaatattatcagcttctaagatgctgtcaaagtttaggaaaatcattaaggaagaaattaacgacattaaagatacagatgtcatcatgaagaggaaaagaggagggagccctgctgtaacacttcttattagtgaaaaaatatctgtggatataaccctggctttggaatcaaaaagtagctggcctgctagcacccaagaaggcctgcgcattcaaaactggctttcagcaaaagttaggaagcaactacgactaaagccattttaccttgtacccaagcatgcaaaggaaggaaatggtttccaagaagaaacatggcggctatccttctctcacatcgaaaaggaaattttgaacaatcatggaaaatctaaaacgtgctgtgaaaacaaagaagagaaatgttgcaggaaagattgtttaaaactaatgaaataccttttagaacagctgaaagaaaggtttaaagacaaaaaacatctggataaattctcttcttatcatgtgaaaactgccttctttcacagactctactgatatatttccaagtattaggtcacttgataagtgatccgcactgaagcaaaagataaactcagcattcttaggtgcttattctaatgccaccagttttacttctgttagcaaaaatctaaagtaacataacagacttatcacccccatttggaattagtatacaaatagaaatgatcctaatcaatttaattaattataatggacacacaagaaaaaatacctacacagcttttcgagaaacgaagacaatgactttgtctgtggatgacatactctgtagaaaagtttgcatgtgactccatttctcttcctcggtggttacaattatattttgcttcactgaacttacagcctaaaggattcaaagaacatagttcatcaaggtcatcatgattgagggtgagaccgcatacatcagctcaaaatgcatcttctctctcattggttaatgtttttaataaactgctaagcaaaatggcagacgtcctaaaaaaa

SEQ ID NO: 150433 - DNA, 3368 bp, Homo sapiens
  Payload ID: 9711
  Gene Symbol: MB21D2
  Gene Name: Mab-21 domain containing 2
  Uniprot ID: Q8IYB1
  ENST ID: ENST00000392452
  CDS Start-End: 322-1797
agttggctctacgaccgccgttgccgctgccagagagggccagggcagggcagggacgcgcagcatcggggcgggcgtggggccggagaaaagggtgtcggggccacacacgcaccctcgctgcagtccagctcctcccgaagctcgcacgcccagagcgcacggagcgggggactgcccgcccagacgcccgcccgccaacccgcccacgagccggggccaaagcctgggagcctgcgaggggaggaggcccaggggggcggggtggggggcgggggtgggtgccgcgctgccgcggagctgctactcggcgcgttttgcatgaagatggcggctcccaccgccaacaaggcagcctccctgggctgtaacaacaagcctgcgttcccggagctggatttcaggtcgggagctcgggtggaggaattgaacaaactcatccaagaatttacgaagcacgaccagcgggaatacgacgaccagagagcgctggagattcacacagccaaggatttcatcttttccatgctgggaatggtgcaaaagctggaccaaaagcttccagtggctaatgaatacctgttgctctctggaggtgtccgggaaggcgtggtggacctggacttagatgagcttaatgtctatgcccggggtactgactatgatatggactttaccctcttggtgccagccctcaagctgcatgaccgtaatcagcctgtgacactcgacatgcgccactcagccttgtgccactcttggctgagccttcggctctttgatgaggggacaatcagtaaatggaaagactgctgcaccattgtagatcacatcaatggtgccaccaactacttcttctcacctaccaaagtggctgactggttctatgactctatcagcattgtcctatcagaaatacagaagaaaccccagcgagggatgccaaaggtagaaaaggtggaaaaaaatgggaccatcatctccatcattctgggtgtagggagtagtcgcatgttgtatgatattgtccctgtggtatctttcaaaggttggcctgcagtggcccagagctggctcatggagaaccacttttgggatgggaagattactgaggaagaggtcatcagtgggttttacttggtgcctgcttgctcctacaagggtaagaaggacaatgaatggcggctgtcctttgccaggagcgaggtgcagttgaagaagtgcatctccagcagcctcatgcaggcctatcaggcctgcaaagccatcatcattaaactgctgtcccggcccaaggctattagcccctatcacctgcggagcatgatgctctgggcctgcgacagacttcctgccaactacttggctcaagaagactatgcagcccactttttgctgggcctcatcgatgacctgcaacactgtctggtcaacaagatgtgccccaattatttcatccctcagtgcaacatgctggaacatctgtctgaggagacagtcatgcttcacgcccggaagctgtcctctgtgcgctcagacccggcagagcacttgcgcaccgccattgagcatgtcaaggcagccaaccggctgacactggagctccagaggcgaggtagcaccaccagcatcccctctccacagtctgacggaggggaccccaaccagcctgatgaccgtttggcaaaaaaactgcagcagctagtgactgagaacccgggaaagtcaatctctgtctttatcaatcctgacgatgtcacaaggccccatttcagaattgatgacaaatttttctgagtgttagctgacttttttttttcctgattcttaaactctgataatgtgtcgtgtggtttgtgatgctatctttctgttttttacatatccagcctagattggatttgttaagaacaaattttaagtttcctggttctgcaggatggtgcaggctctgaaacagtatattactatttcatattctgcctctgatttcgttgtttactttttgtagttattgtcatgctctttagtttgttggagttttttttctttttaaggagatcttaagccatagatgaaaatgcccatgaatcctcttgcttttttctgtttcatacttggtgcaaatttgttcatgggtatggggaaacaaatctctttctgatgcttaacgattctatcctattatttttattattttgtttttgtcttttttcttatgagctttcaccactactgatatttgagaatcatatgaacctgggaactacttggcatgttagctggatttatttattttggccagtgaccagagtagtttccccccttttccaccaaacaatgtaaactttgaaagtgataatactacaaattgtgttttggagcaacttcattgaatgtaattgtcctcaaatcagagaacactgggtggtttgaagggtgtctttgacagttttccaagcagaattaaggtttccaaatgttaattttagcatatgtaattatttgaagccttatttaaatcctattaaagaacataccattataattattatttgcactaatctttgccattgtcagaattgcaaagtgtgtttcaatataaattaacaaccactctcgaaattctatcattttttcattttgcccatttctatcagtgaaatgattctttgcatttgcttagttctccttcagttgtggggtcctgctttgccctctttgatattcctggttcctgtcttactgagagaagttgttaaagctttatacatgttgaccccatctaaagctggggaaaatatacacttgatgaagtaggtgtctttgtatttatttcttttggggtcatagaggtaagcttttttgtaaaatctctactcttcctgagagttttgagaaaaactggcaggaagaacttataatccccaaatagaagataccacgtctgttcaaaagcaggtattgctatagagcagcacccaggaaatatctgtgggtggcagccttggtatagaggtgtcctgtcttcatgagtgaagttacttgcctgattaggtgctggaaggtattggctccctgttttggtgtggactcatggcaagctggtgtttaagaggtcaggaggcctgctgatctttcaaaggacacccatgatgtctactcatagaaagggcaagtaacgtgttcattttggtcttgaatgtccaaactcaagggttggattttggccaattgaaatcagacatatgcgatcttgggtttttgcatggaaattaatgtaatgcttataaatgaaaaatgaaaacatttcaaccatctaagtcaaacacaaaaataataaaaaaagaaacatactggccttgaaa

SEQ ID NO: 150434 - DNA, 3028 bp, Homo sapiens
  Payload ID: 9712
  Gene Symbol: MAB21L1
  Gene Name: mab-21-like 1 (C. elegans)
  Uniprot ID: Q13394
  ENST ID: ENST00000379919
  CDS Start-End: 1072-2151
tacacaggtactcctccatctaaagccaacttccatatgccagtagtctgcatgaaagaacaaactttcaacctgcatttaagaagaccccaaggattaacagacgttaattatcttactctaaatgcaagttagtgattttgttttagaaaaccccgtcaagatcactaattgatggatgcccattaatacacctgtatttgcatttcagcggtaaaagacaagcaggttttcggcacagaagagagccgctttgccaagtcttttcaaaacgtcaatatgcttcaagtaataccaaagctgagagattcctcttgatttccaaactgtctaggtggcctgagtggttttccgccggcagcagcctcctacctttagtttgtgtgcctatatccatgagtggggattaattagccgggttggagctgaaggaggctgtcgtgacgagcccagtggcgattggccgcccgcctgcctggccctgcctttataatttccacacgagtgcatctgggctcttagacaaaccaacagcagcttcttctgacatatacacacgcacactcaccccggacacacactcagcacacttttcctccatttgattaacagtgctgcacacacaatgattacgggaaagcgcaaataaatacggaaaggggtgcttattttgactactggaagagctttgctgggtctcagcgcaacttttgttttttattcctgagaaggtgatctctccatgcggttctctcacacaaggattctttaaaagaggaagagagacaagcagaggggggaggacagtctttcactttaagaacggctgggctcaaagataaaaggaagggaaaagcagcagcagcagcagcagcagcagcagcagcagcagcagcagcagcagcagcagcagggaaaccaacgctgcagcacttccgaaaggcatttttgatccatttctgagtgttgcggcccgtttctccaccgaagttggctccagctctagcagccgcattggatcccacagcttactgcgagactccggtgtacaatccggatctctgccccaacatgattgcggcccaggccaagctggtctaccatctgaataaatactacaacgaaaaatgccaagccaggaaagctgccattgccaaaactatccgggaagtctgcaaagtagtttccgacgtactgaaggaagtggaagtgcaggagccgcggttcatcagctctctcaacgagatggacaatcgctacgagggcctcgaggtcatctcccccaccgaatttgaagtggtgctttatctcaaccaaatgggggtgttcaacttcgtggacgatggctcactgcccggctgcgcggtgctgaagttgagcgacgggcgcaagaggagcatgtccctctgggtggaattcattaccgcctccggctacctctcggcgcgcaaaatccggtccaggtttcagacgctggtggctcaagcggtagacaaatgtagctaccgggatgtggtaaagatggtggcagacaccagcgaagtgaaactgagaatccgagataggtacgtggtgcagatcacgccggcctttaaatgcaccgggatctggccgaggagtgctgcccactggccacttccccacatcccctggccgggacccaaccgggtggcggaggtcaaggcggaaggtttcaatctcttgtccaaggagtgccactccttggccggcaagcagagctcggcggagagcgacgcctgggtgctgcagttcgcggaggcagagaacagactgcagatggggggctgcagaaagaagtgcctctccatcctcaaaaccttaagggatcgtcaccttgaactgccgggccagcccttgaacaattaccatatgaagactctggtttcctacgagtgtgaaaagcatccccgagagtcggactgggacgagtcttgcctgggtgatcggctgaacgggattttgctgcaacttatctcctgcctgcagtgccggcggtgtccccactactttctaccgaacttagatctgtttcaaggcaaacctcactcagctctggaaaacgctgccaaacaaacgtggcgactggcaagagagatcctgaccaacccgaaaagtttggaaaaactttagaggatgatttaatcaagagccgaaattattacccttctcaaagtccttattaagtgtaaacttctgttcaattcctaatattccactccgcagtgcaaacaatctcttcctttaaaaaggaataataatacaatatttaaacatcatctcacccacccccacaaggggagaaaaagtaggggaagcggatggagaaaaacccaaagccactagtattagaagacttctttccacacgatttcctatctcccttgaaaagtacaccgtaacactccgtaaacagcccagctgtaacgccagaccgagacgaacactctgcctaactatcaaaggattatagcaatcctggtgatttaggtgcatctgtctgtgagtaaacacgatttggatatgccatctgaaagaaactgtaatgtatattttgatttgtaacaaatattgtgatctcacattgtctttgaaagtgtggatgttggtgttttgtgatttggtgaacagaacttaaattgccattctggatacttccagacattttccactaacaaagatatcatttaaaggtagatttcttcctggtacttttatctgtctttgaaagtgtctgaactttaaaaagtttacattttgtttcaaatattgcttgttctatttctaacattccataaatatacttgaaatgttatttaaatatattcaaagaaatttgaattcagcttatataataacgcttgaatatctgaattatatatttgaaaaatgcacttgaaatacactggataattacttttgtgatttagattttaatttgttgctggtttttatttaattagatggtaataaatgaagtaaaataaaagttgttgtgtctcactttaaa

SEQ ID NO: 150435 - DNA, 2772 bp, Homo sapiens
  Payload ID: 9713
  Gene Symbol: MAB21L2
  Gene Name: mab-21-like 2 (C. elegans)
  Uniprot ID: Q9Y586
  ENST ID: ENST00000317605
  CDS Start-End: 1109-2188
gagggagagagagaaagaaagagagagggagagagagagacagagagagttagaggaaagaagagagagcgagcacgaggaaggggggcgggggagagaagcagggggagagcggggcgagaaagaggtcggaggggagaggagggggagagacgactcagaaagtggaatctgtaaaagcaagctagaggagaagaaggaaaaccctgaatcgttataactacaccccagatgcaacgcaagcaacgacttcgtcacactaaaacggattttgtgagggccaaaagtataaattacgaagcagaaatgattatcaaacaacttccagcggtttgcacctaaagaaacacaaggagaacccactacaaacaaacaaacccagtccaaacaacgcctccagtaggaaaagaggaaaactgcgataacacgaccccccgagaagagacgagaccaacacgctgagactgtggggcgtcagcaaacctccaagtgcacggcggactgagttgtacttcgcagctctctggacattaattacctcctgcaccttccatttgggggagggtgaggaagaaggcactcacctacactgagcgaagaagtcctatcagcgtggaagagaagtttaagaatgaaccactgaatgtttcgcttttatttttaaatttactttggcacttaaaaaacctcatttccagatttctggacaatctcggctgcagacatctaagcctaaccttttggtatcctgagttttttccctctccttctccttcctcacgcccaccccgcttctctcgcacacggtcatctttacatatcaagagaaagcaaaaaggttccaagaggtacttttctttttagaaaatcaccttttctcccctaattcttctgcagaagaaaagaggtttcgaaagagggaaaaggaaaaaacaagccggctacggtatcagccggtcagcccaggtggaaaacgagagtgaaagtagggcttaacggggagcgcaccgcctctttcgaaagccgctgggccaccaccagtgcgtgagccttggatccctcaacgtattgcgagacgccggtgtatagcccggacctgtgccccaacatgatcgccgctcaggccaagctggtttaccagctcaataagtactacactgagcgctgtcaggcgcgcaaggcggccatcgccaaaaccatccgagaggtctgtaaggtggtctcggacgtgctcaaggaagtggaggtgcaggagcctcgcttcatcagctccttgagcgagatcgatgcccgctacgaggggctcgaggtcatttcgcccaccgaatttgaggtggtgctctacctaaaccagatgggcgtcttcaacttcgtggacgacggctcgctgcccggctgcgcagtgctcaaactgagcgatgggcggaagcggagcatgtctctctgggtcgagttcatcacggcgtcgggctatctctcagcgcgtaagatccgctcgcgtttccagacgctggtggcccaggcggtggacaagtgcagctatcgggatgtggtcaagatgatcgcggacaccagcgaggtcaagttgcgcatcagggagcgctatgtggtgcaaatcactccggcgttcaagtgcaccgggatctggcctcgcagcgcggcacagtggcctatgccccacatcccttggcccggccccaatcgggtggccgaggtcaaggccgaagggttcaacttgctctcgaaggagtgctactcgctgaccggcaagcagagctcggcagagagcgacgcctgggtgctacagttcggggaggcggagaaccgcctgctgatgggcggctgccgaaacaagtgcctctcagtgctgaagactctgcgggaccgccacctggagctacccggccagccgctcaacaactaccacatgaagacgctgctgctgtacgagtgcgagaaacacccacgagaaacggactgggacgagtcgtgcctgggcgaccggctcaacggcatcctgctgcagctcatctcctgcctgcagtgccgccgctgccctcactactttctgcccaacctcgacctctttcagggcaagccccattcggccctggagagcgctgccaagcagacctggaggttggccagggaaattctcaccaatcccaaaagcctggacaaactatagggtgctggggactgcttgaaaagcgacacaaacgggcgtgctctctcagacacacaactctgctataaacagcagaaactctggacacaaacttttatgtaagtcacctgaaataggaatccggcagaagaccttcattaattaagaagcaaacaaaaagagagcaacccaaccaaaacaaatcacattcttgcacaaaagtgatcgttttcttccaaacaatgtgaatttaaaaggtcacacaaaagaagcaatcgggctccgccaccacaaaatgaaacccaaggtacattttcaaatcaatgtatagtagttccccccccttttccttctttccccctatcctttttctctccaccccatccccccccccatttcgttttgcttttggttgcctgaatgttgtcaccaagtgaaaaaattatttaactatatgtaaaatttctcttttaaaaaaaagttttactgatgttaaacgttctcagtgccaatgtcagactgtgctcctccctctcctgaacctctaccctcaccctgagctgtcttgttgaaaacagtaataaaaacattactttacattgtaa

SEQ ID NO: 150436 - DNA, 3229 bp, Homo sapiens
  Payload ID: 9714
  Gene Symbol: MAB21L3
  Gene Name: mab-21-like 3 (C. elegans)
  Uniprot ID: Q8N8X9
  ENST ID: ENST00000369500
  CDS Start-End: 266-1354
atttttactgccagctttcaagttggaagagggaaattacgtttaaaggtcagcagatgacagatggattttcacaatttggaaataaaaacatgagtgaagggttcggaaggcaagtctctggtccattacacacttccagaaaaacttagtacccagagactcacattactgggagtgctatctactcacaagtgttgcactccattgagaaaaaaaaaaaaaccaggaagttgctgttctactgaggactgaccaagaagccatgaaataccttactgtgggagacttagaagattgcctactgaataaggtggacttgaggcgccagcagatttcccaggctgtggaggaggtgcagaaagtcgttcatcatttgaccacaaacatcagcaaccaagacattagatttcaagctgtgccttactctgacacgtacaatgaaaatattaaggttttggctcccagtcagttcctcgtcacagtcccaataaaaggcctggccgggtacagggaggccagggagcagcactggcggtactacacactgcagggcaccaggctgccctgcccgttgcgggaccctgagggtctgcagcagtggctggaggtggaacagtttatgaagagcctgtggcagtggcatgagacagatgtgaacatcgacggagacattgtgcctgccaaggtcctcctagtgttccggaagctggtggaaaatgcagttagaacctgtcacctctcaggtaaggtcagcctgctaggaaaccgctctgcagtttgggttgctgtggaaacatctgcatatcaggtggaactggagctggtccccgcagtggagatccccaccacctggtccaagaaagcccggtggcctcgatgtctgcagcgctggccttcccaagagagagtggagtgcatcaagtcgtttggatttaacttgttggcctgttcaaattatcactggcagctgagcttcctccgtgctgagcaggtgttactggaacagctggatgaagatgggggctgccgtaggaagtgttttcaggtcatgaggcacctgaaggaggacatctggtgcccagggaacaggccggttatcacgtcccaccatctgcagactgtgctcttttggacctgcgagaaatatccccactttaaagactggcaggtcttcagcaaagcatttctgcgcctggtgaggaaactgcacaagtgcgtgagccagcacttcctgaaacactatttcgtccggaacagcaacctctttcagtgcaccaacccgactgaactggacactgtggcccaaaagctggccaccttcctgaagaacccccagatcggcccgccctgatggttgccccggcctgggaggctcttggacattttattctggcttaacattgttctttggatggttcctcagtcaggtgccaggatcctgcctaggagaaaggccacgaatggcagcggaaattacatcaaaccagaaacacttcagcagggggaaaactgtgccccaggatgtctggcccaggcctccctggagcccagcaagcatttctgccctagctaattctcctggagacagctctcatcaggcttccccaggcacagatttggaactggtgacagttctgaacttagtttcccttgttcaggctgtgatcgtctcacagtgaagatggagacagaacccctggaagtctggacatgagcctgctggccaatactgtgcccagcccactgatcatgggcacattctcctgccatttgtaaaatgggaatgttaacgtgcctacctctgagcagggctgtgtgcctatgaaactgtgctggcgccttttcaaggggaaggcattggatcaacacaaagtgttcctggttggttgagtagctggtgtttgcatcctggatcggtacccacagcactgacgcaaaattgcacctgatgagttagtgagcctgtgcttccttgctgccctccagcttccttagcatgtgggtcagtggctcctgatgttctgtctgcttcgctggtattctctaagcagggaggggaatggttttgatgataagtgtaagtcaaagatgaaagtacaactcttggcctgatcccaaccatagccctctctttgcttcccatgccatgggccatggatggaacttccttatatatttatgtaaataacctagtactatgatctgcatggagtgaccttaggtgtctgtcactgctcagtgtgttcctttgctcacttcattcactcactcactcattgacaaataatgctcattaggcaccgggaacacagcaaagagcaaagtggatgaggacctccccctggggatgccacctaatggtggagacaagaaatgaacgacagataaacacgcacagttattacagatggaagcaagtgcttcaaaggaaataaacagaatgttgaagtagagtccacagaaaggtccccgaaggatgaaaatgcaaatagctgaaggggaaggaaaagtgaccaaaggcaggcatggtggggctggcatgagtcagagcacctggccttgtaaagccaggaaggaatcagtattttattctaagatcaaaggtgtgacatttggcctctccagaagcagaagagtatcacgatctgactgcattttaaacaattgttctggtaactgcatgaagaaggtctggggactcacacaggagctgggcactgagtgctcttgagccacccatttggaatttcacagaggcccacaaggcaacatattctgtgtggcacaaccgatcaggaattctaggagttctcggtgagatcaatggtttttttctggcgtttatgtaatgcttctcaactcaaggggctcctttattacttttgaatgtttttgcccaaatgtctataccaaagataaatttctaaagcatgaactactgattttgttttcatgaaaattcacatttgaaaatgaaaatgattacttttcaaaagtactgtaaacggcaggaaagatccaaaattgacaccctaacatcacaattaaaagaactagaaaagcaagagcaaacacattcaaaagctagcagaaggcaagaaataactaaaatcagagcagaactgaaggaaatagagacacaaaaaacccttcaaaaaattaatagatccaggagctggttttttgaaaggatcaacaaaattgatagactgctagcaagactaat

SEQ ID NO: 150437 - DNA, 1205 bp, Homo sapiens
  Payload ID: 9715
  Gene Symbol: MACROD1
  Gene Name: MACRO domain containing 1
  Uniprot ID: Q9BQ69
  ENST ID: ENST00000255681
  CDS Start-End: 68-1045
gagagacactcccgagcgccgtaaatagagtccaagtgggcggagagccgtcccgcgccgcccgctcatgtctctacagagccgactgtccggccgcctggcacagctgcgcgcggcggggcagctgctcgtccccccgcgcccccggcccggacacttggcgggtgccacgaggacccgcagcagcacgtgcggtcccccggcgttcctgggcgtgttcggccgccgtgcgcggacctcggcgggagttggggcgtggggggcggcggcggtggggcggacagccggggtgcgcacttgggcccccctggccatggcggcgaaggtggacctgagcacctccaccgactggaaggaggcgaaatcctttctgaagggcctgagtgacaagcagcgggaggaacattacttctgcaaggactttgtcaggctgaagaagatcccgacatggaaggagatggcgaaaggggtggctgtgaaggtggaggagcccaggtataaaaaggacaagcagctcaatgagaaaatctccctgctccgcagcgacatcaccaagctggaggtggacgccatcgtcaacgccgccaacagctccctgctcggaggcggtggcgtggacggctgcattcatcgggccgccggccccctgcttaccgacgagtgccggaccctgcagagctgtaagactggcaaggccaagatcaccggcggctatcggctcccggccaagtacgtcatccacacagtggggcccatcgcctacggggagcccagcgccagtcaggctgccgagctccgcagctgctacctgagcagtctggacctgctgctggagcaccggctccgctcggtggcgttcccctgcatctccaccggcgtgtttggctacccctgtgaggcggccgccgagatcgtgctggccacgctgcgagagtggctggagcagcacaaggacaaggtggaccggctgatcatctgcgtgttcctcgagaaggacgaggacatctaccggagccggctcccccactacttccccgtggcctgaggctcccgcagcccaccctgaccgggactgacccgccttcgggaccccgctcccagctctgagaggtcgccaaagcctgcagcctggcctgggcctggccaccccttctttccctccgcgccccgcccccgaggagcctaataaagatctcgttgtggca

SEQ ID NO: 150438 - DNA, 4994 bp, Homo sapiens
  Payload ID: 9716
  Gene Symbol: MACROD2
  Gene Name: MACRO domain containing 2
  Uniprot ID: A1Z1Q3
  ENST ID: ENST00000217246
  CDS Start-End: 396-1673
gcgtgcgccctggggcccaagttggggcgcgccgtggctagaacacggagagcggcgggcagtgcagccaatgggaggcggcgctgcctagcggctggtaggcggtgcctgcgcgggtgttaggttagcgcgaggcgtgacctagttgacaggctctgaggtgctgctgtggcggcgtccgcggggctgaggcgggtgggagccggagccgagcgcgggctgagggaggagggcggcgactggagagcggcgagcggcgagcagcgcaggacgcagagcctctttcactttttccctgctgagtgccccctcccacccctcccactccacacacaccctgtttgcccgtgagcctggggaacttgcagcttaaagccagccacccccacggcaacatgtaccccagcaacaagaagaaaaaggtgtggagagaggagaaagaacgtttattgaagatgaccttagaagagagacgcaaagaatacctaagagactatattcccctgaacagcattctatcatggaaggaggagatgaagggcaagggccaaaatgatgaagaaaatactcaggaaacatcccaggtgaagaaaagtttgactgaaaaagtttctctctatagaggtgacatcacattgctagaggtagatgctatagtcaatgccgcaaatgccagtcttcttggaggaggaggtgtggatggctgtattcatagagcagccggcccctgtttgctagctgaatgtcgtaacctgaatggctgtgatactggacatgcaaaaatcacatgtggctatgaccttcctgcaaaatatgtcatccatactgtagggccaatagccaggggccatattaatggttcccacaaggaagaccttgcaaattgctataaatcatctctgaagctcgtgaaagaaaataacatccgatcagttgcatttccctgcatctcaacaggcatttatggctttcccaacgagcctgctgcagtcattgccctcaacaccattaaggaatggcttgccaagaatcaccatgaggtggatcggatcattttctgtgtcttcttagaagttgacttcaaaatctacaaaaagaaaatgaatgagtttttctccgtagacgataataatgaagaagaagaggatgttgaaatgaaagaagattcagatgagaacggtccagaggagaagcaaagtgtggaagaaatggaagagcagagccaagatgcagatggtgtcaacactgtcactgtgcccggccctgcttcagaagaggcagttgaagactgtaaagatgaagattttgcaaaggatgaaaatattacaaaaggcggtgaagtgacagatcattctgtgcgtgaccaagatcatcccgatggacaagagaatgattcaacgaagaatgaaataaaaattgaaacagaatcgcagagctcatatatggaaacagaagaactttcatcaaaccaagaagatgccgtgattgtggagcaaccagaagtgattccattaacagaggaccaagaagaaaaagaaggtgaaaaagctccaggcgaggacacacctaggatgcctgggaaaagtgaaggctccagtgacctagaaaatactccaggtcctgatgcaggggcacaagatgaagcgaaggaacaaagaaatggaactaaatgacaatcctcagcatcgcaaggcctctcctggctctgggggagctcgggaagatagcagcacacgctgtggaggagggtgggggtggggggaaggcaagtcccatggaaggacggggaatcctttactctaatttctccagctgcattttgttccgtttatctgcagaaaaagaaagaaaaaaaagaaaaaaaaagtttcctttaatttggtggagggacccatgttgacgcatctttcaggcattatccttgtaatttctgtcttttctcttacaactttgccccagggtcacagtggcttgattgaacactcacatgtgtatcctggcccctgtctgctttcttggttatttcacaaagctggtcacacagtggtttattcaaaggaaggggaggaagacagtggtttgataagctgcaggataaattttaggaatcaatgagcccagcagcagtataatccccagacagaggaggcaggatagaaaatgggcaaaagcctcggaaaccacttggaaaaggtctggacaatgaggtgaaaatattttcttcagggttcccaaggcacaatttgttccaagtggctaatgagaaatatggaagctgaattttttccagagcagagtgcagaggcataacagaagggtgggccctggcagccatctgggtctcttccttcctaaccatggtggcaggtgcatccttctttgacactgactttcagcagagcttacttggttcatgaggtcttcacatggagactaccagcaagaggtgactctctgctgcataactgtaaaggatggccctttgctaggtgttacagttaaaagctaagaaaaggggcagtgcatttaggacccaaacatatgcctatgaatatcaaaagctcctcctgaaattgctgtgagttttccataaaagaatatcctgtcttcacccaaggcttgacagcccacagagtggtctcatttgaaattacaggaaattagagcttttgcttgcagttctgccttcctggcctgtgtttaaatgctgtcacttgtttatgccaagttcaaggctgattcaatggttggtcccctcacccagaaaaccctgaaggggaggatacagctctgaaggggggcagcagtactaaaaacccaagatgccagtggtatagtgggcacaagggatggcgaccatgaggatgccaggcatcatcaccaatatctatcctagagccagtataaggccagatgcctacttcccacagcctccccgggttccaaagtcatgtcattgttttcagtggaaacatatcgtttgttgcatatcttcttaaatccatcttccttgtaagggctttagaactaaaacttacttatattgtttttccttaacagagggagaaaaatagtggattattatttctaaaataaaaggatgttctgctttctaaatatcccatcaaaatcttcagttttgcacttttttgatggaaaattcatcttatcttcctatgactttggttttagcctttctgaatttgttaccccttctggatggcttatttgatatactggaatagttaacaagctatacttcagcatatgcactatattctaacaaattttttttaataaaatcaagacatcagcaagaatgacatttacgtgacctcataatgtgggattatggccttctgttgctattccagtttgatatggaagcatctatatcctctattgccgttagatgttgttgcttttcagaaaagtaacgaaaaggctcattttaaagaatccaagaaacgatgtcatccaaatattgacagtttctacatttcatgccatctttataactcaattgaaagttgccgtcattcttgtgaagtatttgacaagtgcaatctgctagaagctcgtttttcttgtgactcccaaatgttagtgctacttagcctcagtaatgagttacagttgaaaaaaacatgagggaaacagagggacagagattttctaatgaacaatgatggaagagacctaatgtccttgctagaaacagccaggatggaaattatccagccctggcattctccttatcatcaatgacagtcattttattcatttatttcaaatgtgggtgggctagaagtggaaggagggaattctctctgcctaaaaattctagaagaatgaaagtaatctttgtatccaggaaactaagagaatgaggaataaatatcttcagcccgactcctgaatttgtttattcttccatctataattagattgtgttttcatttttgctttgtcatgctttttggttgttatttggctatacagttttatgctttaaaacaaatgataaagttaatttccaattcaatagtgaaatattaacaatctaactatagccagatcaaagacacctgaacacagaaaacctttatttgctggtgctgccattgcacaggctgtacaatgaaatagatttgaaaagctgattgattttcccgcacataaattctggatgtcaatttccaaccaaactccaatacagctatgtggcatgaagagttacaggagggagggaggaaaatagccctatgttagtcatgtttgcatacagaggatcaaagtaggccttcaccataatagttctaattaaaatggtcctcgctgtaggagagacaaaggggcttttcctctagctggtaactattcagatgatggacaagtcttctttcataaaagattacaaagaaggcatccgaatcactgtctgtgatactgggtcacatattaatcactgcagctaattgtaaatctttctatgaaacactgaaaagcctctttgtgaattaatacagttctgcttgatgcacttgatttgaaaagacatttctctgtatgtggcgcatgtcggctttgctttgaaaaataacaaagttagcagaatatgttcaatatattttcttggggaatagggtttttattacatgattcattaaggatttgccttaccctgacatttgtgatataaaggaaaatcagaaaaaaagtaattttcttgatcaagatatgtttttacttaatgcaaataaatgtagtctgttgcttgcaaggaaaaaaaaatggcttctgatatctggtataaactgctaaataggataatacgtgcctcttttgttaaaccggcatttaaatgctggactgcttctaaatctgtttgtttcttttcatctgtgccatacactaaaaaacaactgttgccttcatactatatttgttagagcagaatacaaataaaatttgtttgagaggataatgtgaaa

SEQ ID NO: 150439 - DNA, 4025 bp, Homo sapiens
  Payload ID: 9716
  Gene Symbol: MACROD2
  Gene Name: MACRO domain containing 2
  Uniprot ID: A1Z1Q3
  ENST ID: ENST00000378058
  CDS Start-End: 63-704
aggtggatcggatcattttctgtgtcttcttagaagttgacttcaaaatctacaaaaagaaaatgaatgagtttttctccgtagacgataataatgaagaagaagaggatgttgaaatgaaagaagattcagatgagaacggtccagaggagaagcaaagtgtggaagaaatggaagagcagagccaagatgcagatggtgtcaacactgtcactgtgcccggccctgcttcagaagaggcagttgaagactgtaaagatgaagattttgcaaaggatgaaaatattacaaaaggcggtgaagtgacagatcattctgtgcgtgaccaagatcatcccgatggacaagagaatgattcaacgaagaatgaaataaaaattgaaacagaatcgcagagctcatatatggaaacagaagaactttcatcaaaccaagaagatgccgtgattgtggagcaaccagaagtgattccattaacagaggaccaagaagaaaaagaaggtgaaaaagctccaggcgaggacacacctaggatgcctgggaaaagtgaaggctccagtgacctagaaaatactccaggtcctgatgttgaaatgaatagtcaggttgacaaggtaaatgacccaacagagagtcaacaagaagatcaactaatagcaggggcacaagatgaagcgaaggaacaaagaaatggaactaaatgacaatcctcagcatcgcaaggcctctcctggctctgggggagctcgggaagatagcagcacacgctgtggaggagggtgggggtggggggaaggcaagtcccatggaaggacggggaatcctttactctaatttctccagctgcattttgttccgtttatctgcagaaaaagaaagaaaaaaaagaaaaaaaaagtttcctttaatttggtggagggacccatgttgacgcatctttcaggcattatccttgtaatttctgtcttttctcttacaactttgccccagggtcacagtggcttgattgaacactcacatgtgtatcctggcccctgtctgctttcttggttatttcacaaagctggtcacacagtggtttattcaaaggaaggggaggaagacagtggtttgataagctgcaggataaattttaggaatcaatgagcccagcagcagtataatccccagacagaggaggcaggatagaaaatgggcaaaagcctcggaaaccacttggaaaaggtctggacaatgaggtgaaaatattttcttcagggttcccaaggcacaatttgttccaagtggctaatgagaaatatggaagctgaattttttccagagcagagtgcagaggcataacagaagggtgggccctggcagccatctgggtctcttccttcctaaccatggtggcaggtgcatccttctttgacactgactttcagcagagcttacttggttcatgaggtcttcacatggagactaccagcaagaggtgactctctgctgcataactgtaaaggatggccctttgctaggtgttacagttaaaagctaagaaaaggggcagtgcatttaggacccaaacatatgcctatgaatatcaaaagctcctcctgaaattgctgtgagttttccataaaagaatatcctgtcttcacccaaggcttgacagcccacagagtggtctcatttgaaattacaggaaattagagcttttgcttgcagttctgccttcctggcctgtgtttaaatgctgtcacttgtttatgccaagttcaaggctgattcaatggttggtcccctcacccagaaaaccctgaaggggaggatacagctctgaaggggggcagcagtactaaaaacccaagatgccagtggtatagtgggcacaagggatggcgaccatgaggatgccaggcatcatcaccaatatctatcctagagccagtataaggccagatgcctacttcccacagcctccccgggttccaaagtcatgtcattgttttcagtggaaacatatcgtttgttgcatatcttcttaaatccatcttccttgtaagggctttagaactaaaacttacttatattgtttttccttaacagagggagaaaaatagtggattattatttctaaaataaaaggatgttctgctttctaaatatcccatcaaaatcttcagttttgcacttttttgatggaaaattcatcttatcttcctatgactttggttttagcctttctgaatttgttaccccttctggatggcttatttgatatactggaatagttaacaagctatacttcagcatatgcactatattctaacaaattttttttaataaaatcaagacatcagcaagaatgacatttacgtgacctcataatgtgggattatggccttctgttgctattccagtttgatatggaagcatctatatcctctattgccgttagatgttgttgcttttcagaaaagtaacgaaaaggctcattttaaagaatccaagaaacgatgtcatccaaatattgacagtttctacatttcatgccatctttataactcaattgaaagttgccgtcattcttgtgaagtatttgacaagtgcaatctgctagaagctcgtttttcttgtgactcccaaatgttagtgctacttagcctcagtaatgagttacagttgaaaaaaacatgagggaaacagagggacagagattttctaatgaacaatgatggaagagacctaatgtccttgctagaaacagccaggatggaaattatccagccctggcattctccttatcatcaatgacagtcattttattcatttatttcaaatgtgggtgggctagaagtggaaggagggaattctctctgcctaaaaattctagaagaatgaaagtaatctttgtatccaggaaactaagagaatgaggaataaatatcttcagcccgactcctgaatttgtttattcttccatctataattagattgtgttttcatttttgctttgtcatgctttttggttgttatttggctatacagttttatgctttaaaacaaatgataaagttaatttccaattcaatagtgaaatattaacaatctaactatagccagatcaaagacacctgaacacagaaaacctttatttgctggtgctgccattgcacaggctgtacaatgaaatagatttgaaaagctgattgattttcccgcacataaattctggatgtcaatttccaaccaaactccaatacagctatgtggcatgaagagttacaggagggagggaggaaaatagccctatgttagtcatgtttgcatacagaggatcaaagtaggccttcaccataatagttctaattaaaatggtcctcgctgtaggagagacaaaggggcttttcctctagctggtaactattcagatgatggacaagtcttctttcataaaagattacaaagaaggcatccgaatcactgtctgtgatactgggtcacatattaatcactgcagctaattgtaaatctttctatgaaacactgaaaagcctctttgtgaattaatacagttctgcttgatgcacttgatttgaaaagacatttctctgtatgtggcgcatgtcggctttgctttgaaaaataacaaagttagcagaatatgttcaatatattttcttggggaatagggtttttattacatgattcattaaggatttgccttaccctgacatttgtgatataaaggaaaatcagaaaaaaagtaattttcttgatcaagatatgtttttacttaatgcaaataaatgtagtctgttgcttgcaaggaaaaaaaaatggcttctgatatctggtataaactgctaaataggataatacgtgcctcttttgttaaaccggcatttaaatgctggactgcttctaaatctgtttgtttcttttcatctgtgccatacactaaaaaacaactgttgccttcatactatatttgttagagcagaatacaaataaaatttgtttgagaggataatgtgaaa

SEQ ID NO: 150440 - DNA, 4425 bp, Homo sapiens
  Payload ID: 9716
  Gene Symbol: MACROD2
  Gene Name: MACRO domain containing 2
  Uniprot ID: A1Z1Q3
  ENST ID: ENST00000402914
  CDS Start-End: 463-1104
actatcgagaagcagatgacaggctcaggccttaccagggatgcacttgccacattttggaaagactacataaaaaacctttaaaaattggagccctttgggcctcaggtatccaaagagcacattttttggaaactcaacactcaggaaggtcgcatagagccagtttatgcagatgtcatccatactgtagggccaatagccaggggccatattaatggttcccacaaggaagaccttgcaaattgctataaatcatctctgaagctcgtgaaagaaaataacatccgatcagttgcatttccctgcatctcaacaggcatttatggctttcccaacgagcctgctgcagtcattgccctcaacaccattaaggaatggcttgccaagaatcaccatgaggtggatcggatcattttctgtgtcttcttagaagttgacttcaaaatctacaaaaagaaaatgaatgagtttttctccgtagacgataataatgaagaagaagaggatgttgaaatgaaagaagattcagatgagaacggtccagaggagaagcaaagtgtggaagaaatggaagagcagagccaagatgcagatggtgtcaacactgtcactgtgcccggccctgcttcagaagaggcagttgaagactgtaaagatgaagattttgcaaaggatgaaaatattacaaaaggcggtgaagtgacagatcattctgtgcgtgaccaagatcatcccgatggacaagagaatgattcaacgaagaatgaaataaaaattgaaacagaatcgcagagctcatatatggaaacagaagaactttcatcaaaccaagaagatgccgtgattgtggagcaaccagaagtgattccattaacagaggaccaagaagaaaaagaaggtgaaaaagctccaggcgaggacacacctaggatgcctgggaaaagtgaaggctccagtgacctagaaaatactccaggtcctgatgttgaaatgaatagtcaggttgacaaggtaaatgacccaacagagagtcaacaagaagatcaactaatagcaggggcacaagatgaagcgaaggaacaaagaaatggaactaaatgacaatcctcagcatcgcaaggcctctcctggctctgggggagctcgggaagatagcagcacacgctgtggaggagggtgggggtggggggaaggcaagtcccatggaaggacggggaatcctttactctaatttctccagctgcattttgttccgtttatctgcagaaaaagaaagaaaaaaaagaaaaaaaaagtttcctttaatttggtggagggacccatgttgacgcatctttcaggcattatccttgtaatttctgtcttttctcttacaactttgccccagggtcacagtggcttgattgaacactcacatgtgtatcctggcccctgtctgctttcttggttatttcacaaagctggtcacacagtggtttattcaaaggaaggggaggaagacagtggtttgataagctgcaggataaattttaggaatcaatgagcccagcagcagtataatccccagacagaggaggcaggatagaaaatgggcaaaagcctcggaaaccacttggaaaaggtctggacaatgaggtgaaaatattttcttcagggttcccaaggcacaatttgttccaagtggctaatgagaaatatggaagctgaattttttccagagcagagtgcagaggcataacagaagggtgggccctggcagccatctgggtctcttccttcctaaccatggtggcaggtgcatccttctttgacactgactttcagcagagcttacttggttcatgaggtcttcacatggagactaccagcaagaggtgactctctgctgcataactgtaaaggatggccctttgctaggtgttacagttaaaagctaagaaaaggggcagtgcatttaggacccaaacatatgcctatgaatatcaaaagctcctcctgaaattgctgtgagttttccataaaagaatatcctgtcttcacccaaggcttgacagcccacagagtggtctcatttgaaattacaggaaattagagcttttgcttgcagttctgccttcctggcctgtgtttaaatgctgtcacttgtttatgccaagttcaaggctgattcaatggttggtcccctcacccagaaaaccctgaaggggaggatacagctctgaaggggggcagcagtactaaaaacccaagatgccagtggtatagtgggcacaagggatggcgaccatgaggatgccaggcatcatcaccaatatctatcctagagccagtataaggccagatgcctacttcccacagcctccccgggttccaaagtcatgtcattgttttcagtggaaacatatcgtttgttgcatatcttcttaaatccatcttccttgtaagggctttagaactaaaacttacttatattgtttttccttaacagagggagaaaaatagtggattattatttctaaaataaaaggatgttctgctttctaaatatcccatcaaaatcttcagttttgcacttttttgatggaaaattcatcttatcttcctatgactttggttttagcctttctgaatttgttaccccttctggatggcttatttgatatactggaatagttaacaagctatacttcagcatatgcactatattctaacaaattttttttaataaaatcaagacatcagcaagaatgacatttacgtgacctcataatgtgggattatggccttctgttgctattccagtttgatatggaagcatctatatcctctattgccgttagatgttgttgcttttcagaaaagtaacgaaaaggctcattttaaagaatccaagaaacgatgtcatccaaatattgacagtttctacatttcatgccatctttataactcaattgaaagttgccgtcattcttgtgaagtatttgacaagtgcaatctgctagaagctcgtttttcttgtgactcccaaatgttagtgctacttagcctcagtaatgagttacagttgaaaaaaacatgagggaaacagagggacagagattttctaatgaacaatgatggaagagacctaatgtccttgctagaaacagccaggatggaaattatccagccctggcattctccttatcatcaatgacagtcattttattcatttatttcaaatgtgggtgggctagaagtggaaggagggaattctctctgcctaaaaattctagaagaatgaaagtaatctttgtatccaggaaactaagagaatgaggaataaatatcttcagcccgactcctgaatttgtttattcttccatctataattagattgtgttttcatttttgctttgtcatgctttttggttgttatttggctatacagttttatgctttaaaacaaatgataaagttaatttccaattcaatagtgaaatattaacaatctaactatagccagatcaaagacacctgaacacagaaaacctttatttgctggtgctgccattgcacaggctgtacaatgaaatagatttgaaaagctgattgattttcccgcacataaattctggatgtcaatttccaaccaaactccaatacagctatgtggcatgaagagttacaggagggagggaggaaaatagccctatgttagtcatgtttgcatacagaggatcaaagtaggccttcaccataatagttctaattaaaatggtcctcgctgtaggagagacaaaggggcttttcctctagctggtaactattcagatgatggacaagtcttctttcataaaagattacaaagaaggcatccgaatcactgtctgtgatactgggtcacatattaatcactgcagctaattgtaaatctttctatgaaacactgaaaagcctctttgtgaattaatacagttctgcttgatgcacttgatttgaaaagacatttctctgtatgtggcgcatgtcggctttgctttgaaaaataacaaagttagcagaatatgttcaatatattttcttggggaatagggtttttattacatgattcattaaggatttgccttaccctgacatttgtgatataaaggaaaatcagaaaaaaagtaattttcttgatcaagatatgtttttacttaatgcaaataaatgtagtctgttgcttgcaaggaaaaaaaaatggcttctgatatctggtataaactgctaaataggataatacgtgcctcttttgttaaaccggcatttaaatgctggactgcttctaaatctgtttgtttcttttcatctgtgccatacactaaaaaacaactgttgccttcatactatatttgttagagcagaatacaaataaaatttgtttgagaggataatgtgaaa

SEQ ID NO: 150441 - DNA, 727 bp, Homo sapiens
  Payload ID: 9716
  Gene Symbol: MACROD2
  Gene Name: MACRO domain containing 2
  Uniprot ID: A1Z1Q3
  ENST ID: ENST00000407045
  CDS Start-End: 238-534
caaaacttctcagacaccgagttgtagaaggaagggctttattcagctgggagcatcggcaagctactgccttaaaatccgagctccccaaatgcacaatttctgtcccttttaagggctcacagcactaaagatttcacatgaaagggtcgtgattgatttgagcaagcagggggacaagagaatgattcaacgaagaatgaaataaaaattgaaacagaatcgcagagctcatatatggaaacagaagaactttcatcaaaccaagaagatgccgtgattgtggagcaaccagaagtgattccattaacagaggaccaagaagaaaaagaaggtgaaaaagctccaggcgaggacacacctaggatgcctgggaaaagtgaaggctccagtgacctagaaaatactccaggtcctgatgttgaaatgaatagtcaggttgacaaggtaaatgacccaacagagagtcaacaagaagatcaactaataggggcacaagatgaagcgaaggaacaaagaaatggaactaaatgacaatcctcagcatcgcaaggcctctcctggctctgggggagctcgggaagatagcagcacacgctgtggaggagggtgggggtggggggaaggcaagtcccatggaaggacggggaatcctttactctaatttctccagctgcattttgttccgtttatctgcagaaaaagaaagaaaaaaaagaaaaaaaaa

SEQ ID NO: 150442 - DNA, 2058 bp, Homo sapiens
  Payload ID: 9717
  Gene Symbol: MAEA
  Gene Name: macrophage erythroblast attacher
  Uniprot ID: Q7L5Y9
  ENST ID: ENST00000264750
  CDS Start-End: 24-1091
gctaatgttttggccgcttcaagatggcggtgcaggagtcggcggctcagttgtccatgaccctgaaggtccaggagtacccgaccctcaaggtgccctacgagacgctgaacaaacgctttcgcgccgctcagaagaacattgaccgggagaccagccacgtcaccatggtggtggccgagctggagaagacgttgagcggctgccccgccgtggactccgtggtcagcctgctggacggcgtggtggagaagctcagcgtcctcaagaggaaggcggtggaatccatccaggccgaggacgagagcgccaagctgtgcaagcgccggatcgagcacctcaaagagcatagcagcgaccagcccgcggcggccagcgtgtggaagaggaagcgcatggatcgcatgatggtggagcacctgctgcgttgcggctactacaacacggctgtcaagctggcgcgccagagcggcatcgagagctgcctggagttcagcctcagaatccaggagttcattgaactcatccggcagaataagagactggacgctgtgagacatgcaagaaagcacttcagccaagcagaagggagccagctggacgaggtgcgccaggccatgggcatgctggccttcccgcccgacacgcacatctccccgtacaaggaccttctggaccctgcacggtggcggatgctgatccagcagttccggtacgacaactaccgactacaccagctgggaaacaattctgtgttcaccctcaccctgcaggctggcctctcagccatcaagacaccacagtgctacaaggaggacggcagctccaagagccctgactgccctgtgtgcagccgctccctgaacaagctggcgcagcccctgcccatggcccactgtgccaactcccgcctggtctgcaagatttctggcgacgtgatgaacgagaacaatccgcccatgatgctgcccaacggctacgtctacggctacaattctctgctttctatccgtcaagatgataaagtcgtgtgcccgagaaccaaagaagtcttccacttctcacaagccgagaaggtgtacatcatgtaggccccacgtcgtgaagcgcacgcctcggggacgggctgcagtgggcggggaggccacgccttcctcctgtcccacgctccagcctgccgcggcgtttctgtttcttgcgaccaaagatccgtgagcaacgataaatactcttaggaagagagaaaataaggtttcataagtttgtacttgaaaacatttggattggtaggattttgtaacacgtcaaccatttgatgcttctgaaaagtactttcaacttgcgaaggaaactcttctttaaagactgacctaaacaccgagggaaacttaagaacgtttaaaatataggagtccgtgatttccctgtgttttcagtttctttccttctgtgaacgatgagacttggagaacgggctggtccttcaccacttcctgttggccctggcctggccggggaaggtggcagcggcaccggactgacctgcagtgacccgcgatgccgcgccacgagggacacttatggcttcattcgagagctgctgccaaaacgcctggcgccgccaccgtcgggggctggcttcgaggacgcccgcctgcctcgcgggtcgtgtccgcgggactgtgttcgtacgtgcatagtttcgatatcacatcgcggggctgtgttcgtagctgcgtcgtttcgatatcacaccctctgtgtgccgccttacttcctgcttcgagaatgtataacgtggaaatccacgggaccaaatttctgcagaggccttgccggatggttccataactgtagagtctaattgctatccattacagaaattaatcgttcagttgaaagaagtactgatgacttttcaaaacaaatgaaccaccgtagctgacagagaaccgtatcgtagaggtttgtagttagtgcttatttttgcatgttgatgttgactagctaataaactgtaaatgtaaaccatgcgaataaaatggttttctatttctc

SEQ ID NO: 150443 - DNA, 2222 bp, Homo sapiens
  Payload ID: 9717
  Gene Symbol: MAEA
  Gene Name: macrophage erythroblast attacher
  Uniprot ID: Q7L5Y9
  ENST ID: ENST00000303400
  CDS Start-End: 64-1254
tcatttcccggcgtgcagcgcgctcgcgcgtcccccgcccgctaatgttttggccgcttcaagatggcggtgcaggagtcggcggctcagttgtccatgaccctgaaggtccaggagtacccgaccctcaaggtgccctacgagacgctgaacaaacgctttcgcgccgctcagaagaacattgaccgggagaccagccacgtcaccatggtggtggccgagctggagaagacgttgagcggctgccccgccgtggactccgtggtcagcctgctggacggcgtggtggagaagctcagcgtcctcaagaggaaggcggtggaatccatccaggccgaggacgagagcgccaagctgtgcaagcgccggatcgagcacctcaaagagcatagcagcgaccagcccgcggcggccagcgtgtggaagaggaagcgcatggatcgcatgatggtggagcacctgctgcgttgcggctactacaacacggctgtcaagctggcgcgccagagcggcatcgaggacctagtgaatattgagatgttcctgacggccaaagaggtggaggagtccctggagaggcgtgagacggccacctgcctggcctggtgccatgacaacaagtcccggctccggaagatgaagagctgcctggagttcagcctcagaatccaggagttcattgaactcatccggcagaataagagactggacgctgtgagacatgcaagaaagcacttcagccaagcagaagggagccagctggacgaggtgcgccaggccatgggcatgctggccttcccgcccgacacgcacatctccccgtacaaggaccttctggaccctgcacggtggcggatgctgatccagcagttccggtacgacaactaccgactacaccagctgggaaacaattctgtgttcaccctcaccctgcaggctggcctctcagccatcaagacaccacagtgctacaaggaggacggcagctccaagagccctgactgccctgtgtgcagccgctccctgaacaagctggcgcagcccctgcccatggcccactgtgccaactcccgcctggtctgcaagatttctggcgacgtgatgaacgagaacaatccgcccatgatgctgcccaacggctacgtctacggctacaattctctgctttctatccgtcaagatgataaagtcgtgtgcccgagaaccaaagaagtcttccacttctcacaagccgagaaggtgtacatcatgtaggccccacgtcgtgaagcgcacgcctcggggacgggctgcagtgggcggggaggccacgccttcctcctgtcccacgctccagcctgccgcggcgtttctgtttcttgcgaccaaagatccgtgagcaacgataaatactcttaggaagagagaaaataaggtttcataagtttgtacttgaaaacatttggattggtaggattttgtaacacgtcaaccatttgatgcttctgaaaagtactttcaacttgcgaaggaaactcttctttaaagactgacctaaacaccgagggaaacttaagaacgtttaaaatataggagtccgtgatttccctgtgttttcagtttctttccttctgtgaacgatgagacttggagaacgggctggtccttcaccacttcctgttggccctggcctggccggggaaggtggcagcggcaccggactgacctgcagtgacccgcgatgccgcgccacgagggacacttatggcttcattcgagagctgctgccaaaacgcctggcgccgccaccgtcgggggctggcttcgaggacgcccgcctgcctcgcgggtcgtgtccgcgggactgtgttcgtacgtgcatagtttcgatatcacatcgcggggctgtgttcgtagctgcgtcgtttcgatatcacaccctctgtgtgccgccttacttcctgcttcgagaatgtataacgtggaaatccacgggaccaaatttctgcagaggccttgccggatggttccataactgtagagtctaattgctatccattacagaaattaatcgttcagttgaaagaagtactgatgacttttcaaaacaaatgaaccaccgtagctgacagagaaccgtatcgtagaggtttgtagttagtgcttatttttgcatgttgatgttgactagctaataaactgtaaatgtaaaccatgcgaataaaatggttttctatttctca

SEQ ID NO: 150444 - DNA, 845 bp, Homo sapiens
  Payload ID: 9717
  Gene Symbol: MAEA
  Gene Name: macrophage erythroblast attacher
  ENST ID: ENST00000503653
  CDS Start-End: 24-845
gctaatgttttggccgcttcaagatggcggtgcaggagtcggcggctcagttgtccatgaccctgaaggtccaggagtacccgaccctcaaggtgccctacgagacgctgaacaaacgctttcgcgccgctcagaagaacattgaccgggagaccagccacgtcaccatggtggtggccgagctggagaagacgttgagcggctgccccgccgtggactccgtggtcagcctgctggacggcgtggtggagaagctcagcgtcctcaagaggaaggcggtggaatccatccaggccgaggacgagagcgccaagctgtgcaagcgccggatcgagcacctcaaagagcatagcagcgaccagcccgcggcggccagcgtgtggaagaggaagcgcatggatcgcatgatggtggagcacctgctgcgttgcggctactacaacacggctgtcaagctggcgcgccagagcggcatcgaggacctagtgaatattgagatgttcctgacggccaaagaggtggaggagtccctggagaggcgtgagacggccacctgcctggcctggtgccatgacaacaagtcccggctccggaagatgaagacatgcaagaaagcacttcagccaagcagaagggagccagctggacgaggtgcgccaggccatgggcatgctggccttcccgcccgacacgcacatctccccgtacaaggaccttctggaccctgcacggtggcggatgctgatccagcagttccggtacgacaactaccgactacaccagctgggaaacaattctgtgttcaccctcaccctgcaggctggcctctcagccatcaagacacc

SEQ ID NO: 150445 - DNA, 1340 bp, Homo sapiens
  Payload ID: 9717
  Gene Symbol: MAEA
  Gene Name: macrophage erythroblast attacher
  ENST ID: ENST00000505177
  CDS Start-End: 28-1332
gcccgctaatgttttggccgcttcaagatggcggtgcaggagtcggcggctcagttgtccatgaccctgaaggtccaggagtacccgaccctcaaggtgccctacgagacgctgaacaaacgctttcgcgccgctcagaagaacattgaccgggagaccagccacgtcaccatggtggtggccgagctggagaagacgttgagcggctgccccgccgtggactccgtggtcagcctgctggacggcgtggtggagaagctcagcgtcctcaagaggaaggcggtggaatccatccaggccgaggacgagagcgccaagctgtgcaagcgccggatcgagcacctcaaagagcatagcagcgaccagcccgcggcggccagcgtgtggaagaggaagcgcatggatcgcatgatggtggagcacctgctgcgttgcggctactacaacacggctgtcaagctggcgcgccagagcggcatcgaggacctagtgaatattgagatgttcctgacggccaaagaggtggaggagtccctggagaggcgtgagacggccacctgcctggcctggtgccatgacaacaagtcccggctccggaagatgaagggccgccaaaacaagcacgaagcaaagacgggacgaaaaagtagagcggctagtagctcccctaaagagagtttggaccttggtatggaaaccctaaaaggaaagccagaattgagctgcctggagttcagcctcagaatccaggagttcattgaactcatccggcagaataagagactggacgctgtgagacatgcaagaaagcacttcagccaagcagaagggagccagctggacgaggtgcgccaggccatgggcatgctggccttcccgcccgacacgcacatctccccgtacaaggaccttctggaccctgcacggtggcggatgctgatccagcagttccggtacgacaactaccgactacaccagctgggaaacaattctgtgttcaccctcaccctgcaggctggcctctcagccatcaagacaccacagtgctacaaggaggacggcagctccaagagccctgactgccctgtgtgcagccgctccctgaacaagctggcgcagcccctgcccatggcccactgtgccaactcccgcctggtctgcaagatttctggcgacgtgatgaacgagaacaatccgcccatgatgctgcccaacggctacgtctacggctacaattctctgctttctatccgtcaagatgataaagtcgtgtgcccgagaaccaaagaagtcttccacttctcacaagccgagaaggtgtacatcatgtaggccccacg

SEQ ID NO: 150446 - DNA, 839 bp, Homo sapiens
  Payload ID: 9717
  Gene Symbol: MAEA
  Gene Name: macrophage erythroblast attacher
  ENST ID: ENST00000512308
  CDS Start-End: 24-227
gctaatgttttggccgcttcaagatggcggtgcaggagtcggcggctcagttgtccatgaccctgaaggtccaggagtacccgaccctcaagaacattccagcatggaaaccccgctgtgcaaggcccctgcactggccacagaagccgcacctatctgctgaggaacccggttgctgcctggagtgggtgtcgagtactgcctggcagcatagccatgcttcttgaggcattttagcaccctgtaccccaggtgccctacgagacgctgaacaaacgctttcgcgccgctcagaagaacattgaccgggagaccagccacgtcaccatggtggtggccgagctggagaagacgttgagcggctgccccgccgtggactccgtggtcagcctgctggacggcgtggtggagaagctcagcgtcctcaagaggaaggcggtggaatccatccaggccgaggacgagagcgccaagctgtgcaagcgccggatcgagcacctcaaagagcatagcagcgaccagcccgcggcggccagcgtgtggaagaggaagcgcatggatcgcatgatggtggagcacctgctgcgttgcggctactacaacacggctgtcaagctggcgcgccagagcggcatcgaggacctagtgaatattgagatgttcctgacggccaaagaggtggaggagtccctggagaggcgtgagacggccacctgcctggcctggtgccatgacaacaagtcccggctccggaagatgaagagctgcctggagttcagcctcagaatccaggagttcattgaactcatccggcagaataagagactggacgctgtgag

SEQ ID NO: 150447 - DNA, 595 bp, Homo sapiens
  Payload ID: 9717
  Gene Symbol: MAEA
  Gene Name: macrophage erythroblast attacher
  ENST ID: ENST00000513301
  CDS Start-End: 25-348
cgctaatgttttggccgcttcaagatggcggtgcaggagtcggcggctcagttgtccatgaccctgaaggtccaggagtacccgaccctcaaggtgccctacgagacgctgaacaaacgctttcgcgccgctcagaagaacattgaccgggagaccagccacgtcaccatggtggtggccgagctggagaagacgttgagcggctgccccgccgtggactccgtggtcagcctgctggacggcgtggtggagaagctcagcgtcctcaagaggaaggttggtcccgcctggcggtccctcttcagtctggggcatggacaccccttttgtctcgaaaatgagtcctaagacaggcggtggaatccatccaggccgaggacgagagcgccaagctgtgcaagcgccggatcgagcacctcaaagagcatagcagcgaccagcccgcggcggccagcgtgtggaagaggaagcgcatggatcgcatgatggtggagcacctgctgcgttgcggctactacaacacggctgtcaagctggcgcgccagagcggcatcgaggacctagtgaatattgagatgttcctgacggccaaaga

SEQ ID NO: 150448 - DNA, 1444 bp, Homo sapiens
  Payload ID: 9717
  Gene Symbol: MAEA
  Gene Name: macrophage erythroblast attacher
  ENST ID: ENST00000505839
  CDS Start-End: 286-1332
ttgcactgggagcaaagggttcctgtctgcagcacaccagctgcccggagctctgccctgtgcctgagcagcgtcagcaccgcggtgaggcggacggcccggcaggggttggaaagtccagaaaggccccgttcccgcgtagaacttgaatgcagctaagggacgtccagagaggcctttccttttctggtggcggtctggaatgtgctggtgccctacgagacgctgaacaaacgctttcgcgccgctcagaagaacattgaccgggagaccagccacgtcaccatggtggtggccgagctggagaagacgttgagcggctgccccgccgtggactccgtggtcagcctgctggacggcgtggtggagaagctcagcgtcctcaagaggaaggcggtggaatccatccaggccgaggacgagagcgccaagctgtgcaagcgccggatcgagcacctcaaagagcatagcagcgaccagcccgcggcggccagcgtgtggaagaggaagcgcatggatcgcatgatggtggagcacctgctgcgttgcggctactacaacacggctgtcaagctggcgcgccagagcggcatcgaggacctagtgaatattgagatgttcctgacggccaaagaggtggaggagtccctggagaggcgtgagacggccacctgcctggcctggtgccatgacaacaagtcccggctccggaagatgaagagctgcctggagttcagcctcagaatccaggagttcattgaactcatccggcagaataagagactggacgctgtgagacatgcaagaaagcacttcagccaagcagaagggagccagctggacgaggtgcgccaggccatgggcatgctggccttcccgcccgacacgcacatctccccgtacaaggaccttctggaccctgcacggtggcggatgctgatccagcagttccggtacgacaactaccgactacaccagctgggaaacaattctgtgttcaccctcaccctgcaggctggcctctcagccatcaagacaccacagtgctacaaggaggacggcagctccaagagccctgactgccctgtgtgcagccgctccctgaacaagctggcgcagcccctgcccatggcccactgtgccaactcccgcctggtctgcaagatttctggcgacgtgatgaacgagaacaatccgcccatgatgctgcccaacggctacgtctacggctacaattctctgctttctatccgtcaagatgataaagtcgtgtgcccgagaaccaaagaagtcttccacttctcacaagccgagaaggtgtacatcatgtaggccccacgtcgtgaagcgcacgcctcggggacgggctgcagtgggcggggaggccacgccttcctcctgtcccacgctccagcctgccgcggcgtttctgtttcttgcgacc

SEQ ID NO: 150449 - DNA, 598 bp, Homo sapiens
  Payload ID: 9717
  Gene Symbol: MAEA
  Gene Name: macrophage erythroblast attacher
  ENST ID: ENST00000509254
  CDS Start-End: 21-344
aatgttttggccgcttcaagatggcggtgcaggagtcggcggctcagttgtccatgaccctgaaggtccaggagtacccgaccctcaaggtgccctacgagacgctgaacaaacgctttcgcgccgctcagaagaacattgaccgggagaccagccacgtcaccatggtggtggccgagctggagaagacgttgagcggctgccccgccgtggactccgtggtcagcctgctggacggcgtggtggagaagctcagcgtcctcaagaggaaggttggtcccgcctggcggtccctcttcagtctggggcatggacaccccttttgtctcgaaaatgagtcctaagacaggacctagtgaatattgagatgttcctgacggccaaagaggtggaggagtccctggagaggcgtgagacggccacctgcctggcctggtgccatgacaacaagtcccggctccggaagatgaagagctgcctggagttcagcctcagaatccaggagttcattgaactcatccggcagaataagagactggacgctgtgagtgggccgggtggccgagtgttccacagaaggcccatttggagaagtggg

SEQ ID NO: 150450 - DNA, 1607 bp, Homo sapiens
  Payload ID: 9717
  Gene Symbol: MAEA
  Gene Name: macrophage erythroblast attacher
  ENST ID: ENST00000510794
  CDS Start-End: 205-1392
ggcctggctcctctggggggcgtggatgtggggaggagctgctgtctgggtcagcagctgccctgctggagggagagggggtgctgcgctcatcccctgaactcagattggatagccccgggccagcgctggaggaggagcagaggcagggaggtgggaggagcgtgcgcagaggcgtgggaggcctgaggagtaagcggctggatgtggaccctgagagccactggcagggaggtggggtcttccagttgtgaagacaccgtggccccggtgccctacgagacgctgaacaaacgctttcgcgccgctcagaagaacattgaccgggagaccagccacgtcaccatggtggtggccgagctggagaagacgttgagcggctgccccgccgtggactccgtggtcagcctgctggacggcgtggtggagaagctcagcgtcctcaagaggaaggcggtggaatccatccaggccgaggacgagagcgccaagctgtgcaagcgccggatcgagcacctcaaagagcatagcagcgaccagcccgcggcggccagcgtgtggaagaggaagcgcatggatcgcatgatggtggagcacctgctgcgttgcggctactacaacacggctgtcaagctggcgcgccagagcggcatcgaggacctagtgaatattgagatgttcctgacggccaaagaggtggaggagtccctggagaggcgtgagacggccacctgcctggcctggtgccatgacaacaagtcccggctccggaagatgaagagctgcctggagttcagcctcagaatccaggagttcattgaactcatccggcagaataagagactggacgctgtgagacatgcaagaaagcacttcagccaagcagaagggagccagctggacgaggtgcgccaggccatgggcatgctggccttcccgcccgacacgcacatctccccgtacaaggaccttctggaccctgcacggtggcggatgctgatccagcagttccggtacgacaactaccgactacaccagctgggaaacaattctgtgttcaccctcaccctgcaggctggcctctcagccatcaagacaccacagtgctacaaggaggacggcagctccaagagccctgactgccctgtgtgcagccgctccctgaacaagctggcgcagcccctgcccatggcccactgtgccaactcccgcctggtctgcaagatttctggcgacgtgatgaacgagaacaatccgcccatgatgctgcccaacggctacgtctacggctacaattctctgctttctatccgtcaagatgataaagtcgtgtgcccgagaaccaaagaagtcttccacttctcacaagccgagaaggtgtacatcatgtaggccccacgtcgtgaagcgcacgcctcggggacgggctgcagtgggcggggaggccacgccttcctcctgtcccacgctccagcctgccgcggcgtttctgtttcttgcgaccaaagatccgtgagcaacgataaatactcttaggaagagagaaaataaggtttcataagtttgtacttgaaaacatttggattggtaggattttgtaacacgtc

SEQ ID NO: 150451 - DNA, 570 bp, Homo sapiens
  Payload ID: 9717
  Gene Symbol: MAEA
  Gene Name: macrophage erythroblast attacher
  ENST ID: ENST00000502558
  CDS Start-End: 21-570
aatgttttggccgcttcaagatggcggtgcaggagtcggcggctcagttgtccatgaccctgaaggtccaggagtacccgaccctcaaggtgccctacgagacgctgaacaaacgctttcgcgccgctcagaagaacattgaccgggagaccagccacgtcaccatggtggtggccgagctggagaagacgttgagcggctgccccgccgtggactccgtggtcagcctgctggacggcgtggtggagaagctcagcgtcctcaagaggaaggacctagtgaatattgagatgttcctgacggccaaagaggtggaggagtccctggagaggcgtgagacggccacctgcctggcctggtgccatgacaacaagtcccggctccggaagatgaagagctgcctggagttcagcctcagaatccaggagttcattgaactcatccggcagaataagagactggacgctgtgagacatgcaagaaagcacttcagccaagcagaagggagccagctggacgaggtgcgccaggccatgggcatgctggccttcccgcccgacacgcacatct

SEQ ID NO: 150452 - DNA, 1001 bp, Homo sapiens
  Payload ID: 9717
  Gene Symbol: MAEA
  Gene Name: macrophage erythroblast attacher
  ENST ID: ENST00000509531
  CDS Start-End: 1-738
atggcggtgcaggagtcggcggctcagttgtccatgaccctgaaggtccaggagtacccgaccctcaaggtgccctacgagacgctgaacaaacgctttcgcgccgctcagaagaacattgaccgggagaccagccacgtcaccatggtggtggccgagctggagaagacgttgagcggctgccccgccgtggactccgtggtcagcctgctggacggcgtggtggagaagctcagcgtcctcaagaggaaggcggtggaatccatccaggccgaggacgagagcgccaagctgtgcaagcgccggatcgagcacctcaaagagcatagcagcgaccagcccgcggcggccagcgtgtggaagaggaagcgcatggatcgcatgatggtggagcacctgctgcgttgcggctactacaacacggctgtcaagctggcgcgccagagcggcatcgagacatgcaagaaagcacttcagccaagcagaagggagccagctggacgaggtgcgccaggccatgggcatgctggccttcccgcccgacacgcacatctccccgtacaaggaccttctggaccctgcacggtggcggatgctgatccagcagttccggtacgacaactaccgactacaccagctgggaaacaattctgtgttcaccctcaccctgcaggctggcctctcagccatcaagacaccacagtgctacaaggaggacggcagctccaagagccctgactgccctgtgtgcagccgctccctgaacaagctggcgcagcccctgcccatggcccactgtgccaactcccgcctggtctgcaagatttctggcgacgtgatgaacgagaacaatccgcccatgatgctgcccaacggctacgtctacggctacaattctctgctttctatccgtcaagatgataaagtcgtgtgcccgagaaccaaagaagtcttccacttctcacaagccgagaaggtgtacatcatgtaggccccacgtc

SEQ ID NO: 150453 - DNA, 550 bp, Homo sapiens
  Payload ID: 9717
  Gene Symbol: MAEA
  Gene Name: macrophage erythroblast attacher
  ENST ID: ENST00000512842
  CDS Start-End: 205-550
gatgtggggaggagctgctgtctgggtcagcagctgccctgctggagggagagggggtgctgcgctcatcccctgaactcagattggatagccccgggccagcgctggaggaggagcagaggcagggaggtgccctacgagacgctgaacaaacgctttcgcgccgctcagaagaacattgaccgggagaccagccacgtcaccatggtggtggccgagctggagaagacgttgagcggctgccccgccgtggactccgtggtcagcctgctggacggcgtggtggagaagctcagcgtcctcaagaggaaggcggtggaatccatccaggccgaggacgagagcgccaagctgtgcaagcgccggatcgagcacctcaaagagcatagcagcgaccagcccgcggcggccagcgtgtggaagaggaagcgcatggatcgcatgatggtggagcacctgctgcgttgcggctactacaacacggctgtcaagctggcgcgccagagcggcatcgaggacctagtgaatattgagatgttcctgacggcca

SEQ ID NO: 150454 - DNA, 1945 bp, Homo sapiens
  Payload ID: 9717
  Gene Symbol: MAEA
  Gene Name: macrophage erythroblast attacher
  ENST ID: ENST00000514708
  CDS Start-End: 20-1006
atgttttggccgcttcaagatggcggtgcaggagtcggcggctcagttgtccatgaccctgaaggtccaggagtacccgaccctcaaggtgccctacgagacgctgaacaaacgctttcgcgccgctcagaagaacattgaccgggagaccagccacgtcaccatggtggtggccgagctggagaagacgttgagcggctgccccgccgtggactccgtggtcagcctgctggacggcgtggtggagaagctcagcgtcctcaagaggaaggcggtggaatccatccaggccgaggacgagagcgccaagctgtgcaagcgccggatcgagcacctcaaagagcatagcagcgaccagcccgcggcggccagcgtgtggaagaggaagcgcatggatcgcatgatggtggagcacctgctgcgttgcggctactacaacacggctgtcaagctggcgcgccagagcggcatcgagacatgcaagaaagcacttcagccaagcagaagggagccagctggacgaggtgcgccaggccatgggcatgctggccttcccgcccgacacgcacatctccccgtacaaggaccttctggaccctgcacggtggcggatgctgatccagcagttccggtacgacaactaccgactacaccagctgggaaacaattctgtgttcaccctcaccctgcaggctggcctctcagccatcaagacacctgctacaaggaggacggcagctccaagagccctgactgccctgtgtgcagccgctccctgaacaagctggcgcagcccctgcccatggcccactgtgccaactcccgcctggtctgcaagatttctggcgacgtgatgaacgagaacaatccgcccatgatgctgcccaacggctacgtctacggctacaattctctgctttctatccgtcaagatgataaagtcgtgtgcccgagaaccaaagaagtcttccacttctcacaagccgagaaggtgtacatcatgtaggccccacgtcgtgaagcgcacgcctcggggacgggctgcagtgggcggggaggccacgccttcctcctgtcccacgctccagcctgccgcggcgtttctgtttcttgcgaccaaagatccgtgagcaacgataaatactcttaggaagagagaaaataaggtttcataagtttgtacttgaaaacatttggattggtaggattttgtaacacgtcaaccatttgatgcttctgaaaagtactttcaacttgcgaaggaaactcttctttaaagactgacctaaacaccgagggaaacttaagaacgtttaaaatataggagtccgtgatttccctgtgttttcagtttctttccttctgtgaacgatgagacttggagaacgggctggtccttcaccacttcctgttggccctggcctggccggggaaggtggcagcggcaccggactgacctgcagtgacccgcgatgccgcgccacgagggacacttatggcttcattcgagagctgctgccaaaacgcctggcgccgccaccgtcgggggctggcttcgaggacgcccgcctgcctcgcgggtcgtgtccgcgggactgtgttcgtacgtgcatagtttcgatatcacatcgcggggctgtgttcgtagctgcgtcgtttcgatatcacaccctctgtgtgccgccttacttcctgcttcgagaatgtataacgtggaaatccacgggaccaaatttctgcagaggccttgccggatggttccataactgtagagtctaattgctatccattacagaaattaatcgttcagttgaaagaagtactgatgacttttcaaaacaaatgaaccaccgtagctgacagagaaccgtatcgtagaggtttgtagttagtgcttatttttgcatgttgatgttgactagctaataaactgtaaatgtaaacc

SEQ ID NO: 150455 - DNA, 4442 bp, Homo sapiens
  Payload ID: 9718
  Gene Symbol: MPEG1
  Gene Name: macrophage expressed 1
  Uniprot ID: Q2M385
  ENST ID: ENST00000361050
  CDS Start-End: 87-2237
atctgcttctgttttctccatcttagtttgcccaaagcttgctggccgctgtgtagggctggtgagtggctggggctgtctgagccatgaacaacttcagggccaccatcctcttctgggcagcggcagcatgggctaaatcaggcaagccttcgggagagatggacgaagttggagttcaaaaatgcaagaatgccttgaaactacctgtcctggaagtcctacctggagggggctgggacaatctgcggaatgtggacatgggacgagttatggaattgacttactccaactgcaggacaacagaggatggacagtatatcatccctgatgaaatcttcaccattccccagaaacagagcaacctggagatgaactcagaaatcctggaatcctgggcaaattaccagagtagcacctcctactccatcaacacagaactctctcttttttccaaagtcaatggcaagttttccactgagttccagaggatgaagaccctccaagtgaaggaccaagctataactacccgagttcaggtaagaaacctcgtctacacagtcaaaatcaacccaactttagagctaagctcaggttttaggaaggaactccttgacatctctgaccgtctagagaacaaccagacgaggatggccacctacctggcagaactcctggtgctcaactatggcacccacgtcaccaccagtgtcgacgctggggctgctcttattcaggaggaccacctcagggcctccttcctccaagacagccagagcagtcgtagtgccgtgaccgcctctgctggacttgcctttcaaaacaccgtgaacttcaaatttgaggaaaactatacctcgcagaatgtcctcaccaagagctacctctcaaaccgaaccaactccagggtgcagagcattggaggggttcctttttacccaggcatcaccctccaggcctggcagcagggtatcaccaaccacctggtggccatcgaccgctctggcctgccgctgcatttcttcatcaaccccaacatgctacctgacttgccaggccccctggtgaagaaggtgtcaaagacagtggaaactgctgtgaagcgctattatacattcaacacctaccctggctgcacagatctcaattctcccaacttcaattttcaggccaacacggatgatggctcctgcgaggggaaaatgaccaacttctctttcggtggggtttatcaggaatgcactcagctctcagggaatagggatgtcctcctctgccaaaagttggagcagaagaatccactcactggtgatttctcctgcccctctggctactccccggtgcacctgttatcccagatccacgaggagggttacaaccacctggagtgtcatcgaaagtgcactctcctcgtcttctgcaagaccgtgtgtgaagatgtgttccaggtggcaaaagctgaatttagggctttttggtgtgtggccagcagccaagtacctgaaaactcaggactgctttttgggggcctcttcagcagcaagagcataaaccccatgacaaatgcacagtcatgcccagccggctactttccactgagactctttgaaaacctcaaggtatgtgtttctcaggactatgagttgggaagcaggtttgcggtcccctttggcgggttctttagctgcacagttgggaaccccctggtagatcctgctatatccagagatttaggggcaccgtctctgaaaaagtgccccgggggcttcagccagcacccagccctcatcagcgatggatgccaagtgtcctattgcgtcaaatccgggctcttcacaggagggtccctgccccctgccaggctcccacctttcacccggccacccctcatgagtcaggctgccaccaatactgtcatagtgaccaattctgagaatgcgagatcctggattaaagactcccagacccaccagtggaggctgggagaaccgatagagctgcggagggccatgaatgtcatccatggggatggtggtggtctgtcaggaggggctgcagctggggtcacagtgggggtcaccaccattctggctgttgttatcaccttggccatctacggcacccggaagttcaagaagaaagcatatcaggcaattgaggaaaggcagagtttggttccaggcactgcagcaactggagacaccacttaccaagagcaggggcagagtccagcttaaatctctccccgaaaatggtttctctcatctccagtgtggtcattgctgaccactctgttttcctaagcattgaaatggcaagtgcaaccaaaagtaggtatattcgtgacttcttgtttaggtctctgggccaggaaattcatactgttacatggataaggttgggattggggagagggaacagttgggactagaagcaaaagtgattctgggactaaaataggaagcagatgtcctttcccaatgtgtgttgctgtcttcacctgaatgcatttgtgtaaaaatagcggagggacaatgtgaacatttgtatttggaagctatgaatttactctgaagtttgcagttgtttccaatttgtgagctctaagagtttctgcctgtaagaactactctccttttattttgatttttaaaaacctgtctgaatttcacactcttagagcctggaagagccctgaaaagacacaagtcttgcctggctactgctttttaactttgagggctctatgttgacagactgttatctcctctgggtgacctcaaacatctgaaaagaaagatgttgcctgtgccaattccactttttccagctgccccttgatgaacactcccttataccagaccactcttggacttctgactggtgtcatcaagtcctcagaaaatattttaagttattttaagttattaaggaagggatgatttggagacaaggagtaatgaaagatgggtaaaaactggaaaagattctggtgctaagtactaccccttcatcttccatggatggtcattacctttcctgtcctcctgttatatgaacacacacacacacacacacacacacacacacacacacgcacacacataccacatttcaataagtcttcattgttctgggtccttacctttcctgtcctcctgttatatgaacacacacacacacacacacacacacacacacgcacaccacatttcaatgtctgcatggttctgggggtaacaaaggcaagaagttaaagtaagaccacatttgagtattacttactctgtagaatcaaaacagagtagttaacaccaattatgcaaactacttttttttccagcagaaagggagctgacatgatcaaatccatgttttcaaatgaactgaaaaaggcatccagcaccacttataacacatttatttcagttccaggctgacagccctggggcatctagcaggatgcataattgtcatctggtgagagttgggactttgctcaattttaataccaatctctcctgattgtaattacctccactactttcatgatccccctacaatatttttttaaatgatatatttattcactgaatcaaatgtcattaatgagttatcttctgtggaggatgactgttctctttgttaatgttcacaatcaagatcttgggctgagaagaggcccttcacccaaggagtttgaagtatcacagtgtgtgggaaggtgggaaccaggatacccattcatttccaaccgagacacagagaagtgagtcacagaatttgagcccgctctcttgactgcccagccagagacactgatttctgtaacctcttcacttgatcctgcctcttaagcattaaaacattctcctaaacctctgagtgttttgtgggttctgggtgttttgtacattttagccaagctaaccacttgtctgcaagtactgactttcctatgaattctttgaagattattgagtcagaaaggaaaaatatagccccaaattcccaggcttttaatgcattacattaactgcctattgaaatgagaagttcttcacaaacttgtatacccactaacaagattgcacataaacatgcattaaagtatatactaagaaaccctctgtccaacggctcatgcatatgaagtccgaacatgggagtttgccaattgcattcatcaagtcgttttgcggagtcagatccctgatggaagagctcacaggctctgccttccaagtcctgggttcctaactggtgaccttagcctggggtctgtggggagaccaaccctggcttccaagaaaaccacattccatggactatcagaaatagacacagatttgggtgacaaagctggctctgtatttgcattttatttttgtgttcttgtcagtttgggaatgattaatattaaacatttatttgagaaacaa

SEQ ID NO: 150456 - DNA, 939 bp, Homo sapiens
  Payload ID: 9719
  Gene Symbol: MIF
  Gene Name: macrophage migration inhibitory factor (glycosylation-inhibiting factor)
  Uniprot ID: P14174
  ENST ID: ENST00000215754
  CDS Start-End: 472-819
acaggggctcagtgcgtgcagtggaatgaactgggcttcatctctggaagggtaaggggccatcttccgggttcaccgccgcatccccacccccggcacagcgcctcctggcgactaacatcggtgacttagtgaaaggactaagaaagacccgaggcgaggccggaacaggccgatttctagccgccaagtggagaacaggttggagcggtgcgccgggcttagcggcggttgctggaggaacgggcggagtcgcccagggtcctgccctgcgggggtcgagccgaggcaggcggtgacttccccactcggggcggagccgcagcctcgcgggggcggggcctggcgccggcggtggcgtcacaaaaggcgggaccacagtggtgtccgagaagtcaggcacgtagctcagcggcggccgcggcgcgtgcgtctgtgcctctgcgcgggtctcctggtccttctgccatcatgccgatgttcatcgtaaacaccaacgtgccccgcgcctccgtgccggacgggttcctctccgagctcacccagcagctggcgcaggccaccggcaagcccccccagtacatcgcggtgcacgtggtcccggaccagctcatggccttcggcggctccagcgagccgtgcgcgctctgcagcctgcacagcatcggcaagatcggcggcgcgcagaaccgctcctacagcaagctgctgtgcggcctgctggccgagcgcctgcgcatcagcccggacagggtctacatcaactattacgacatgaacgcggccaatgtgggctggaacaactccaccttcgcctaagagccgcagggacccacgctgtctgcgctggctccacccgggaacccgccgcacgctgtgttctaggcccgcccaccccaaccttctggtggggagaaataaacggtttagagactagga

SEQ ID NO: 150457 - DNA, 939 bp, Homo sapiens; identical to SEQ ID NO: 150456
  Payload ID: 9719
  Gene Symbol: MIF
  Gene Name: macrophage migration inhibitory factor (glycosylation-inhibiting factor)
  Uniprot ID: P14174
  ENST ID: ENST00000613839
  CDS Start-End: 472-819

SEQ ID NO: 150458 - DNA, 1838 bp, Homo sapiens
  Payload ID: 9720
  Gene Symbol: MARCO
  Gene Name: macrophage receptor with collagenous structure
  Uniprot ID: Q9UEW3
  ENST ID: ENST00000327097
  CDS Start-End: 136-1698
agagccaaagggaagtgctgcgaggtttacaaccagctgcagtggttcgatgggaaggatctttctccaagtggttcctcttgaggggagcatttctgctggctccaggactttggccatctataaagcttggcaatgagaaataagaaaattctcaaggaggacgagctcttgagtgagacccaacaagctgcttttcaccaaattgcaatggagcctttcgaaatcaatgttccaaagcccaagaggagaaatggggtgaacttctccctagctgtggtggtcatctacctgatcctgctcaccgctggcgctgggctgctggtggtccaagttctgaatctgcaggcgcggctccgggtcctggagatgtatttcctcaatgacactctggcggctgaggacagcccgtccttctccttgctgcagtcagcacaccctggagaacacctggctcagggtgcatcgaggctgcaagtcctgcaggcccaactcacctgggtccgcgtcagccatgagcacttgctgcagcgggtagacaacttcactcagaacccagggatgttcagaatcaaaggtgaacaaggcgccccaggtcttcaaggtcacaagggggccatgggcatgcctggtgcccctggcccgccgggaccacctgctgagaagggagccaagggggctatgggacgagatggagcaacaggcccctcgggaccccaaggcccaccgggagtcaagggagaggcgggcctccaaggaccccagggtgctccagggaagcaaggagccactggcaccccaggaccccaaggagagaagggcagcaaaggcgatgggggtctcattggcccaaaaggggaaactggaactaagggagagaaaggagacctgggtctcccaggaagcaaaggggacaggggcatgaaaggagatgcaggggtcatggggcctcctggagcccaggggagtaaaggtgacttcgggaggccaggcccaccaggtttggctggttttcctggagctaaaggagatcaaggacaacctggactgcagggtgttccgggccctcctggtgcagtgggacacccaggtgccaagggtgagcctggcagtgctggctcccctgggcgagcaggacttccagggagccccgggagtccaggagccacaggcctgaaaggaagcaaaggggacacaggacttcaaggacagcaaggaagaaaaggagaatcaggagttccaggccctgcaggtgtgaagggagaacaggggagcccagggctggcaggtcccaagggagcccctggacaagctggccagaagggagaccagggagtgaaaggatcttctggggagcaaggagtaaagggagaaaaaggtgaaagaggtgaaaactcagtgtccgtcaggattgtcggcagtagtaaccgaggccgggctgaagtttactacagtggtacctgggggacaatttgcgatgacgagtggcaaaattctgatgccattgtcttctgccgcatgctgggttactccaaaggaagggccctgtacaaagtgggagctggcactgggcagatctggctggataatgttcagtgtcggggcacggagagtaccctgtggagctgcaccaagaatagctggggccatcatgactgcagccacgaggaggacgcaggcgtggagtgcagcgtctgacccggaaaccctttcacttctctgctcccgaggtgtcctcgggctcatatgtgggaaggcagaggatctctgaggagttccctggggacaactgagcagcctctggagaggggccattaataaagctcaacatcattggc

SEQ ID NO: 150459 - DNA, 569 bp, Homo sapiens
  Payload ID: 9720
  Gene Symbol: MARCO
  Gene Name: macrophage receptor with collagenous structure
  ENST ID: ENST00000412481
  CDS Start-End: 379-569
aaagcttggcaatgagaaataagaaaattctcaaggaggacgagctcttgagtgagacccaacaagctgcttttcaccaaattgcaatggagcctttcgaaatcaatggatgaggagtgtaaatttcacactgtaccctctagaagcacagtgcaacttgcatccctctttcctgccatcacctccagcctccctcattagaacaagcctccttcattccattatctgcactagaattaagttccaaagcccaagaggagaaatggggtgaacttctccctagctgtggtggtcatctacctgatcctgctcaccgctggcgctgggctgctggtggtccaagttctgaatctgcaggcgcggctccgggtcctggagatgtatttcctcaatgacactctggcggctgaggacagcccgtccttctccttgctgcagtcagcacaccctggagaacacctggctcagggtgcatcgaggctgcaagtcctgcaggcccaactcacctgggtccgcgtcagccatgagcacttgctgcagcgggtagacaacttcactcagaacccagg

SEQ ID NO: 150460 - DNA, 3572 bp, Homo sapiens
  Payload ID: 9721
  Gene Symbol: MSR1
  Gene Name: macrophage scavenger receptor 1
  Uniprot ID: P21757
  ENST ID: ENST00000350896
  CDS Start-End: 199-1365
aaatttagattttgcaaacctgtgcattgatgagagtgctattgaaacacattaagaaagattttcaacgcaggaatgtgtcatttcctttcttcatgtaccagatgctgaaatactatgagataaagattttaggtttcaattgtaaagagagagaagtggataaatcagtgctgctttctttaggacgaaagaagtatggagcagtgggatcactttcacaatcaacaggaggacactgatagctgctccgaatctgtgaaatttgatgctcgctcaatgacagctttgcttcctccgaatcctaaaaacagcccttcccttcaagagaaactgaagtccttcaaagctgcactgattgccctttacctcctcgtgtttgcagttctcatccctctcattggaatagtggcagctcaactcctgaagtgggaaacgaagaattgctcagttagttcaactaatgcaaatgatataactcaaagtctcacgggaaaaggaaatgacagcgaagaggaaatgagatttcaagaagtctttatggaacacatgagcaacatggagaagagaatccagcatattttagacatggaagccaacctcatggacacagagcatttccaaaatttcagcatgacaactgatcaaagatttaatgacattcttctgcagctaagtaccttgttttcctcagtccagggacatgggaatgcaatagatgaaatctccaagtccttaataagtttgaataccacattgcttgatttgcagctcaacatagaaaatctgaatggcaaaatccaagagaataccttcaaacaacaagaggaaatcagtaaattagaggagcgtgtttacaatgtatcagcagaaattatggctatgaaagaagaacaagtgcatttggaacaggaaataaaaggagaagtgaaagtactgaataacatcactaatgatctcagactgaaagattgggaacattctcagaccttgagaaatatcactttaattcaaggtcctcctggacccccgggtgaaaaaggagatcgaggtcccactggagaaagtggtccacgaggatttccaggtccaataggtcctccgggtcttaaaggtgatcggggagcaattggctttcctggaagtcgaggactcccaggatatgccggaaggccaggaaattctggaccaaaaggccagaaaggggaaaaggggagtggaaacacattaagtactggtccaatatggctgaatgaagtgttttgttttgggagagaatcatctattgaagaatgtaaaattcggcaatgggggacaagagcctgttcacattctgaagatgctggagtcacttgcactttataatgcatcatattttcattcacaactatgaaatcgctgctcaaaaatgattttattaccttgttcctgtaaaatccatttaatcaatatttaagagattaagaatattgcccaaataatattttagattacaggattaatatattgaacaccttcatgcttactattttatgtctatatttaaatcattttaacttctataggtttttaaatggaattttctaatataatgacttatatgctgaattgaacattttgaagtttatagcttccagattacaaaggccaagggtaatagaaatgcataccagtaattggctccaattcataatatgttcaccaggagattacaattttttgctcttcttgtctttgtaatctatttagttgattttaattactttctgaataacggaagggatcagaagatatcttttgtgcctagattgcaaaatctccaatccacacatattgttttaaaataagaatgttatccaactattaagatatctcaatgtgcaataacttgtgtattagatatcaatgttaatgatatgtcttggccactatggaccagggagcttatttttcttgtcatgtactgacaactgtttaattgaatcatgaagtaaattgaaagcaggacatatgagaaaactgaccatcagtatatttgtccagataattggtggatcaaaaatgccacttaacaggaagtttagtttgttatgcactttaaatggaataattagcttgttacaattctaggacatggtgtttaaaatttaaatctgattaatccattttaacaaacaatgcaaacatcttcagtgcagaaggaagagtggtttcaactgtttggagtcttttatgaagtcagtcaacatttacaaccaaagggcgggggggggggtggggggtgcgtctttagtcctaaagggacaataactctgagcatgccccaaaaaagtagtttagcaaccttttgttggtagtcaacccatccccagggccatagtgtagagtgtgaaaagctaccctgaaacccagtaattctaccctgaaagtgactgcctgcagaaagaccagcagttgatattaaagcgcaaatgaattcaacctcagccctgaaaataacagaattctgaagtttcctatgactaattcacaaaaaaagtaattgtaaactagtactattatggaattactctactgttctttctttaatagtggcaaatgaaagcataagcttaagcattttttcatattctgaagtctcaccacacataataaccaagtggtagactcacagccgtccaacttaaaaaggcaaaaccttaccttggaattggaattactgtaaacagcctactgaaaatgcatttttatcatgtaacattcttctacttgtttaacattgctgattttctctggcagcataattttgtggttaagagaatgaattctgaatgtacactttctgtctcaaaccctggctgtaatttcagctagttaataattctttgtgttcagttccactatctaggtattttcttcaaaaggtaaatacaatggtttctgaaagaatcatttgcattatcagcctgtttgggatgtctgagatcagtgcctctgggttgttaatactgtattgctgtatggtatatgtatgctgatttactacttatgcgtaagtggtatgcatgggatgtctgaaatcagtgcctatgggttgtcaatagtattaactattagtgttaactgttagtattaactattagtattattaacactaataatagtactattactattactatttttattttaaaataaaatttacctttaaaataataatagtactattgctagtactagtactattgctattactagtactattactagtactagtactatgacactgttaatagtactattaacaacccataggcacttgggatgtctgagatcagtgcctatgggttgttaatactatattgctgtatggtatatgcatgctgatttaccacttatgcatagatatatctttaataagtaatctaaaaatcctttttgtatttgagagaatctactaagttcagtccagtcaagaaaagaacctaatagcaccaatacaaattgaggacttaatttactttggaatgttgaattgcatttgttccattaaaaaaaacagaaatttgcga

SEQ ID NO: 150461 - DNA, 2132 bp, Homo sapiens
  Payload ID: 9721
  Gene Symbol: MSR1
  Gene Name: macrophage scavenger receptor 1
  Uniprot ID: P21757
  ENST ID: ENST00000262101
  CDS Start-End: 123-1478
tgtgtcatttcctttcttcatgtaccagatgctgaaatactatgagataaagattttaggtttcaattgtaaagagagagaagtggataaatcagtgctgctttctttaggacgaaagaagtatggagcagtgggatcactttcacaatcaacaggaggacactgatagctgctccgaatctgtgaaatttgatgctcgctcaatgacagctttgcttcctccgaatcctaaaaacagcccttcccttcaagagaaactgaagtccttcaaagctgcactgattgccctttacctcctcgtgtttgcagttctcatccctctcattggaatagtggcagctcaactcctgaagtgggaaacgaagaattgctcagttagttcaactaatgcaaatgatataactcaaagtctcacgggaaaaggaaatgacagcgaagaggaaatgagatttcaagaagtctttatggaacacatgagcaacatggagaagagaatccagcatattttagacatggaagccaacctcatggacacagagcatttccaaaatttcagcatgacaactgatcaaagatttaatgacattcttctgcagctaagtaccttgttttcctcagtccagggacatgggaatgcaatagatgaaatctccaagtccttaataagtttgaataccacattgcttgatttgcagctcaacatagaaaatctgaatggcaaaatccaagagaataccttcaaacaacaagaggaaatcagtaaattagaggagcgtgtttacaatgtatcagcagaaattatggctatgaaagaagaacaagtgcatttggaacaggaaataaaaggagaagtgaaagtactgaataacatcactaatgatctcagactgaaagattgggaacattctcagaccttgagaaatatcactttaattcaaggtcctcctggacccccgggtgaaaaaggagatcgaggtcccactggagaaagtggtccacgaggatttccaggtccaataggtcctccgggtcttaaaggtgatcggggagcaattggctttcctggaagtcgaggactcccaggatatgccggaaggccaggaaattctggaccaaaaggccagaaaggggaaaaggggagtggaaacacattaactccatttacgaaagttcgactggtcggtgggagcggccctcacgaggggagggtggagatactccacagcggccagtggggtacaatttgtgacgatcgctgggaagtgcgcgttggacaggtcgtctgtaggagcttgggatacccaggtgttcaagccgtgcacaaggcagctcactttggacaaggtactggtccaatatggctgaatgaagtgttttgttttgggagagaatcatctattgaagaatgtaaaattcggcaatgggggacaagagcctgttcacattctgaagatgctggagtcacttgcactttataatgcatcatattttcattcacaactatgaaatcgctgctcaaaaatgattttattaccttgttcctgtaaaatccatttaatcaatatttaagagattaagaatattgcccaaataatattttagattacaggattaatatattgaacaccttcatgcttactattttatgtctatatttaaatcattttaacttctataggtttttaaatggaattttctaatataatgacttatatgctgaattgaacattttgaagtttatagcttccagattacaaaggccaagggtaatagaaatgcataccagtaattggctccaattcataatatgttcaccaggagattacaattttttgctcttcttgtctttgtaatctatttagttgattttaattactttctgaataacggaagggatcagaagatatcttttgtgcctagattgcaaaatctccaatccacacatattgttttaaaataagaatgttatccaactattaagatatctcaatgtgcaataacttgtgtattagatatcaatgttaatgatatgtcttggccactatggaccagggagcttatttttcttgtcatgtactgacaactgtttaattgaatcatgaagtaaattgaaagcaggacatatgagaaaa

SEQ ID NO: 150462 - DNA, 1167 bp, Homo sapiens
  Payload ID: 9721
  Gene Symbol: MSR1
  Gene Name: macrophage scavenger receptor 1
  Uniprot ID: P21757
  ENST ID: ENST00000355282
  CDS Start-End: 1-1167
atggagcagtgggatcactttcacaatcaacaggaggacactgatagctgctccgaatctgtgaaatttgatgctcgctcaatgacagctttgcttcctccgaatcctaaaaacagcccttcccttcaagagaaactgaagtccttcaaagctgcactgattgccctttacctcctcgtgtttgcagttctcatccctctcattggaatagtggcagctcaactcctgaagtgggaaacgaagaattgctcagttagttcaactaatgcaaatgatataactcaaagtctcacgggaaaaggaaatgacagcgaagaggaaatgagatttcaagaagtctttatggaacacatgagcaacatggagaagagaatccagcatattttagacatggaagccaacctcatggacacagagcatttccaaaatttcagcatgacaactgatcaaagatttaatgacattcttctgcagctaagtaccttgttttcctcagtccagggacatgggaatgcaatagatgaaatctccaagtccttaataagtttgaataccacattgcttgatttgcagctcaacatagaaaatctgaatggcaaaatccaagagaataccttcaaacaacaagaggaaatcagtaaattagaggagcgtgtttacaatgtatcagcagaaattatggctatgaaagaagaacaagtgcatttggaacaggaaataaaaggagaagtgaaagtactgaataacatcactaatgatctcagactgaaagattgggaacattctcagaccttgagaaatatcactttaattcaaggtcctcctggacccccgggtgaaaaaggagatcgaggtcccactggagaaagtggtccacgaggatttccaggtccaataggtcctccgggtcttaaaggtgatcggggagcaattggctttcctggaagtcgaggactcccaggatatgccggaaggccaggaaattctggaccaaaaggccagaaaggggaaaaggggagtggaaacacattaagtactggtccaatatggctgaatgaagtgttttgttttgggagagaatcatctattgaagaatgtaaaattcggcaatgggggacaagagcctgttcacattctgaagatgctggagtcacttgcactttataa

SEQ ID NO: 150463 - DNA, 2826 bp, Homo sapiens
  Payload ID: 9721
  Gene Symbol: MSR1
  Gene Name: macrophage scavenger receptor 1
  Uniprot ID: P21757
  ENST ID: ENST00000381998
  CDS Start-End: 67-1143
taggtttcaattgtaaagagagagaagtggataaatcagtgctgctttctttaggacgaaagaagtatggagcagtgggatcactttcacaatcaacaggaggacactgatagctgctccgaatctgtgaaatttgatgctcgctcaatgacagctttgcttcctccgaatcctaaaaacagcccttcccttcaagagaaactgaagtccttcaaagctgcactgattgccctttacctcctcgtgtttgcagttctcatccctctcattggaatagtggcagctcaactcctgaagtgggaaacgaagaattgctcagttagttcaactaatgcaaatgatataactcaaagtctcacgggaaaaggaaatgacagcgaagaggaaatgagatttcaagaagtctttatggaacacatgagcaacatggagaagagaatccagcatattttagacatggaagccaacctcatggacacagagcatttccaaaatttcagcatgacaactgatcaaagatttaatgacattcttctgcagctaagtaccttgttttcctcagtccagggacatgggaatgcaatagatgaaatctccaagtccttaataagtttgaataccacattgcttgatttgcagctcaacatagaaaatctgaatggcaaaatccaagagaataccttcaaacaacaagaggaaatcagtaaattagaggagcgtgtttacaatgtatcagcagaaattatggctatgaaagaagaacaagtgcatttggaacaggaaataaaaggagaagtgaaagtactgaataacatcactaatgatctcagactgaaagattgggaacattctcagaccttgagaaatatcactttaattcaaggtcctcctggacccccgggtgaaaaaggagatcgaggtcccactggagaaagtggtccacgaggatttccaggtccaataggtcctccgggtcttaaaggtgatcggggagcaattggctttcctggaagtcgaggactcccaggatatgccggaaggccaggaaattctggaccaaaaggccagaaaggggaaaaggggagtggaaacacattaagaccagtacaactcactgatcatattagggcagggccctcttaagatcaggtgggttgggcgggacatcctctgctaccatctcattaaaaggcccttcacctctggacaagtcatctgcacaactgacttccaagatccttttgtgactcctccaaatgactttggttcccgtgttgtacctgacttccacatggccttctctcctggtccctggtgctgtttgggcctctgctcccatgctcatacctcttcttactccaattactccaccatcacctctctcccctatcacccccagcctggacacctctcatgcacggactggagggctgctccaaccagtcctcagttctctgccacccattgacctagagtcttgaacccaatttaatttattgggttctaggagaactgctgtgttctcaccctaacttggaagagtgatgtttcagtcaagcaaagcgattcctaccatacaatataacacttgtgtgaggctctgtcctaaatatctcaattaccaatatgtggtttggtagtatttctcgccatgctttgctcatgcgcaatgagactacaactagggtgtaaattttaagtatcccatctaaaactcatacaatgataggaaaaatccatttgtttttcatttgatttttactgaggaatcagctcaatcttcaatgaatactggtctctttccaaagcatttttgatcaaagtaaagactgagtcaagggctttttttttttctttttcttgttttaagagacagagccttgttctattgcacaggctggactacacgcattcacctagagtctagaacacaatttaatttattgggttctaggagaactgtcatgagtattgataatatgagagttctttatattcaaacattattctcaaccagagatagggatgtcatagaagaaaatccattcattcaatcattaattcacatgtccattatgtacctccatgagctggacataacagctaataagagataattgtctctggttttacagagctaattgtccctaagagatgtagacaaatgaacaagcaattacaatacatctaagctatactgggggaggaacagggctggataggtatgcagaggagataaaaaaattttaattccttagaatattttttaaaaattgattcttattttaccttctcatcttcttattttccaaattacagcatatatatatatatatatatatatatatatatatatatatatatatatattttttttttttttttttttttttttttaagttttgaagtgtagtcgagcttgggcaatttatccaacccatttaaaccaaaaataaaacttttcatgtattacctggtcatttcaaacaaaaatattttgatcatgaaaaagaataccaatattcttttgttctaaaaatctcttatgggattacatgttatatttttggtttctctctactgatcaacagactacattttcacaactcttctttcctttacgttttaacacacagacccaagattcatactattaagattctagtagaactctagatggtatgcctctgtgtatctcagcatttttattcccactcttgtataatgaacatgttaacacctacctcacagggttgttgtgaggatcaagtaagatattgtgtgtgtgaagatgctctgtgaaatcataaagtcctttaaagatgt

SEQ ID NO: 150464 - DNA, 1513 bp, Homo sapiens
  Payload ID: 9721
  Gene Symbol: MSR1
  Gene Name: macrophage scavenger receptor 1
  ENST ID: ENST00000445506
  CDS Start-End: 65-1474
actctgctgttgagacgttggggagatgaggaggaatacccagaaataaataaaactcccctggatgtgctatctcagtgcaatcatcagtatctctcttctcaacaaaaaaccaagtatggagcagtgggatcactttcacaatcaacaggaggacactgatagctgctccgaatctgtgaaatttgatgctcgctcaatgacagctttgcttcctccgaatcctaaaaacagcccttcccttcaagagaaactgaagtccttcaaagctgcactgattgccctttacctcctcgtgtttgcagttctcatccctctcattggaatagtggcagctcaactcctgaagtgggaaacgaagaattgctcagttagttcaactaatgcaaatgatataactcaaagtctcacgggaaaaggaaatgacagcgaagaggaaatgagatttcaagaagtctttatggaacacatgagcaacatggagaagagaatccagcatattttagacatggaagccaacctcatggacacagagcatttccaaaatttcagcatgacaactgatcaaagatttaatgacattcttctgcagctaagtaccttgttttcctcagtccagggacatgggaatgcaatagatgaaatctccaagtccttaataagtttgaataccacattgcttgatttgcagctcaacatagaaaatctgaatggcaaaatccaagagaataccttcaaacaacaagaggaaatcagtaaattagaggagcgtgtttacaatgtatcagcagaaattatggctatgaaagaagaacaagtgcatttggaacaggaaataaaaggagaagtgaaagtactgaataacatcactaatgatctcagactgaaagattgggaacattctcagaccttgagaaatatcactttaattcaaggtcctcctggacccccgggtgaaaaaggagatcgaggtcccactggagaaagtggtccacgaggatttccaggtccaataggtcctccgggtcttaaaggtgatcggggagcaattggctttcctggaagtcgaggactcccaggatatgccggaaggccaggaaattctggaccaaaaggccagaaaggggaaaaggggagtggaaacacattaactccatttacgaaagttcgactggtcggtgggagcggccctcacgaggggagggtggagatactccacagcggccagtggggtacaatttgtgacgatcgctgggaagtgcgcgttggacaggtcgtctgtaggagcttgggatacccaggtgttcaagccgtgcacaaggcagctcactttggacaaggtactggtccaatatggctgaatgaagtgttttgttttgggagagaatcatctattgaagaatgtaaaattcggcaatgggggacaagagcctgttcacattctgaagatgctggagtcacttgcactttataatgcatcatattttcattcacaactatgaaatcgctgctc

SEQ ID NO: 150465 - DNA, 353 bp, Homo sapiens
  Payload ID: 9721
  Gene Symbol: MSR1
  Gene Name: macrophage scavenger receptor 1
  ENST ID: ENST00000518960
  CDS Start-End: 160-353
ctcagggttatagaacagccgccttcagctattctcccccagggctctgcagaaccttcccacctttcagcaggctggagtgcagtggcatgatcgtgactcactgcagccttccactcctgggctcaagcaatcctactgcctcaggctcccagaagtatggagcagtgggatcactttcacaatcaacaggaggacactgatagctgctccgaatctgtgaaatttgatgctcgctcaatgacagctttgcttcctccgaatcctaaaaacagcccttcccttcaagagaaactgaagtccttcaaagctgcactgattgccctttacctcctcgtgtttgcagttctcat

SEQ ID NO: 150466 - DNA, 1009 bp, Homo sapiens
  Payload ID: 9721
  Gene Symbol: MSR1
  Gene Name: macrophage scavenger receptor 1
  ENST ID: ENST00000519060
  CDS Start-End: 59-172
aattgtaaagagagagaagtggataaatcagtgctgctttctttaggacgaaagaagtatggagcagtgggatcactttcacaatcaacaggaggacactgatagctgctccgaatctgtgaaatttgatgctcgctcaatgacagctttgcttcctccgagaaatcagtaaattagaggagcgtgtttacaatgtatcagcagaaattatggctatgaaagaagaacaagtgcatttggaacaggaaataaaaggagaagtgaaagtactgaataacatcactaatgatctcagactgaaagattgggaacattctcagaccttgagaaatatcactttaattcaaggtcctcctggacccccgggtgaaaaaggagatcgaggtcccactggagaaagtggtccacgaggatttccaggtccaataggtcctccgggtcttaaaggtgatcggggagcaattggctttcctggaagtcgaggactcccaggatatgccggaaggccaggaaattctggaccaaaaggccagaaaggggaaaaggggagtggaaacacattaagctttctgaaaatatgttaaaaataattaatttcctcctttatatatgtgtcaggaccagtacaactcactgatcatattagggcagggccctcttaagatcaggtgggttgggcgggacatcctctgctaccatctcattaaaaggcccttcacctctggacaagtcatctgcacaactgacttccaagatccttttgtgactcctccaaatgactttggttcccgtgttgtacctgacttccacatggccttctctcctggtccctggtgctgtttgggcctctgctcccatgctcatacctcttcttactccaattactccaccatcacctctctcccctatcacccccagcctggacacctctcatgcacggactggagggctgctccaaccagtcctcagttctctgccacccattgacctagagtcttgaacccaattt

SEQ ID NO: 150467 - DNA, 530 bp, Homo sapiens
  Payload ID: 9721
  Gene Symbol: MSR1
  Gene Name: macrophage scavenger receptor 1
  ENST ID: ENST00000518026
  CDS Start-End: 357-530
atataactacatatgttagcatagaagtggtattgtaattggagataattcctttaccagagatcagtttgcattgttttacgtacttggctatgggtgacttttctgctgataacatattgatgctctgaaagataaccccagaagagtatgaggagacatacacagtctacacagattgcctgttttacttctcaccattgatttatgttgccaaaacaaagagaatgctgaaagtcacctgttctccaaaggtatgtgccaccaaatcaaggaaaagcaatagaaagcagccccaaaatgaagaaccaggtatccttacaggaatatagtgaaccacaaagggctatgtgaaaatgcatttgctgcaagcgggaacatcaggaagtatggagcagtgggatcactttcacaatcaacaggaggacactgatagctgctccgaatctgtgaaatttgatgctcgctcaatgacagctttgcttcctccgaatcctaaaaacagcccttcccttcaagagaaactgaag

SEQ ID NO: 150468 - DNA, 695 bp, Homo sapiens
  Payload ID: 9721
  Gene Symbol: MSR1
  Gene Name: macrophage scavenger receptor 1
  ENST ID: ENST00000522672
  CDS Start-End: 1-450
gaaatcagtaaattagaggagcgtgtttacaatgtatcagcagaaattatggctatgaaagaagaacaagtgcatttggaacaggaaataaaaggagaagtgaaagtactgaataacatcactaatgatctcagactgaaagattgggaacattctcagaccttgagaaatatcactttaattcaaggtcctcctggacccccgggtgaaaaaggagatcgaggtcccactggagaaagtggtccacgaggatttccaggtccaataggtcctccgggtcttaaaggtgatcggggagcaattggctttcctggaagtcgaggactcccaggatatgccggaaggccaggaaattctggaccaaaaggccagaaaggggaaaaggggagtggaaacacattaaaatccaggaacctcacaacaaggaaagtctttgctatttctaaatgaaggttgtcactatagttcccttgtttcccttgggaaaagatatgaagtttgatcacctatttttgtgtttatgatattctaaaatatctgctcctcgccctcctatagtattgaaaatctctgcattgtatgttgataagtttgtatgtttgtatgtcaagaaaataatgaaccatttagttataatttttcaatggtatgaaaaaatctaagtgacaataaacttgtatctgtcaaaattcaaa

SEQ ID NO: 150469 - DNA, 667 bp, Homo sapiens
  Payload ID: 9722
  Gene Symbol: MST1
  Gene Name: macrophage stimulating 1
  ENST ID: ENST00000448220
  CDS Start-End: 1-586
ggcagggccagcatttctgcggggggtctctagtgaaggagcagtggatactgactgcccggcagtgcttctcctcctgaacccacagcatggagagccaagcctacagcgggtcccagtagccaagatggtgtgtgggccctcaggctcccagcttgtcctgctcaagctggagagatctgtgaccctgaaccagcgtgtggccctgatctgcctgccccctgaatggtatgtggtgcctccagggaccaagtgtgagattgcaggctggggtgagaccaaaggtacgggtaatgacacagtcctaaatgtggccttgctgaatgtcatctccaaccaggagtgtaacatcaagcaccgaggacgtgtgcgggagagtgagatgtgcactgagggactgttggcccctgtgggggcctgtgagggtgactacgggggcccacttgcctgctttacccacaactgctgggtcctggaaggaattataatccccaaccgagtatgcgcaaggtcccgctggccagctgtcttcacgcgtgtctctgtgtttgtggactggattcacaaggtcatgagactgggttaggcccagccttgatgccatatgccttggggaggacaaaacttcttgtcagacataaagccatgtttcctctttatgcctgta

SEQ ID NO: 150470 - DNA, 2621 bp, Homo sapiens
  Payload ID: 9722
  Gene Symbol: MST1
  Gene Name: macrophage stimulating 1
  ENST ID: ENST00000449682
  CDS Start-End: 363-2540
gaagctggggcaagtaattttccccaatttacagggaaaaaccgaaattcagaaaagtttaatgtcacccaggggctggagcccagacctctggcagctctcactttcacaatgcccttgggctgactaggctgcagaggggtttcaccccaaccccagggcacctcaagtgtccccaccaaaccttcctaacacctgtccactaagctgtactaggcccttgcaactgacctatgggacctgaggcctggcccctcatggctcctgtcaccaggtctcaggtcagggtccagcaggccctgagctgacgtgtggagccagagccacccaatcccgtagggacaggtttcacaacttcccggatggggctgtggtgggtcacagtgcagcctccagccagaaggatggggtggctcccactcctgctgcttctgactcaatgcttaggggtccctgggcagcgctcgccattgaatgacttccaagtgctccggggcacagagctacagcacctgctacatgcggtggtgcccgggccttggcaggaggatgtggcagatgctgaagagtgtgctggtcgctgtgggcccttaatggactgccgggccttccactacaacgtgagcagccatggttgccaactgctgccatggactcaacactcgccccacacgaggctgcggcgttctgggcgctgtgacctcttccagaagaaagactacgtacggacctgcatcatgaacaatggggttgggtaccggggcaccatggccacgaccgtgggtggcctgccctgccaggcttggagccacaagttcccaaatgatcacaagtacacgcccactctccggaatggcctggaagagaacttctgccgtaaccctgatggcgaccccggaggtccttggtgctacacaacagaccctgctgtgcgcttccagagctgcggcatcaaatcctgccgggaggccgcgtgtgtctggtgcaatggcgaggaataccgcggcgcggtagaccgcacggagtcagggcgcgagtgccagcgctgggatcttcagcacccgcaccagcaccccttcgagccgggcaagttcctcgaccaaggtctggacgacaactattgccggaatcctgacggctccgagcggccatggtgctacactacggatccgcagatcgagcgagagttctgtgacctcccccgctgcgggtccgaggcacagccccgccaagaggccacaactgtcagctgcttccgcgggaagggtgagggctaccggggcacagccaataccaccactgcgggcgtaccttgccagcgttgggacgcgcaaatcccgcatcagcaccgatttacgccagaaaaatacgcgtgcaaagaccttcgggagaacttctgccggaaccccgacggctcagaggcgccctggtgcttcacactgcggcccggcatgcgcgcggccttttgctaccagatccggcgttgtacagacgacgtgcggccccaggactgctaccacggcgcaggggagcagtaccgcggcacggtcagcaagacccgcaagggtgtccagtgccagcgctggtccgctgagacgccgcacaagccgcagttcacgtttacctccgaaccgcatgcacaactggaggagaacttctgccggaacccagatggggatagccatgggccctggtgctacacgatggacccaaggaccccattcgactactgtgccctgcgacgctgcgctgatgaccagccgccatcaatcctggaccccccagaccaggtgcagtttgagaagtgtggcaagagggtggatcggctggatcagcggcgttccaagctgcgcgtggttgggggccatccgggcaactcaccctggacagtcagcttgcggaatcggcagggccagcatttctgcggggggtctctagtgaaggagcagtggatactgactgcccggcagtgcttctcctcctgccatatgcctctcacgggctatgaggtatggttgggcaccctgttccagaacccacagcatggagagccaagcctacagcgggtcccagtagccaagatggtgtgtgggccctcaggctcccagcttgtcctgctcaagctggagagatctgtgaccctgaaccagcgtgtggccctgatctgcctgccccctgaatggtatgtggtgcctccagggaccaagtgtgagattgcaggctggggtgagaccaaaggtacgggtaatgacacagtcctaaatgtggccttgctgaatgtcatctccaaccaggagtgtaacatcaagcaccgaggacgtgtgcgggagagtgagatgtgcactgagggactgttggcccctgtgggggcctgtgagggtgactacgggggcccacttgcctgctttacccacaactgctgggtcctggaaggaattataatccccaaccgagtatgcgcaaggtcccgctggccagctgtcttcacgcgtgtctctgtgtttgtggactggattcacaaggtcatgagactgggttaggcccagccttgatgccatatgccttggggaggacaaaacttcttgtcagacataaagccatgtttcctctttatgcctgta

SEQ ID NO: 150471 - DNA, 4536 bp, Homo sapiens
  Payload ID: 9723
  Gene Symbol: MST1R
  Gene Name: macrophage stimulating 1 receptor
  Uniprot ID: Q04912
  ENST ID: ENST00000296474
  CDS Start-End: 29-4231
ggatcctctagggtcccagctcgcctcgatggagctcctcccgccgctgcctcagtccttcctgttgctgctgctgttgcctgccaagcccgcggcgggcgaggactggcagtgcccgcgcaccccctacgcggcctctcgcgactttgacgtgaagtacgtggtgcccagcttctccgccggaggcctggtacaggccatggtgacctacgagggcgacagaaatgagagtgctgtgtttgtagccatacgcaatcgcctgcatgtgcttgggcctgacctgaagtctgtccagagcctggccacgggccctgctggagaccctggctgccagacgtgtgcagcctgtggcccaggaccccacggccctcccggtgacacagacacaaaggtgctggtgctggatcccgcgctgcctgcgctggtcagttgtggctccagcctgcagggccgctgcttcctgcatgacctagagccccaagggacagccgtgcatctggcagcgccagcctgcctcttctcagcccaccataaccggcccgatgactgccccgactgtgtggccagcccattgggcacccgtgtaactgtggttgagcaaggccaggcctcctatttctacgtggcatcctcactggacgcagccgtggctgccagcttcagcccacgctcagtgtctatcaggcgtctcaaggctgacgcctcgggattcgcaccgggctttgtggcgttgtcagtgctgcccaagcatcttgtctcctacagtattgaatacgtgcacagcttccacacgggagccttcgtatacttcctgactgtacagccggccagcgtgacagatgatcctagtgccctgcacacacgcctggcacggcttagcgccactgagccagagttgggtgactatcgggagctggtcctcgactgcagatttgctccaaaacgcaggcgccggggggccccagaaggcggacagccctaccctgtgctgcgggtggcccactccgctccagtgggtgcccaacttgccactgagctgagcatcgccgagggccaggaagtactatttggggtctttgtgactggcaaggatggtggtcctggcgtgggccccaactctgtcgtctgtgccttccccattgacctgctggacacactaattgatgagggtgtggagcgctgttgtgaatccccagtccatccaggcctccggcgaggcctcgacttcttccagtcgcccagtttttgccccaacccgcctggcctggaagccctcagccccaacaccagctgccgccacttccctctgctggtcagtagcagcttctcacgtgtggacctattcaatgggctgttgggaccagtacaggtcactgcattgtatgtgacacgccttgacaacgtcacagtggcacacatgggcacaatggatgggcgtatcctgcaggtggagctggtcaggtcactaaactacttgctgtatgtgtccaacttctcactgggtgacagtgggcagcccgtgcagcgggatgtcagtcgtcttggggaccacctactctttgcctctggggaccaggttttccaggtacctatccaaggccctggctgccgccacttcctgacctgtgggcgttgcctaagggcatggcatttcatgggctgtggctggtgtgggaacatgtgcggccagcagaaggagtgtcctggctcctggcaacaggaccactgcccacctaagcttactgagttccacccccacagtggacctctaaggggcagtacaaggctgaccctgtgtggctccaacttctaccttcacccttctggtctggtgcctgagggaacccatcaggtcactgtgggccaaagtccctgccggccactgcccaaggacagctcaaaactcagaccagtgccccggaaagactttgtagaggagtttgagtgtgaactggagcccttgggcacccaggcagtggggcctaccaacgtcagcctcaccgtgactaacatgccaccgggcaagcacttccgggtagacggcacctccgtgctgagaggcttctctttcatggagccagtgctgatagcagtgcaacccctctttggcccacgggcaggaggcacctgtctcactcttgaaggccagagtctgtctgtaggcaccagccgggctgtgctggtcaatgggactgagtgtctgctagcacgggtcagtgaggggcagcttttatgtgccacaccccctggggccacggtggccagtgtcccccttagcctgcaggtggggggtgcccaggtacctggttcctggaccttccagtacagagaagaccctgtcgtgctaagcatcagccccaactgtggctacatcaactcccacatcaccatctgtggccagcatctaacttcagcatggcacttagtgctgtcattccatgacgggcttagggcagtggaaagcaggtgtgagaggcagcttccagagcagcagctgtgccgccttcctgaatatgtggtccgagacccccagggatgggtggcagggaatctgagtgcccgaggggatggagctgctggctttacactgcctggctttcgcttcctacccccaccccatccacccagtgccaacctagttccactgaagcctgaggagcatgccattaagtttgagtatattgggctgggcgctgtggctgactgtgtgggtatcaacgtgaccgtgggtggtgagagctgccagcacgagttccggggggacatggttgtctgccccctgcccccatccctgcagcttggccaggatggtgccccattgcaggtctgcgtagatggtgaatgtcatatcctgggtagagtggtgcggccagggccagatggggtcccacagagcacgctccttggtatcctgctgcctttgctgctgcttgtggctgcactggcgactgcactggtcttcagctactggtggcggaggaagcagctagttcttcctcccaacctgaatgacctggcatccctggaccagactgctggagccacacccctgcctattctgtactcgggctctgactacagaagtggccttgcactccctgccattgatggtctggattccaccacttgtgtccatggagcatccttctccgatagtgaagatgaatcctgtgtgccactgctgcggaaagagtccatccagctaagggacctggactctgcgctcttggctgaggtcaaggatgtgctgattccccatgagcgggtggtcacccacagtgaccgagtcattggcaaaggccactttggagttgtctaccacggagaatacatagaccaggcccagaatcgaatccaatgtgccatcaagtcactaagtcgcatcacagagatgcagcaggtggaggccttcctgcgagaggggctgctcatgcgtggcctgaaccacccgaatgtgctggctctcattggtatcatgttgccacctgagggcctgccccatgtgctgctgccctatatgtgccacggtgacctgctccagttcatccgctcacctcagcggaaccccaccgtgaaggacctcatcagctttggcctgcaggtagcccgcggcatggagtacctggcagagcagaagtttgtgcacagggacctggctgcgcggaactgcatgctggacgagtcattcacagtcaaggtggctgactttggtttggcccgcgacatcctggacagggagtactatagtgttcaacagcatcgccacgctcgcctacctgtgaagtggatggcgctggagagcctgcagacctatagatttaccaccaagtctgatgtgtggtcatttggtgtgctgctgtgggaactgctgacacggggtgccccaccataccgccacattgacccttttgaccttacccacttcctggcccagggtcggcgcctgccccagcctgagtattgccctgattctctgtaccaagtgatgcagcaatgctgggaggcagacccagcagtgcgacccaccttcagagtactagtgggggaggtggagcagatagtgtctgcactgcttggggaccattatgtgcagctgccagcaacctacatgaacttgggccccagcacctcgcatgagatgaatgtgcgtccagaacagccgcagttctcacccatgccagggaatgtacgccggccccggccactctcagagcctcctcggcccacttgacttagttcttgggctggacctgcttagctgccttgagctaaccccaagctgcctctgggccatgccaggccagagggcagtggccctccaccttgttcctgccctttaactttcagaggcaataggtaaatggggcccattaggtccctcactccacagagtgagccagtgagggcagtcctgcaacatgtatttatggagtgcctgctgtggaccctgtcttctgggcacagtggactcagcagtgaccacaccaacactgacccttgaaccaataaaggaacaaatgactattaaagcacaaa

SEQ ID NO: 150472 - DNA, 4198 bp, Homo sapiens
  Payload ID: 9723
  Gene Symbol: MST1R
  Gene Name: macrophage stimulating 1 receptor
  Uniprot ID: Q04912
  ENST ID: ENST00000344206
  CDS Start-End: 1-4056
atggagctcctcccgccgctgcctcagtccttcctgttgctgctgctgttgcctgccaagcccgcggcgggcgaggactggcagtgcccgcgcaccccctacgcggcctctcgcgactttgacgtgaagtacgtggtgcccagcttctccgccggaggcctggtacaggccatggtgacctacgagggcgacagaaatgagagtgctgtgtttgtagccatacgcaatcgcctgcatgtgcttgggcctgacctgaagtctgtccagagcctggccacgggccctgctggagaccctggctgccagacgtgtgcagcctgtggcccaggaccccacggccctcccggtgacacagacacaaaggtgctggtgctggatcccgcgctgcctgcgctggtcagttgtggctccagcctgcagggccgctgcttcctgcatgacctagagccccaagggacagccgtgcatctggcagcgccagcctgcctcttctcagcccaccataaccggcccgatgactgccccgactgtgtggccagcccattgggcacccgtgtaactgtggttgagcaaggccaggcctcctatttctacgtggcatcctcactggacgcagccgtggctgccagcttcagcccacgctcagtgtctatcaggcgtctcaaggctgacgcctcgggattcgcaccgggctttgtggcgttgtcagtgctgcccaagcatcttgtctcctacagtattgaatacgtgcacagcttccacacgggagccttcgtatacttcctgactgtacagccggccagcgtgacagatgatcctagtgccctgcacacacgcctggcacggcttagcgccactgagccagagttgggtgactatcgggagctggtcctcgactgcagatttgctccaaaacgcaggcgccggggggccccagaaggcggacagccctaccctgtgctgcgggtggcccactccgctccagtgggtgcccaacttgccactgagctgagcatcgccgagggccaggaagtactatttggggtctttgtgactggcaaggatggtggtcctggcgtgggccccaactctgtcgtctgtgccttccccattgacctgctggacacactaattgatgagggtgtggagcgctgttgtgaatccccagtccatccaggcctccggcgaggcctcgacttcttccagtcgcccagtttttgccccaacccgcctggcctggaagccctcagccccaacaccagctgccgccacttccctctgctggtcagtagcagcttctcacgtgtggacctattcaatgggctgttgggaccagtacaggtcactgcattgtatgtgacacgccttgacaacgtcacagtggcacacatgggcacaatggatgggcgtatcctgcaggtggagctggtcaggtcactaaactacttgctgtatgtgtccaacttctcactgggtgacagtgggcagcccgtgcagcgggatgtcagtcgtcttggggaccacctactctttgcctctggggaccaggttttccaggtacctatccaaggccctggctgccgccacttcctgacctgtgggcgttgcctaagggcatggcatttcatgggctgtggctggtgtgggaacatgtgcggccagcagaaggagtgtcctggctcctggcaacaggaccactgcccacctaagcttactgagttccacccccacagtggacctctaaggggcagtacaaggctgaccctgtgtggctccaacttctaccttcacccttctggtctggtgcctgagggaacccatcaggtcactgtgggccaaagtccctgccggccactgcccaaggacagctcaaaactcagaccagtgccccggaaagactttgtagaggagtttgagtgtgaactggagcccttgggcacccaggcagtggggcctaccaacgtcagcctcaccgtgactaacatgccaccgggcaagcacttccgggtagacggcacctccgtgctgagaggcttctctttcatggagccagtgctgatagcagtgcaacccctctttggcccacgggcaggaggcacctgtctcactcttgaaggccagagtctgtctgtaggcaccagccgggctgtgctggtcaatgggactgagtgtctgctagcacgggtcagtgaggggcagcttttatgtgccacaccccctggggccacggtggccagtgtcccccttagcctgcaggtggggggtgcccaggtacctggttcctggaccttccagtacagagaagaccctgtcgtgctaagcatcagccccaactgtggctacatcaactcccacatcaccatctgtggccagcatctaacttcagcatggcacttagtgctgtcattccatgacgggcttagggcagtggaaagcaggtgtgagaggcagcttccagagcagcagctgtgccgccttcctgaatatgtggtccgagacccccagggatgggtggcagggaatctgagtgcccgaggggatggagctgctggctttacactgcctggctttcgcttcctacccccaccccatccacccagtgccaacctagttccactgaagcctgaggagcatgccattaagtttgaggtctgcgtagatggtgaatgtcatatcctgggtagagtggtgcggccagggccagatggggtcccacagagcacgctccttggtatcctgctgcctttgctgctgcttgtggctgcactggcgactgcactggtcttcagctactggtggcggaggaagcagctagttcttcctcccaacctgaatgacctggcatccctggaccagactgctggagccacacccctgcctattctgtactcgggctctgactacagaagtggccttgcactccctgccattgatggtctggattccaccacttgtgtccatggagcatccttctccgatagtgaagatgaatcctgtgtgccactgctgcggaaagagtccatccagctaagggacctggactctgcgctcttggctgaggtcaaggatgtgctgattccccatgagcgggtggtcacccacagtgaccgagtcattggcaaaggccactttggagttgtctaccacggagaatacatagaccaggcccagaatcgaatccaatgtgccatcaagtcactaagtcgcatcacagagatgcagcaggtggaggccttcctgcgagaggggctgctcatgcgtggcctgaaccacccgaatgtgctggctctcattggtatcatgttgccacctgagggcctgccccatgtgctgctgccctatatgtgccacggtgacctgctccagttcatccgctcacctcagcggaaccccaccgtgaaggacctcatcagctttggcctgcaggtagcccgcggcatggagtacctggcagagcagaagtttgtgcacagggacctggctgcgcggaactgcatgctggacgagtcattcacagtcaaggtggctgactttggtttggcccgcgacatcctggacagggagtactatagtgttcaacagcatcgccacgctcgcctacctgtgaagtggatggcgctggagagcctgcagacctatagatttaccaccaagtctgatgtgtggtcatttggtgtgctgctgtgggaactgctgacacggggtgccccaccataccgccacattgacccttttgaccttacccacttcctggcccagggtcggcgcctgccccagcctgagtattgccctgattctctgtaccaagtgatgcagcaatgctgggaggcagacccagcagtgcgacccaccttcagagtactagtgggggaggtggagcagatagtgtctgcactgcttggggaccattatgtgcagctgccagcaacctacatgaacttgggccccagcacctcgcatgagatgaatgtgcgtccagaacagccgcagttctcacccatgccagggaatgtacgccggccccggccactctcagagcctcctcggcccacttgacttagttcttgggctggacctgcttagctgccttgagctaaccccaagctgcctctgggccatgccaggccagagggcagtggccctccaccttgttcctgccctttaactttcagaggcaataggtaaatggggcccatta

SEQ ID NO: 150473 - DNA, 854 bp, Homo sapiens
  Payload ID: 9723
  Gene Symbol: MST1R
  Gene Name: macrophage stimulating 1 receptor
  ENST ID: ENST00000434765
  CDS Start-End: 1-854
cacagagcacgctccttggtatcctgctgcctttgctgctgcttgtggctgcactggcgactgcactggtcttcagctactggtggcggaggaagcagctagttcttcctcccaacctgaatgacctggcatccctggaccagactgctggagccacacccctgcctattctgtactcgggctctgactacagaagtggccttggccactttggagttgtctaccacggagaatacatagaccaggcccagaatcgaatccaatgtgccatcaagtcactaagtcgcatcacagagatgcagcaggtggaggccttcctgcgagaggggctgctcatgcgtggcctgaaccacccgaatgtgctggctctcattggtatcatgttgccacctgagggcctgccccatgtgctgctgccctatatgtgccacggtgacctgctccagttcatccgctcacctcagcggaaccccaccgtgaaggacctcatcagctttggcctgcaggtagcccgcggcatggagtacctggcagagcagaagtttgtgcacagggacctggctgcgcggaactgcatgctggacgagtcattcacagtcaaggtggctgactttggtttggcccgcgacatcctggacagggagtactatagtgttcaacagcatcgccacgctcgcctacctgtgaagtggatggcgctggagagcctgcagacctatagatttaccaccaagtctgatgtgtggtcatttggtgtgctgctgtgggaactgctgacacggggtgccccaccataccgccacattgacccttttgaccttacccacttcctggcccagggtcggcgcctgccc

SEQ ID NO: 150474 - DNA, 4683 bp, Homo sapiens
  Payload ID: 9723
  Gene Symbol: MST1R
  Gene Name: macrophage stimulating 1 receptor
  ENST ID: ENST00000411578
  CDS Start-End: 258-3356
agcggcggctggggcggcaggtgaggcggctggggcgttgctgtcgtgcgtccgcaggcgtcaggtgctcagacccgagggccgggaagggatttgggtttcacaggaacctggggcgggggtccgctatcttggggctgtcgggaccgctgcttaaatttggcccagtccagacctcgagtcgggcccccagccaggcccacgcccaggtccaggcccaggccggtagggatcctctagggtcccagctcgcctcgatggagctcctcccgccgctgcctcagtccttcctgttgctgctgctgttgcctgccaagcccgcggcgggcgaggactggcagtgcccgcgcaccccctacgcggcctctcgcgactttgacgtgaagtacgtggtgcccagcttctccgccggaggcctggtacaggccatggtgacctacgagggcgacagaaatgagagtgctgtgtttgtagccatacgcaatcgcctgcatgtgcttgggcctgacctgaagtctgtccagagcctggccacgggccctgctggagaccctggctgccagacgtgtgcagcctgtggcccaggaccccacggccctcccggtgacacagacacaaaggtgctggtgctggatcccgcgctgcctgcgctggtcagttgtggctccagcctgcagggccgctgcttcctgcatgacctagagccccaagggacagccgtgcatctggcagcgccagcctgcctcttctcagcccaccataaccggcccgatgactgccccgactgtgtggccagcccattgggcacccgtgtaactgtggttgagcaaggccaggcctcctatttctacgtggcatcctcactggacgcagccgtggctgccagcttcagcccacgctcagtgtctatcaggcgtctcaaggctgacgcctcgggattcgcaccgggctttgtggcgttgtcagtgctgcccaagcatcttgtctcctacagtattgaatacgtgcacagcttccacacgggagccttcgtatacttcctgactgtacagccggccagcgtgacagatgatcctagtgccctgcacacacgcctggcacggcttagcgccactgagccagagttgggtgactatcgggagctggtcctcgactgcagatttgctccaaaacgcaggcgccggggggccccagaaggcggacagccctaccctgtgctgcgggtggcccactccgctccagtgggtgcccaacttgccactgagctgagcatcgccgagggccaggaagtactatttggggtctttgtgactggcaaggatggtggtcctggcgtgggccccaactctgtcgtctgtgccttccccattgacctgctggacacactaattgatgagggtgtggagcgctgttgtgaatccccagtccatccaggcctccggcgaggcctcgacttcttccagtcgcccagtttttgccccaacccgcctggcctggaagccctcagccccaacaccagctgccgccacttccctctgctggtcagtagcagcttctcacgtgtggacctattcaatgggctgttgggaccagtacaggtcactgcattgtatgtgacacgccttgacaacgtcacagtggcacacatgggcacaatggatgggcgtatcctgcaggtggagctggtcaggtcactaaactacttgctgtatgtgtccaacttctcactgggtgacagtgggcagcccgtgcagcgggatgtcagtcgtcttggggaccacctactctttgcctctggggaccaggttttccaggtacctatccaaggccctggctgccgccacttcctgacctgtgggcgttgcctaagggcatggcatttcatgggctgtggctggtgtgggaacatgtgcggccagcagaaggagtgtcctggctcctggcaacaggaccactgcccacctaagcttactgagttccacccccacagtggacctctaaggggcagtacaaggctgaccctgtgtggctccaacttctaccttcacccttctggtctggtgcctgagggaacccatcaggtcactgtgggccaaagtccctgccggccactgcccaaggacagctcaaaactcagaccagtgccccggaaagactttgtagaggagtttgagtgtgaactggagcccttgggcacccaggcagtggggcctaccaacgtcagcctcaccgtgactaacatgccaccgggcaagcacttccgggtagacggcacctccgtgctgagaggcttctctttcatggagccagtgctgatagcagtgcaacccctctttggcccacgggcaggaggcacctgtctcactcttgaaggccagagtctgtctgtaggcaccagccgggctgtgctggtcaatgggactgagtgtctgctagcacgggtcagtgaggggcagcttttatgtgccacaccccctggggccacggtggccagtgtcccccttagcctgcaggtggggggtgcccaggtacctggttcctggaccttccagtacagagaagaccctgtcgtgctaagcatcagccccaactgtggctacatcaactcccacatcaccatctgtggccagcatctaacttcagcatggcacttagtgctgtcattccatgacgggcttagggcagtggaaagcaggtgtgagaggcagcttccagagcagcagctgtgccgccttcctgaatatgtggtccgagacccccagggatgggtggcagggaatctgagtgcccgaggggatggagctgctggctttacactgcctggctttcgcttcctacccccaccccatccacccagtgccaacctagttccactgaagcctgaggagcatgccattaagtttgagtatattgggctgggcgctgtggctgactgtgtgggtatcaacgtgaccgtgggtggtgagagctgccagcacgagttccggggggacatggttgtctgccccctgcccccatccctgcagcttggccaggatggtgccccattgcaggtctgcgtagatggtgaatgtcatatcctgggtagagtggtgcggccagggccagatggggtcccacagagcacgctccttggtatcctgctgcctttgctgctgcttgtggctgcactggcgactgcactggtcttcagctactggtggcggaggaagcagctagctcctcattccctctccccacagcactccctgccattgatggtctggattccaccacttgtgtccatggagcatccttctccgatagtgaagatgaatcctgtgtgccactgctgcggaaagagtccatccagctaagggacctggactctgcgctcttggctgaggtcaaggatgtgctgattccccatgagcgggtggtcacccacagtgaccgagtcattggcaaaggccactttggagttgtctaccacggagaatacatagaccaggcccagaatcgaatccaatgtgccatcaagtcactaagtcgcatcacagagatgcagcaggtggaggccttcctgcgagaggggctgctcatgcgtggcctgaaccacccgaatgtgctggctctcattggtatcatgttgccacctgagggcctgccccatgtgctgctgccctatatgtgccacggtgacctgctccagttcatccgctcacctcagcggaaccccaccgtgaaggacctcatcagctttggcctgcaggtagcccgcggcatggagtacctggcagagcagaagtttgtgcacagggacctggctgcgcggaactgcatgctggacgagtcattcacagtcaaggtggctgactttggtttggcccgcgacatcctggacagggagtactatagtgttcaacagcatcgccacgctcgcctacctgtgaagtggatggcgctggagagcctgcagacctatagatttaccaccaagtctgatgtgtggtcatttggtgtgctgctgtgggaactgctgacacggggtgccccaccataccgccacattgacccttttgaccttacccacttcctggcccagggtcggcgcctgccccagcctgagtattgccctgattctctgtaccaagtgatgcagcaatgctgggaggcagacccagcagtgcgacccaccttcagagtactagtgggggaggtggagcagatagtgtctgcactgcttggggaccattatgtgcagctgccagcaacctacatgaacttgggccccagcacctcgcatgagatgaatgtgcgtccagaacagccgcagttctcacccatgccagggaatgtacgccggccccggccactctcagagcctcctcggcccacttgacttagttcttgggctggacctgcttagctgccttgagctaaccccaagctgcctctgggccatgccaggccagagggcagtggccctccaccttgttcctgccctttaactttcagaggcaataggtaaatggggcccattaggtccctcactccacagagtgagccagtgagggcagtcctgcaacatgtatttatggagtgcctgctgtggaccctgtcttctgggcacagtggactcagcagtgaccacaccaacactgacccttgaaccaataaaggaacaaatgactattaaagcac

SEQ ID NO: 150475 - DNA, 810 bp, Homo sapiens
  Payload ID: 9723
  Gene Symbol: MST1R
  Gene Name: macrophage stimulating 1 receptor
  ENST ID: ENST00000440292
  CDS Start-End: 1-810
gtatcaacgtgaccgtgggtggtgagagctgccagcacgagttccggggggacatggttgtctgccccctgcccccatccctgcagcttggccaggatggtgccccattgcaggtctgcgtagatgcactccctgccattgatggtctggattccaccacttgtgtccatggagcatccttctccgatagtgaagatgaatcctgtgtgccactgctgcggaaagagtccatccagctaagggacctggactctgcgctcttggctgaggtcaaggatgtgctgattccccatgagcgggtggtcacccacagtgaccgagtcattggcaaaggccactttggagttgtctaccacggagaatacatagaccaggcccagaatcgaatccaatgtgccatcaagtcactaagtcgcatcacagagatgcagcaggtggaggccttcctgcgagaggggctgctcatgcgtggcctgaaccacccgaatgtgctggctctcattggtatcatgttgccacctgagggcctgccccatgtgctgctgccctatatgtgccacggtgacctgctccagttcatccgctcacctcagcggaaccccaccgtgaaggacctcatcagctttggcctgcaggtagcccgcggcatggagtacctggcagagcagaagtttgtgcacagggacctggctgcgcggaactgcatgctggacgagtcattcacagtcaaggtggctgactttggtttggcccgcgacatcctggacagggagtactatagtgttcaacagcatcgccacgctcgcctac

SEQ ID NO: 150476 - DNA, 1065 bp, Homo sapiens
  Payload ID: 9723
  Gene Symbol: MST1R
  Gene Name: macrophage stimulating 1 receptor
  ENST ID: ENST00000612032
  CDS Start-End: 1-765
atggagctcctcccgccgctgcctcagtccttcctgttgctgctgccctatatgtgccacggtgacctgctccagttcatccgctcacctcagcggaaccccaccgtgaaggacctcatcagctttggcctgcaggtagcccgcggcatggagtacctggcagagcagaagtttgtgcacagggacctggctgcgcggaactgcatgctggacgagtcattcacagtcaaggtggctgactttggtttggcccgcgacatcctggacagggagtactatagtgttcaacagcatcgccacgctcgcctacctgtgaagtggatggcgctggagagcctgcagacctatagatttaccaccaagtctgatgtgtggtcatttggtgtgctgctgtgggaactgctgacacggggtgccccaccataccgccacattgacccttttgaccttacccacttcctggcccagggtcggcgcctgccccagcctgagtattgccctgattctctgtaccaagtgatgcagcaatgctgggaggcagacccagcagtgcgacccaccttcagagtactagtgggggaggtggagcagatagtgtctgcactgcttggggaccattatgtgcagctgccagcaacctacatgaacttgggccccagcacctcgcatgagatgaatgtgcgtccagaacagccgcagttctcacccatgccagggaatgtacgccggccccggccactctcagagcctcctcggcccacttgacttagttcttgggctggacctgcttagctgccttgagctaaccccaagctgcctctgggccatgccaggccagagggcagtggccctccaccttgttcctgccctttaactttcagaggcaataggtaaatggggcccattaggtccctcactccacagagtgagccagtgagggcagtcctgcaacatgtatttatggagtgcctgctgtggaccctgtcttctgggcacagtggactcagcagtgaccacaccaacactgacccttgaaccaataaaggaacaaatgactattaaagc

SEQ ID NO: 150477 - DNA, 4449 bp, Homo sapiens
  Payload ID: 9723
  Gene Symbol: MST1R
  Gene Name: macrophage stimulating 1 receptor
  ENST ID: ENST00000621387
  CDS Start-End: 265-4149
agtgtacagcggcggctggggcggcaggtgaggcggctggggcgttgctgtcgtgcgtccgcaggcgtcaggtgctcagacccgagggccgggaagggatttgggtttcacaggaacctggggcgggggtccgctatcttggggctgtcgggaccgctgcttaaatttggcccagtccagacctcgagtcgggcccccagccaggcccacgcccaggtccaggcccaggccggtagggatcctctagggtcccagctcgcctcgatggagctcctcccgccgctgcctcagtccttcctgttgctgctgctgttgcctgccaagcccgcggcgggcgaggactggcagtgcccgcgcaccccctacgcggcctctcgcgactttgacgtgaagtacgtggtgcccagcttctccgccggaggcctggtacaggccatggtgacctacgagggcgacagaaatgagagtgctgtgtttgtagccatacgcaatcgcctgcatgtgcttgggcctgacctgaagtctgtccagagcctggccacgggccctgctggagaccctggctgccagacgtgtgcagcctgtggcccaggaccccacggccctcccggtgacacagacacaaaggtgctggtgctggatcccgcgctgcctgcgctggtcagttgtggctccagcctgcagggccgctgcttcctgcatgacctagagccccaagggacagccgtgcatctggcagcgccagcctgcctcttctcagcccaccataaccggcccgatgactgccccgactgtgtggccagcccattgggcacccgtgtaactgtggttgagcaaggccaggcctcctatttctacgtggcatcctcactggacgcagccgtggctgccagcttcagcccacgctcagtgtctatcaggcgtctcaaggctgacgcctcgggattcgcaccgggctttgtggcgttgtcagtgctgcccaagcatcttgtctcctacagtattgaatacgtgcacagcttccacacgggagccttcgtatacttcctgactgtacagccggccagcgtgacagatgatcctagtgccctgcacacacgcctggcacggcttagcgccactgagccagagttgggtgactatcgggagctggtcctcgactgcagatttgctccaaaacgcaggcgccggggggccccagaaggcggacagccctaccctgtgctgcgggtggcccactccgctccagtgggtgcccaacttgccactgagctgagcatcgccgagggccaggaagtactatttggggtctttgtgactggcaaggatggtggtcctggcgtgggccccaactctgtcgtctgtgccttccccattgacctgctggacacactaattgatgagggtgtggagcgctgttgtgaatccccagtccatccaggcctccggcgaggcctcgacttcttccagtcgcccagtttttgccccaacccggttttccaggtacctatccaaggccctggctgccgccacttcctgacctgtgggcgttgcctaagggcatggcatttcatgggctgtggctggtgtgggaacatgtgcggccagcagaaggagtgtcctggctcctggcaacaggaccactgcccacctaagcttactgagttccacccccacagtggacctctaaggggcagtacaaggctgaccctgtgtggctccaacttctaccttcacccttctggtctggtgcctgagggaacccatcaggtcactgtgggccaaagtccctgccggccactgcccaaggacagctcaaaactcagaccagtgccccggaaagactttgtagaggagtttgagtgtgaactggagcccttgggcacccaggcagtggggcctaccaacgtcagcctcaccgtgactaacatgccaccgggcaagcacttccgggtagacggcacctccgtgctgagaggcttctctttcatggagccagtgctgatagcagtgcaacccctctttggcccacgggcaggaggcacctgtctcactcttgaaggccagagtctgtctgtaggcaccagccgggctgtgctggtcaatgggactgagtgtctgctagcacgggtcagtgaggggcagcttttatgtgccacaccccctggggccacggtggccagtgtcccccttagcctgcaggtggggggtgcccaggtacctggttcctggaccttccagtacagagaagaccctgtcgtgctaagcatcagccccaactgtggctacatcaactcccacatcaccatctgtggccagcatctaacttcagcatggcacttagtgctgtcattccatgacgggcttagggcagtggaaagcaggtgtgagaggcagcttccagagcagcagctgtgccgccttcctgaatatgtggtccgagacccccagggatgggtggcagggaatctgagtgcccgaggggatggagctgctggctttacactgcctggctttcgcttcctacccccaccccatccacccagtgccaacctagttccactgaagcctgaggagcatgccattaagtttgagtatattgggctgggcgctgtggctgactgtgtgggtatcaacgtgaccgtgggtggtgagagctgccagcacgagttccggggggacatggttgtctgccccctgcccccatccctgcagcttggccaggatggtgccccattgcaggtctgcgtagatggtgaatgtcatatcctgggtagagtggtgcggccagggccagatggggtcccacagagcacgctccttggtatcctgctgcctttgctgctgcttgtggctgcactggcgactgcactggtcttcagctactggtggcggaggaagcagctagttcttcctcccaacctgaatgacctggcatccctggaccagactgctggagccacacccctgcctattctgtactcgggctctgactacagaagtggccttgcactccctgccattgatggtctggattccaccacttgtgtccatggagcatccttctccgatagtgaagatgaatcctgtgtgccactgctgcggaaagagtccatccagctaagggacctggactctgcgctcttggctgaggtcaaggatgtgctgattccccatgagcgggtggtcacccacagtgaccgagtcattggcaaaggccactttggagttgtctaccacggagaatacatagaccaggcccagaatcgaatccaatgtgccatcaagtcactaagtcgcatcacagagatgcagcaggtggaggccttcctgcgagaggggctgctcatgcgtggcctgaaccacccgaatgtgctggctctcattggtatcatgttgccacctgagggcctgccccatgtgctgctgccctatatgtgccacggtgacctgctccagttcatccgctcacctcagcggaaccccaccgtgaaggacctcatcagctttggcctgcaggtagcccgcggcatggagtacctggcagagcagaagtttgtgcacagggacctggctgcgcggaactgcatgctggacgagtcattcacagtcaaggtggctgactttggtttggcccgcgacatcctggacagggagtactatagtgttcaacagcatcgccacgctcgcctacctgtgaagtggatggcgctggagagcctgcagacctatagatttaccaccaagtctgatgtgtggtcatttggtgtgctgctgtgggaactgctgacacggggtgccccaccataccgccacattgacccttttgaccttacccacttcctggcccagggtcggcgcctgccccagcctgagtattgccctgattctctgtaccaagtgatgcagcaatgctgggaggcagacccagcagtgcgacccaccttcagagtactagtgggggaggtggagcagatagtgtctgcactgcttggggaccattatgtgcagctgccagcaacctacatgaacttgggccccagcacctcgcatgagatgaatgtgcgtccagaacagccgcagttctcacccatgccagggaatgtacgccggccccggccactctcagagcctcctcggcccacttgacttagttcttgggctggacctgcttagctgccttgagctaaccccaagctgcctctgggccatgccaggccagagggcagtggccctccaccttgttcctgccctttaactttcagaggcaataggtaaatggggcccattaggtccctcactccacagagtgagccagtgagggcagtcctgcaacatgtatttatggagtgcctgctgtggaccctgtcttctgggcacagtggactcagcagtgaccacaccaacactgacccttgaaccaataaaggaacaaatgactattaaagc

SEQ ID NO: 150478 - DNA, 2025 bp, Homo sapiens
  Payload ID: 9723
  Gene Symbol: MST1R
  Gene Name: macrophage stimulating 1 receptor
  ENST ID: ENST00000613534
  CDS Start-End: 1-1725
atggagctcctcccgccgctgcctcagtccttcctgttgctgctgctgttgcctgccaagcccgcggcgggcgaggactggcagtgcccgcgcaccccctacgcggcctctcgcgactttgacgtgaagtacgtggtgcccagcttctccgccggaggcctggtacaggccatggtgacctacgagggcgacagaaatgagagtgctgtgtttgtagccatacgcaatcgcctgcatgtgcttgggcctgacctgaagtctgtccagagcctggccacgggccctgctggagaccctggctgccagacgtgtgcagcctgtggcccaggaccccacggccctcccggtgacacagacacaaaggtgctggtgctggatcccgcgctgcctgcgctggtcagttgtggctccagcctgcagggccgctgcttcctgcatgacctagagccccaagggacagccgtgcatctggcagcgccagcctgcctcttctcagcccaccataaccggcccgatgactgccccgactgtgtggccagcccattgggcacccgtgtaactgtggttgagcaaggccaggcctcctatttctacgtggcatcctcactggacgcagccgtggctgccagcttcagcccacgctcagtgtctatcaggcgtctcaaggctgacgcctcgggattcgcaccgggctttgtggcgttgtcagtgctgcctttgctgctgcttgtggctgcactggcgactgcactggtcttcagctactggtggcggaggaagcagctagttcttcctcccaacctgaatgacctggcatccctggaccagactgctggagccacacccctgcctattctgtactcgggctctgactacagaagtggccttgcactccctgccattgatggtctggattccaccacttgtgtccatggagcatccttctccgatagtgaagatgaatcctgtgtgccactgctgcggaaagagtccatccagctaagggacctggactctgcgctcttggctgaggtcaaggatgtgctgattccccatgagcgggtggtcacccacagtgaccgagtcattggcaaaggccactttggagttgtctaccacggagaatacatagaccaggcccagaatcgaatccaatgtgccatcaagtcactaagtcgcatcacagagatgcagcaggtggaggccttcctgcgagaggggctgctcatgcgtggcctgaaccacccgaatgtgctggctctcattggtatcatgttgccacctgagggcctgccccatgtgctgctgccctatatgtgccacggtgacctgctccagttcatccgctcacctcagcggaaccccaccgtgaaggacctcatcagctttggcctgcaggtagcccgcggcatggagtacctggcagagcagaagtttgtgcacagggacctggctgcgcggaactgcatgtaccaagtgatgcagcaatgctgggaggcagacccagcagtgcgacccaccttcagagtactagtgggggaggtggagcagatagtgtctgcactgcttggggaccattatgtgcagctgccagcaacctacatgaacttgggccccagcacctcgcatgagatgaatgtgcgtccagaacagccgcagttctcacccatgccagggaatgtacgccggccccggccactctcagagcctcctcggcccacttgacttagttcttgggctggacctgcttagctgccttgagctaaccccaagctgcctctgggccatgccaggccagagggcagtggccctccaccttgttcctgccctttaactttcagaggcaataggtaaatggggcccattaggtccctcactccacagagtgagccagtgagggcagtcctgcaacatgtatttatggagtgcctgctgtggaccctgtcttctgggcacagtggactcagcagtgaccacaccaacactgacccttgaaccaataaaggaacaaatgactattaaagc

SEQ ID NO: 150479 - DNA, 2718 bp, Homo sapiens
  Payload ID: 9724
  Gene Symbol: MAD1L1
  Gene Name: MAD1 mitotic arrest deficient-like 1 (yeast)
  Uniprot ID: Q9Y6D9
  ENST ID: ENST00000265854
  CDS Start-End: 286-2442
gggcgccagctgtccatctgtccatgtgcaactgagactcaattggtggcttgctggtggggatttggtggcatgcttccttgcttccattttttgtctggtaaattggcagcatggctcccagttgccattgaagaatgtggttacaggcatgggtgtattatgagctccaatgtgcgttaggggagtggggctgtccagaggctctgctgactgcacggctgatggcacgtggaaaggctgcccctgaccagtcctttgtctgtccccggaaggaaagcaaccatggaagacctgggggaaaacaccatggttttatccaccctgagatctttgaacaacttcatctctcagcgtgtggagggaggctctggactggatatttctacctcggccccaggttctctgcagatgcagtaccagcagagcatgcagctggaggaaagagcagagcagatccgttcgaagtcccacctcatccaggtggagcgggagaaaatgcagatggagctgagtcacaagagggctcgagtggagctggagagagcagccagcaccagtgccaggaactacgagcgtgaggtcgaccgcaaccaggagctcctgacgcgcatccggcagcttcaggagcgggaggccggggcggaggagaagatgcaggagcagctggagcgcaacaggcagtgtcagcagaacttggatgctgccagcaagaggctgcgtgagaaagaggacagtctggcccaggctggcgagaccatcaacgcactgaaggggaggatctcggaactgcagtggagcgtgatggaccaggagatgcgggtgaagcgcctggagtcggagaagcaggagctgcaggagcagctggacctgcaacacaaaaaatgccaggaagccaatcagaaaatccaggaactccaggccagccaagaagcaagagcagaccacgagcagcagattaaggatctggagcagaagctgtccctgcaagagcaggatgcagcgattgtgaagaacatgaagtctgagctggtacggctccctaggctggaacgggagctgaagcagctgcgggaggagagcgcgcacctgcgggagatgagagagaccaacgggctgctccaggaagagctggaagggctgcagaggaagctggggcgccaggagaagatgcaggagacgctggttggcttggagctggagaacgagaggctgctggccaagctgcaaagctgggagagactggaccagaccatgggcctgagcatcaggactccagaagacctttccagattcgtggttgagctgcagcagagggagcttgccttgaaggacaagaacagcgccgtcaccagcagcgcccgggggctggagaaggccaggcagcagctgcaggaggagctccggcaggtcagcggccagctgttggaggagaggaagaagcgcgagacccacgaggcgctggcccggaggctccagaaacgggtcctgctgctcaccaaggagcgggacggtatgcgggccatcctggggtcctacgacagcgagctgaccccggccgagtactcaccccagctgacgcggcgcatgcgggaggctgaggatatggtgcagaaggtgcacagccacagcgccgagatggaggctcagctgtcgcaggccctggaggagctgggaggccagaaacaaagagcagacatgctggagatggagctgaagatgctgaagtctcagtccagctctgccgaacagagcttcctgttctccagggaggaggcggacacgctcaggttgaaggtcgaggagctggaaggcgagcggagtcggctggaggaggaaaagaggatgctggaggcacagctggagcggcgagctctgcagggtgactatgaccagagcaggaccaaagtgctgcacatgagcctgaaccccaccagtgtggccaggcagcgcctgcgcgaggaccacagccagctgcaggcggagtgcgagcgactgcgcgggctcctgcgcgccatggagagaggaggcaccgtcccagccgaccttgaggctgccgccgcgagtctgccatcgtccaaggaggtggcagagctgaagaagcaggtggagagtgccgagctgaagaaccagcggctcaaggaggttttccagaccaagatccaggagttccgcaaggcctgctacacgctcaccggctaccagatcgacatcaccacggagaaccagtaccggctgacctcgctgtacgccgagcacccaggcgactgcctcatcttcaaggccaccagcccctcgggttccaagatgcagctactggagacagagttctcacacaccgtgggcgagctcatcgaggtgcacctgcggcgccaggacagcatccctgccttcctcagctcgctcaccctcgagctcttcagccgccagaccgtggcgtagcctgcaggctcgggggcatagccggagccactctgcttggcctgacctgcaggtcccctgccccgccagccacaggctgggtgcacgtcctgcctctccagccccacagggcagcagcatgactgacagacacgctgggacctacgtcgggcttcctgctggggcggccagcaccctctccacgtgcagaccccatgcgtcccggagcctggtgtgtgggcgtcggccaccagcctgggttcctcaccttgtgaaataaaatcttctcccctagac

SEQ ID NO: 150480 - DNA, 2762 bp, Homo sapiens
  Payload ID: 9724
  Gene Symbol: MAD1L1
  Gene Name: MAD1 mitotic arrest deficient-like 1 (yeast)
  Uniprot ID: Q9Y6D9
  ENST ID: ENST00000399654
  CDS Start-End: 330-2486
gcaggtctcgcgagagcgcaggcgcaagtgtcgcgataaatgggcgccggcggagcggagggagatccgagcggcggcggcaagctggctgcgagcggctgaggagctgggatacactcttcctctcctctcctcaacagcagcactccaagctcgccggcctttggtctccaggacttgtcccagcagcccctcgaactgagaattacaccatcggacccctggctctgaggccttcagacttggactgtgtcacactgccaggcttccagggctccaacttgcagacggcctgttgtgggacagtctctgtaatcgcgaaagcaaccatggaagacctgggggaaaacaccatggttttatccaccctgagatctttgaacaacttcatctctcagcgtgtggagggaggctctggactggatatttctacctcggccccaggttctctgcagatgcagtaccagcagagcatgcagctggaggaaagagcagagcagatccgttcgaagtcccacctcatccaggtggagcgggagaaaatgcagatggagctgagtcacaagagggctcgagtggagctggagagagcagccagcaccagtgccaggaactacgagcgtgaggtcgaccgcaaccaggagctcctgacgcgcatccggcagcttcaggagcgggaggccggggcggaggagaagatgcaggagcagctggagcgcaacaggcagtgtcagcagaacttggatgctgccagcaagaggctgcgtgagaaagaggacagtctggcccaggctggcgagaccatcaacgcactgaaggggaggatctcggaactgcagtggagcgtgatggaccaggagatgcgggtgaagcgcctggagtcggagaagcaggagctgcaggagcagctggacctgcaacacaaaaaatgccaggaagccaatcagaaaatccaggaactccaggccagccaagaagcaagagcagaccacgagcagcagattaaggatctggagcagaagctgtccctgcaagagcaggatgcagcgattgtgaagaacatgaagtctgagctggtacggctccctaggctggaacgggagctgaagcagctgcgggaggagagcgcgcacctgcgggagatgagagagaccaacgggctgctccaggaagagctggaagggctgcagaggaagctggggcgccaggagaagatgcaggagacgctggttggcttggagctggagaacgagaggctgctggccaagctgcaaagctgggagagactggaccagaccatgggcctgagcatcaggactccagaagacctttccagattcgtggttgagctgcagcagagggagcttgccttgaaggacaagaacagcgccgtcaccagcagcgcccgggggctggagaaggccaggcagcagctgcaggaggagctccggcaggtcagcggccagctgttggaggagaggaagaagcgcgagacccacgaggcgctggcccggaggctccagaaacgggtcctgctgctcaccaaggagcgggacggtatgcgggccatcctggggtcctacgacagcgagctgaccccggccgagtactcaccccagctgacgcggcgcatgcgggaggctgaggatatggtgcagaaggtgcacagccacagcgccgagatggaggctcagctgtcgcaggccctggaggagctgggaggccagaaacaaagagcagacatgctggagatggagctgaagatgctgaagtctcagtccagctctgccgaacagagcttcctgttctccagggaggaggcggacacgctcaggttgaaggtcgaggagctggaaggcgagcggagtcggctggaggaggaaaagaggatgctggaggcacagctggagcggcgagctctgcagggtgactatgaccagagcaggaccaaagtgctgcacatgagcctgaaccccaccagtgtggccaggcagcgcctgcgcgaggaccacagccagctgcaggcggagtgcgagcgactgcgcgggctcctgcgcgccatggagagaggaggcaccgtcccagccgaccttgaggctgccgccgcgagtctgccatcgtccaaggaggtggcagagctgaagaagcaggtggagagtgccgagctgaagaaccagcggctcaaggaggttttccagaccaagatccaggagttccgcaaggcctgctacacgctcaccggctaccagatcgacatcaccacggagaaccagtaccggctgacctcgctgtacgccgagcacccaggcgactgcctcatcttcaaggccaccagcccctcgggttccaagatgcagctactggagacagagttctcacacaccgtgggcgagctcatcgaggtgcacctgcggcgccaggacagcatccctgccttcctcagctcgctcaccctcgagctcttcagccgccagaccgtggcgtagcctgcaggctcgggggcatagccggagccactctgcttggcctgacctgcaggtcccctgccccgccagccacaggctgggtgcacgtcctgcctctccagccccacagggcagcagcatgactgacagacacgctgggacctacgtcgggcttcctgctggggcggccagcaccctctccacgtgcagaccccatgcgtcccggagcctggtgtgtgggcgtcggccaccagcctgggttcctcaccttgtgaaataaaatcttctcccctagac

SEQ ID NO: 150481 - DNA, 2355 bp, Homo sapiens
  Payload ID: 9724
  Gene Symbol: MAD1L1
  Gene Name: MAD1 mitotic arrest deficient-like 1 (yeast)
  Uniprot ID: Q9Y6D9
  ENST ID: ENST00000402746
  CDS Start-End: 199-2079
gtcgcgataaatgggcgccggcggagcggagggagatccgagcggcggcggcaagctggctgcgagcggctgagcgtgaggtcgaccgcaaccaggagctcctgacgcgcatccggcagcttcaggagcgggaggccggggcggaggagaagatgcaggagcagctggagcgcaacaggcagtgtcagcagaacttggatgctgccagcaagaggctgcgtgagaaagaggacagtctggcccaggctggcgagggtcctgattgtcacgctccttactctggaattatcttatgcgcctcttccttgccaactgtccggcgtcccctacaacacgggtgaccctgtgggcaggtgggctcggccctgcatctggccttgcccctggcacacgaccatcaacgcactgaaggggaggatctcggaactgcagtggagcgtgatggaccaggagatgcgggtgaagcgcctggagtcggagaagcaggagctgcaggagcagctggacctgcaacacaaaaaatgccaggaagccaatcagaaaatccaggaactccaggccagccaagaagcaagagcagaccacgagcagcagattaaggatctggagcagaagctgtccctgcaagagcaggatgcagcgattgtgaagaacatgaagtctgagctggtacggctccctaggctggaacgggagctgaagcagctgcgggaggagagcgcgcacctgcgggagatgagagagaccaacgggctgctccaggaagagctggaagggctgcagaggaagctggggcgccaggagaagatgcaggagacgctggttggcttggagctggagaacgagaggctgctggccaagctgcaaagctgggagagactggaccagaccatgggcctgagcatcaggactccagaagacctttccagattcgtggttgagctgcagcagagggagcttgccttgaaggacaagaacagcgccgtcaccagcagcgcccgggggctggagaaggccaggcagcagctgcaggaggagctccggcaggtcagcggccagctgttggaggagaggaagaagcgcgagacccacgaggcgctggcccggaggctccagaaacgggtcctgctgctcaccaaggagcgggacggtatgcgggccatcctggggtcctacgacagcgagctgaccccggccgagtactcaccccagctgacgcggcgcatgcgggaggctgaggatatggtgcagaaggtgcacagccacagcgccgagatggaggctcagctgtcgcaggccctggaggagctgggaggccagaaacaaagagcagacatgctggagatggagctgaagatgctgaagtctcagtccagctctgccgaacagagcttcctgttctccagggaggaggcggacacgctcaggttgaaggtcgaggagctggaaggcgagcggagtcggctggaggaggaaaagaggatgctggaggcacagctggagcggcgagctctgcagggtgactatgaccagagcaggaccaaagtgctgcacatgagcctgaaccccaccagtgtggccaggcagcgcctgcgcgaggaccacagccagctgcaggcggagtgcgagcgactgcgcgggctcctgcgcgccatggagagaggaggcaccgtcccagccgaccttgaggctgccgccgcgagtctgccatcgtccaaggaggtggcagagctgaagaagcaggtggagagtgccgagctgaagaaccagcggctcaaggaggttttccagaccaagatccaggagttccgcaaggcctgctacacgctcaccggctaccagatcgacatcaccacggagaaccagtaccggctgacctcgctgtacgccgagcacccaggcgactgcctcatcttcaaggccaccagcccctcgggttccaagatgcagctactggagacagagttctcacacaccgtgggcgagctcatcgaggtgcacctgcggcgccaggacagcatccctgccttcctcagctcgctcaccctcgagctcttcagccgccagaccgtggcgtagcctgcaggctcgggggcatagccggagccactctgcttggcctgacctgcaggtcccctgccccgccagccacaggctgggtgcacgtcctgcctctccagccccacagggcagcagcatgactgacagacacgctgggacctacgtcgggcttcctgctggggcggccagcaccctctccacgtgcagaccccatgcgtcccggagcctggtgtgtgggcgtcggccaccagcctgggttcctcaccttgtgaaataaaatcttctcccctagac

SEQ ID NO: 150482 - DNA, 2991 bp, Homo sapiens
  Payload ID: 9724
  Gene Symbol: MAD1L1
  Gene Name: MAD1 mitotic arrest deficient-like 1 (yeast)
  Uniprot ID: Q9Y6D9
  ENST ID: ENST00000406869
  CDS Start-End: 559-2715
gcaaaattttgggaagagtcaacggtgcaagtttgtccgaggaggctgccgtgggcgcggctattccacacattacggcgcgaggcgaaagccttagtggaagcgcgtcctgcgcaaagccggggggcccccgactgcgccttggctcagccttcggttccgagtcctttccgtgcggagtctcccaggggtggcggctccgggtgcggacgcggagtccccaggatcagccggtgcgcagactcggttctttacggcccgattgccacgcaggtctcgcgagagcgcaggcgcaagtgtcgcgataaatgggcgccggcggagcggagggagatccgagcggcggcggcaagctggctgcgagcggctgagcactccaagctcgccggcctttggtctccaggacttgtcccagcagcccctcgaactgagaattacaccatcggacccctggctctgaggccttcagacttggactgtgtcacactgccaggcttccagggctccaacttgcagacggcctgttgtgggacagtctctgtaatcgcgaaagcaaccatggaagacctgggggaaaacaccatggttttatccaccctgagatctttgaacaacttcatctctcagcgtgtggagggaggctctggactggatatttctacctcggccccaggttctctgcagatgcagtaccagcagagcatgcagctggaggaaagagcagagcagatccgttcgaagtcccacctcatccaggtggagcgggagaaaatgcagatggagctgagtcacaagagggctcgagtggagctggagagagcagccagcaccagtgccaggaactacgagcgtgaggtcgaccgcaaccaggagctcctgacgcgcatccggcagcttcaggagcgggaggccggggcggaggagaagatgcaggagcagctggagcgcaacaggcagtgtcagcagaacttggatgctgccagcaagaggctgcgtgagaaagaggacagtctggcccaggctggcgagaccatcaacgcactgaaggggaggatctcggaactgcagtggagcgtgatggaccaggagatgcgggtgaagcgcctggagtcggagaagcaggagctgcaggagcagctggacctgcaacacaaaaaatgccaggaagccaatcagaaaatccaggaactccaggccagccaagaagcaagagcagaccacgagcagcagattaaggatctggagcagaagctgtccctgcaagagcaggatgcagcgattgtgaagaacatgaagtctgagctggtacggctccctaggctggaacgggagctgaagcagctgcgggaggagagcgcgcacctgcgggagatgagagagaccaacgggctgctccaggaagagctggaagggctgcagaggaagctggggcgccaggagaagatgcaggagacgctggttggcttggagctggagaacgagaggctgctggccaagctgcaaagctgggagagactggaccagaccatgggcctgagcatcaggactccagaagacctttccagattcgtggttgagctgcagcagagggagcttgccttgaaggacaagaacagcgccgtcaccagcagcgcccgggggctggagaaggccaggcagcagctgcaggaggagctccggcaggtcagcggccagctgttggaggagaggaagaagcgcgagacccacgaggcgctggcccggaggctccagaaacgggtcctgctgctcaccaaggagcgggacggtatgcgggccatcctggggtcctacgacagcgagctgaccccggccgagtactcaccccagctgacgcggcgcatgcgggaggctgaggatatggtgcagaaggtgcacagccacagcgccgagatggaggctcagctgtcgcaggccctggaggagctgggaggccagaaacaaagagcagacatgctggagatggagctgaagatgctgaagtctcagtccagctctgccgaacagagcttcctgttctccagggaggaggcggacacgctcaggttgaaggtcgaggagctggaaggcgagcggagtcggctggaggaggaaaagaggatgctggaggcacagctggagcggcgagctctgcagggtgactatgaccagagcaggaccaaagtgctgcacatgagcctgaaccccaccagtgtggccaggcagcgcctgcgcgaggaccacagccagctgcaggcggagtgcgagcgactgcgcgggctcctgcgcgccatggagagaggaggcaccgtcccagccgaccttgaggctgccgccgcgagtctgccatcgtccaaggaggtggcagagctgaagaagcaggtggagagtgccgagctgaagaaccagcggctcaaggaggttttccagaccaagatccaggagttccgcaaggcctgctacacgctcaccggctaccagatcgacatcaccacggagaaccagtaccggctgacctcgctgtacgccgagcacccaggcgactgcctcatcttcaaggccaccagcccctcgggttccaagatgcagctactggagacagagttctcacacaccgtgggcgagctcatcgaggtgcacctgcggcgccaggacagcatccctgccttcctcagctcgctcaccctcgagctcttcagccgccagaccgtggcgtagcctgcaggctcgggggcatagccggagccactctgcttggcctgacctgcaggtcccctgccccgccagccacaggctgggtgcacgtcctgcctctccagccccacagggcagcagcatgactgacagacacgctgggacctacgtcgggcttcctgctggggcggccagcaccctctccacgtgcagaccccatgcgtcccggagcctggtgtgtgggcgtcggccaccagcctgggttcctcaccttgtgaaataaaatcttctcccctagac

SEQ ID NO: 150483 - DNA, 557 bp, Homo sapiens
  Payload ID: 9724
  Gene Symbol: MAD1L1
  Gene Name: MAD1 mitotic arrest deficient-like 1 (yeast)
  ENST ID: ENST00000455998
  CDS Start-End: 124-557
tacaccatcggacccctggctctgaggccttcagacttggactgtgtcacactgccaggcttccagggctccaacttgcagacggcctgttgtgggacagtctctgtaatcgcgaaagcaaccatggaagacctgggggaaaacaccatggttttatccaccctgagatctttgaacaacttcatctctcagcgtgtggagggaggctctggactggatatttctacctcggccccaggttctctgcagatgcagtaccagcagagcatgcagcgtgaggtcgaccgcaaccaggagctcctgacgcgcatccggcagcttcaggagcgggaggccggggcggaggagaagatgcaggagcagctggagcgcaacaggcagtgtcagcagaacttggatgctgccagcaagaggctgcgtgagaaagaggacagtctggcccaggctggcgagaccatcaacgcactgaaggggaggatctcggaactgcagtggagcgtgatggaccaggagatgcgggtgaagcgcctggagtcggagaagcaggagctgcagga

SEQ ID NO: 150484 - DNA, 535 bp, Homo sapiens
  Payload ID: 9724
  Gene Symbol: MAD1L1
  Gene Name: MAD1 mitotic arrest deficient-like 1 (yeast)
  ENST ID: ENST00000444373
  CDS Start-End: 294-535
ggattgtggggaagtcttctgatgtagtccctaaagctgacacgccagagcatctcgaggctgttgggggctgttgctgggatcctgaggccgcacacctccctgctatgagttctgacgtttacaaacataggaacgcccgggggctggagaaggccaggcagcagctgcaggaggagctccggcaggtcagcggccagctgttggaggagaggaagaagcgcgagacccacgaggcgctggcccggaggctccagaaacgggtcctgctgctcaccaaggagcgggacggtatgcgggccatcctggggtcctacgacagcgagctgaccccggccgagtactcaccccagctgacgcggcgcatgcgggaggctgaggatatggtgcagaaggtgcacagccacagcgccgagatggaggctcagctgtcgcaggccctggaggagctgggaggccagaaacaaagagcagacatgctggagatggagctgaagatgctgaagtctcagtccagctctgccgaacagagctt

SEQ ID NO: 150485 - DNA, 864 bp, Homo sapiens
  Payload ID: 9724
  Gene Symbol: MAD1L1
  Gene Name: MAD1 mitotic arrest deficient-like 1 (yeast)
  ENST ID: ENST00000437877
  CDS Start-End: 499-864
aggctccgtaggatggtgaagaggttgagatgctgtccagcccacagaggccccggaaagccagtgccgcccgtcagaggggtctcctgagtgcgtgtgggtggctggattctgcatactgggttatcttaaccccggctgtgaaaactggatgaagtagcaatcctttcaaccccaagagtctgtgattcagccagagttacaagatgtctcttcatcctctgaggtttacaaggttctcagaaaacctgtgaagagctgcgcggatcctctcctgccccggcccagcggcagggctgccgcctccctctcccctgggcctgagtgggtggatttcccctcccctcctccttcccaggagaagcacagagggagcggccaagcgagccgtgtctgcaaaccccgcttccctctgcggcggcctctgccatcgtgccatggggccggaggtccctggtccagggtgactatgaccagagcaggaccaaagtgctgcacatgagcctgaaccccaccagtgtggccaggcagcgcctgcgcgaggaccacagccagctgcaggcggagtgcgagcgactgcgcgggctcctgcgcgccatggagagaggaggcaccgtcccagccgaccttgaggctgccgccgcgagtctgccatcgtccaaggaggtggcagagctgaagaagcaggtggagagtgccgagctgaagaaccagcggctcaaggaggttttccagaccaagatccaggagttccgcaaggcctgctacacgctcaccggctaccagatcgacatcaccacggagaaccagtaccggctgacctcgctgtacgccgagcacccaggcgactgcctcatcttcaag

SEQ ID NO: 150486 - DNA, 850 bp, Homo sapiens
  Payload ID: 9724
  Gene Symbol: MAD1L1
  Gene Name: MAD1 mitotic arrest deficient-like 1 (yeast)
  ENST ID: ENST00000450235
  CDS Start-End: 53-850
caccgtgagcctgtgcatctgttgctattcaggagatggaagtgacaaaaaaatgagagaacttgagtttgcaaagttagagtgctgtctggcctggcagcttcaggcttccaggagagagctggagatggagctgaagatgctgaagtctcagtccagctctgccgaacagagcttcctgttctccagggaggaggcggacacgctcaggttgaaggtcgaggagctggaaggcgagcggagtcggctggaggaggaaaagaggatgctggaggcacagctggagcggcgagctctgcagggtgactatgaccagagcaggaccaaagtgctgcacatgagcctgaaccccaccagtgtggccaggcagcgcctgcgcgaggaccacagccagctgcaggcggagtgcgagcgactgcgcgggctcctgcgcgccatggagagaggaggcaccgtcccagccgaccttgaggctgccgccgcgagtctgccatcgtccaaggaggtggcagagctgaagaagcaggtggagagtgccgagctgaagaaccagcggctcaaggaggttttccagaccaagatccaggagttccgcaaggcctgctacacgctcaccggctaccagatcgacatcaccacggagaaccagtaccggctgacctcgctgtacgccgagcacccaggcgactgcctcatcttcaaggccaccagcccctcgggttccaagatgcagctactggagacagagttctcacacaccgtgggcgagctcatcgaggtgcacctgcggcgccaggacagcatccctgccttcctcagctcgctcaccctcgagctcttcagccgccag

SEQ ID NO: 150487 - DNA, 555 bp, Homo sapiens
  Payload ID: 9724
  Gene Symbol: MAD1L1
  Gene Name: MAD1 mitotic arrest deficient-like 1 (yeast)
  ENST ID: ENST00000429779
  CDS Start-End: 85-555
gtcgcgataaatgggcgccggcggagcggagggagatccgagcggcggcggcaagctggctgcgagcggctgaggaaagcaaccatggaagacctgggggaaaacaccatggttttatccaccctgagatctttgaacaacttcatctctcagcgtgtggagggaggctctggactggatatttctacctcggccccaggttctctgcagatgcagtaccagcagagcatgcagctggaggaaagagcagagcagatccgttcgaagtcccacctcatccaggtggagcgggagaaaatgcagatggagctgagtcacaagagggctcgagtggagctggagagagcagccagcaccagtgccaggaactacgagcgtgaggtcgaccgcaaccaggagctcctgacgcgcatccggcagcttcaggagcgggaggccggggcggaggagaagatgcaggagcagctggagcgcaacaggcagtgtcagcagaacttggatgctgccagcaagaggctgcgtgagaaagaggacagtctggcccaggctggcgag

SEQ ID NO: 150488 - DNA, 564 bp, Homo sapiens
  Payload ID: 9724
  Gene Symbol: MAD1L1
  Gene Name: MAD1 mitotic arrest deficient-like 1 (yeast)
  ENST ID: ENST00000421113
  CDS Start-End: 440-564
tgacagggtgggaaagacgtcactgggggccaggcagggccttaccaggaggcagcatctgagcagaggcctgagggcagccgggggctgggcaggggtgaccaagcgggacagacgagctgctgggacgccagcagggctggcacagtgcggggatcacagcatgattgcagcgggcagctgttgaagactggaagcgcggcagtggcatggttacctcacacagtcggaagagcgacctggagaaagaggccttcgggatggggagcaggaagtgtgtcgcgcccgggggctggagaaggccaggcagcagctgcaggaggagctccggcaggtcagcggccagctgttggaggagaggaagaagcgcgagacccacgaggcgctggcccggaggctccagaaacgggtcctgctgctcaccaaggagcgggacggtatgcgggccatcctggggtcctacgacagcgagctgaccccggccgagtactcaccccagctgacgcggcgcatgcgggaggctgaggatatggtgcagaaggtgcacagccacagcgccgagat

SEQ ID NO: 150489 - DNA, 831 bp, Homo sapiens
  Payload ID: 9724
  Gene Symbol: MAD1L1
  Gene Name: MAD1 mitotic arrest deficient-like 1 (yeast)
  ENST ID: ENST00000445959
  CDS Start-End: 215-831
cagcctctctcagaaggcggccacctctgtcacagctctcctgggttttgggctggagtaccctggatgaggacagcacaagctcgtactccacccggggctccgggagtgcttggtgcttcccgaggaaggcaggcgtgaggtcgaccgcaaccaggagctcctgacgcgcatccggcagcttcaggagcgggaggccggggcggaggagaagatgcaggagcagctggagcgcaacaggcagtgtcagcagaacttggatgctgccagcaagaggctgcgtgagaaagaggacagtctggcccaggctggcgagaccatcaacgcactgaaggggaggatctcggaactgcagtggagcgtgatggaccaggagatgcgggtgaagcgcctggagtcggagaagcaggagctgcaggagcagctggacctgcaacacaaaaaatgccaggaagccaatcagaaaatccaggaactccaggccagccaagaagcaagagcagaccacgagcagcagattaaggatctggagcagaagctgtccctgcaagagcaggatgcagcgattgtgaagaacatgaagtctgagctggtacggctccctaggctggaacgggagctgaagcagctgcgggaggagagcgcgcacctgcgggagatgagagagaccaacgggctgctccaggaagagctggaagggctgcagaggaagctggggcgccaggagaagatgcaggagacgctggttggcttggagctggagaacgagaggctgctggccaagctgcaaagctgggagagactggaccagaccatgggcctgagcatcag

SEQ ID NO: 150490 - DNA, 750 bp, Homo sapiens
  Payload ID: 9724
  Gene Symbol: MAD1L1
  Gene Name: MAD1 mitotic arrest deficient-like 1 (yeast)
  ENST ID: ENST00000429625
  CDS Start-End: 112-750
gatgccgtcactgaggattctgtttttctttgggtgcgacctgctcagctggaggaaagagcagagcagatccgttcgaagtcccacctcatccaggtggagcgggagaaaatgcagatggagctgagtcacaagagggctcgagtggagctggagagagcagccagcaccagtgccaggaactacgagcgtgaggtcgaccgcaaccaggagctcctgacgcgcatccggcagcttcaggagcgggaggccggggcggaggagaagatgcaggagcagctggagcgcaacaggcagtgtcagcagaacttggatgctgccagcaagaggctgcgtgagaaagaggacagtctggcccaggctggcgagaccatcaacgcactgaaggggaggatctcggaactgcagtggagcgtgatggaccaggagatgcgggtgaagcgcctggagtcggagaagcaggagctgcaggagcagctggacctgcaacacaaaaaatgccaggaagccaatcagaaaatccaggaactccaggccagccaagaagcaagagcagaccacgagcagcagattaaggatctggagcagaagctgtccctgcaagagcaggatgcagcgattgtgaagaacatgaagtctgagctggtacggctccctaggctggaacgggagctgaagcagctgcgggaggagagcgcgcacctgcgggagatgagagagaccaacgggctgctccaggaagagctggaa

SEQ ID NO: 150491 - DNA, 839 bp, Homo sapiens
  Payload ID: 9724
  Gene Symbol: MAD1L1
  Gene Name: MAD1 mitotic arrest deficient-like 1 (yeast)
  ENST ID: ENST00000438959
  CDS Start-End: 243-839
ggacgcacggatggtctccttctctctgacctcgggagacggtagatgtgtccaggacacctgctgtgcctctctgcgtcactccaggcaccggattatcttctgtggcttctcttttttctccaagtcagagctggagggcatggggcggttgtttagtagagcctggggaggtgacttgcccccttgtctctgcagttctcatttcctaatctccagcagcctggggcggaagtgaatttatggtctccctgcggccgtgcttgccggggctccccacccagcatttggaggagccctgcccaggcgattacagcgcccgggggctggagaaggccaggcagcagctgcaggaggagctccggcaggtcagcggccagctgttggaggagaggaagaagcgcgagacccacgaggcgctggcccggaggctccagaaacgggtcctgctgctcaccaaggagcgggacggtatgcgggccatcctggggtcctacgacagcgagctgaccccggccgagtactcaccccagctgacgcggcgcatgcgggaggctgaggatatggtgcagaaggtgcacagccacagcgccgagatggaggctcagctgtcgcaggccctggaggagctgggaggccagaaacaaagagcagacatgctggagatggagctgaagatgctgaagtctcagtccagctctgccgaacagagcttcctgttctccagggaggaggcggacacgctcaggttgaaggtcgaggagctggaaggcgagcggagtcggctggaggaggaaaagaggatgctggaggcacagctggagcggcgagctctgcag

SEQ ID NO: 150492 - DNA, 5468 bp, Homo sapiens
  Payload ID: 9725
  Gene Symbol: MAD2L1
  Gene Name: MAD2 mitotic arrest deficient-like 1 (yeast)
  Uniprot ID: Q13257
  ENST ID: ENST00000296509
  CDS Start-End: 341-958
ggaatcgtcatcttcttccctcggccccaactagtagaccacgaccagaagacacatcctaacctacacctaccgtagtgtcacacccggcacagcgcgaccaggtccaccaactgcgcctgcgcgaaccggccgctcccgcgacatcacaggaaggctgagagaaagggcaggtccccgctgcgtggggctgggcttaaaggctcgtcgcgcctgcgcaaaggacctgacgacgtgctgcgtcgttacttttgaaacgcttggcggggaagtgctgttggagccgctgtggttgctgtccgcggagtggaagcgcgtgcttttgtttgtgtccctggccatggcgctgcagctctcccgggagcagggaatcaccctgcgcgggagcgccgaaatcgtggccgagttcttctcattcggcatcaacagcattttatatcagcgtggcatatatccatctgaaacctttactcgagtgcagaaatacggactcaccttgcttgtaactactgatcttgagctcataaaatacctaaataatgtggtggaacaactgaaagattggttatacaagtgttcagttcagaaactggttgtagttatctcaaatattgaaagtggtgaggtcctggaaagatggcagtttgatattgagtgtgacaagactgcaaaagatgacagtgcacccagagaaaagtctcagaaagctatccaggatgaaatccgttcagtgatcagacagatcacagctacggtgacatttctgccactgttggaagtttcttgttcatttgatctgctgatttatacagacaaagatttggttgtacctgaaaaatgggaagagtcgggaccacagtttattaccaattctgaggaagtccgccttcgttcatttactactacaatccacaaagtaaatagcatggtggcctacaaaattcctgtcaatgactgaggatgacatgaggaaaataatgtaattgtaattttgaaatgtggttttcctgaaatcaagtcatctatagttgatatgttttatttcattggttaatttttacatggagaaaaccaaaatgatacttactgaactgtgtgtaattgttccttttatttttttggtacctatttgacttaccatggagttaacatcatgaatttattgcacattgttcaaaaggaaccaggaggtttttttgtcaacattgtgatgtatattcctttgaagatagtaactgtagatggaaaaacttgtgctataaagctagatgctttcctaaatcagatgttttggtcaagtagtttgactcagtataggtagggagatatttaagtataaaatacaacaaaggaagtctaaatattcagaatctttgttaaggtcctgaaagtaactcataatctataaacaatgaaatattgctgtatagctccttttgaccttcatttcatgtatagttttccctattgaatcagtttccaattatttgactttaatttatgtaacttgaacctatgaagcaatggatatttgtactgtttaatgttctgtgatacagaactcttaaaaatgttttttcatgtgttttataaaatcaagttttaagtgaaagtgaggaaataaagttaagtttgttttaaatttgtcttaaaacattttgatactggtttggtgttgatatagttaaatggtaattagaattgattcagcatagctaatgaattcttgttcctacgaagttatagaacttaagggtccaaagttgagtgagtcttgaggtgtcttcaatctaatggataaactttgatcacatcctgttcatctcatagcaatagacttaaggctattacttcatcattgtgaaaagataaatgtcctttggaattagtccaacaattccagttgaacaagtgttgattttagtactttactatactcttagccttattgtcagcctacttttccttatatacttaaatactatgcttattcctgtgctttcattaataccctcatctggtacatgctttctatccagttctcacctgtttttccaaggtcagtttaaggcagatttgtaaagtcttctctaatctctaatctaaatctgacctcattttgtaaaaattcagtttattaatgtttattattagacactaagttctttatgtgtattaacttatttaaccttcactatttttaagtaattgcacatagtctgaatctgttcattcagaaattacatattgagcaaatactgtggatcagtggcagtttctgggttctcagtgacaaatttgtagactcttcatatctttatggaataagtggaccactggtgttaccaacctagatgatttcaagaaaagtggcaattaaatgcttcatttgtattttaactatttgagaagtcagactaaattctgcgaaatcacttttcccccccaagatggagtcttattctgtcgcccaggctggagtacagtgacgcagctcagctcactacagcctctgcctcccggattccagccattcttccgtctcagcctcctgagtagctgggattacaggcacgtgccaccacacctggctaatttttatatttttagtagagagagggtttcaccatgttggccaggctagtcttgaactcctgacctcatgatctgcccgccttgacctcacaaagcattgggattacaggcgtgagccactgcgcccggctgaaatcacatttttaaaggttgtgtgtatactctggtcatttcaactcagctaccaatattaacaggattaaattcttagatttttgtatcatttgcatgctactatttactctgaggtttctggagagctagtcatgatgagtcattttaccccttacagattatataatcaattaagaaatacacattttgggctgggcgcagtggctcgcgcctgtaatcccagcactttgggaggccgaggcaggtggatcacgagatcaggagtttgagaccagcctggccaagatggtcaaaccccgtctctactaaaaatataaaaattagctgggcgtggtggcgggcgcatctcagctacttgggaggctgaggcaggagaaatcgcttgaacccatgaggtggaggttgcggtgagccaagaccgtgccactgtactctagcctgggcgacagagcaaggctccatctcaaaaaataataaataaaaaagaaatacacattttggagctgagtgggagccaaactatgagttttattgaggtgaagctatactggaaaagctttgccctgtagctccaagtggactgtcccatcctctttctagaccttgaggcttacctcaggaggatgatgtttaaatcaacagctgaaagacttgtgagtggtttctacaccatgttaaagagaaggttctaagacagcatgataggcctctaggcctggcctggactctggctcagtgttgcttaccatatgtagaggatgaacagaggttaagcccatcaaggtctgaagtagagcccaggaggaactgaactgtatctggctttcaggatccttttcccagtgtcatcaatcagagaagtcaaacctctgtgagaatgcttgtgcagaggtataacagtctcatgtattggttggcttttgctgcacctttctcattctgttggagggacattggttagtcaggactctgaaggccagctttttcacactgaccaaagcaagtgaaggtcaagcctaactttaatgggaccaggaagtatactcctcccatggaggtggtgggaatggcaccgagaagtttgatgacagttatctaatggactagaggttggcaaactttctgtaaatggccaggtagtaaatagttctgcttttgaaggcatatggtctcttgcacctactcgaggctgaaagcagctatagacaatacataaatgaatgagcgtgagtgtgttccaataagaaaaaaacatggctgtttgcttcggccccagggttgtagcttaccagtcctgtaacagatcacagtttgctcttttggtcacaaatacttgaacccctccctagttcagagcatttgataccgtaatatttaaagctcacttgtaaaacatcgtttgttgcctccatccatagtatctcaaacagaatgtctctcccaaatatacctaaattccatattctctgaagcacaaccagctattttcttgacatacttcctaacacaccccacagttcacaatttgatctgaaaacttgttaagggaggttctttggcatgtgatgccataaaaagagaggtatgggctctcctttaaaaaagagaccctttttatgagactcacaataggataaagagcccatgcctatttttaatcattttttcactatatagacatgcatgctgaaaaatgtttttattagtataatgctaattatactgacttcctatatattttagcatatagattcaaagattattagcacaataaggtagataacttcatagaccatttcttcatcttgttttcatttagtatgtaaaatttatctaaaatttacatgaaagatcagaatagctatgtaatgctactttgtaactcttatattttccaccagatgtcactaatgctgtaatattcaaattaagatgactttcttttggttctaaaggctgtaagcttattggaaaagcaaggttactcagcattggaattcctggcaacaaatatataaatacattaggggaataaacacttagcatttattatttactagtcacttcacatgaatttttatttaattctcatgcttttgtgcacaagtaaaactgggggtcaatgggcatgcaaattgtgtcgtggtttttgaagtttagtggtctctcctatccctggccaaggaagtatgcaaattgtattgtggtttttgaagtttaggtgatctcttccttctatccctagccaaggaagttcatcctgactccccaacaagcatatcaaaaggagtgtttcgtcacctttttcctcttaccctttacatccttttagcaataaagtgttcagaacaaactggttttcctttactgtgctttgcaaaacttattcatgttttattgggtgactttgtatttacactttcctcagatagtctgttgtcagatgactttgaccaatgattgggaggaaccaaatacagaggattttatcctatgcctaatctatattgtctacagagtaaatcaggtatgaatttgtgaacagtaatgaaacaattttccaactaatcagaagaattgtttgttaagtaaccttaattactcagtttttggtgaattgtttgcggcttaacttgtaaataatttcttattctttttttaaatgtatgaaatatttctagttattttgttcaatgtgactgataaaagtttatattggaatagctgtgaaatggaaa

SEQ ID NO: 150493 - DNA, 1277 bp, Homo sapiens
  Payload ID: 9725
  Gene Symbol: MAD2L1
  Gene Name: MAD2 mitotic arrest deficient-like 1 (yeast)
  Uniprot ID: Q13257
  ENST ID: ENST00000333047
  CDS Start-End: 100-372
gtcgttacttttgaaacgcttggcggggaagtgctgttggagccgctgtggttgctgtccgcggagtggaagcgcgtgcttttgtttgtgtccctggccatggcgctgcagctctcccgggagcagggaatcaccctgcgcgggagcgccgaaatcgtggccgagttcttctcattcggcatcaacagcattttatatcagcgtggcatatatccatctgaaacctttactcgagtgcagaaatacggactcaccttgcttgtaactactgatcttgagctcataaaatacctaaataatgtggtggaacaactgaaagtgcacccagagaaaagtctcagaaagctatccaggatgaaatccgttcagtgatcagacagatcacagctacggtgacatttctgccactgttggaagtttcttgttcatttgatctgctgatttatacagacaaagatttggttgtacctgaaaaatgggaagagtcgggaccacagtttattaccaattctgaggaagtccgccttcgttcatttactactacaatccacaaagtaaatagcatggtggcctacaaaattcctgtcaatgactgaggatgacatgaggaaaataatgtaattgtaattttgaaatgtggttttcctgaaatcaagtcatctatagttgatatgttttatttcattggttaatttttacatggagaaaaccaaaatgatacttactgaactgtgtgtaattgttccttttatttttttggtacctatttgacttaccatggagttaacatcatgaatttattgcacattgttcaaaaggaaccaggaggtttttttgtcaacattgtgatgtatattcctttgaagatagtaactgtagatggaaaaacttgtgctataaagctagatgctttcctaaatcagatgttttggtcaagtagtttgactcagtataggtagggagatatttaagtataaaatacaacaaaggaagtctaaatattcagaatctttgttaaggtcctgaaagtaactcataatctataaacaatgaaatattgctgtatagctccttttgaccttcatttcatgtatagttttccctattgaatcagtttccaattatttgactttaatttatgtaacttgaacctatgaagcaatggatatttgtactgtttaatgttctgtgatacagaactcttaaaaatgttttttcatgtgttttataaaatcaagttttaagtgaaagtgaggaaataaagttaagtttgtttt

SEQ ID NO: 150494 - DNA, 764 bp, Homo sapiens
  Payload ID: 9725
  Gene Symbol: MAD2L1
  Gene Name: MAD2 mitotic arrest deficient-like 1 (yeast)
  ENST ID: ENST00000504707
  CDS Start-End: 125-250
cgcaaaggacctgacgacgtgctgcgtcgttacttttgaaacgcttggcggggaagtgctgttggagccgctgtggttgctgtccgcggagtggaagcgcgtgcttttgtttgtgtccctggccatggcgctgcagctctcccgggagcagggaatcaccctgcgcgggagcgccgaaatcgtggccgagttcttcttgcacccagagaaaagtctcagaaagctatccaggatgaaatccgttcagtgatcagacagatcacagctacggtgacatttctgccactgttggaagtttcttgttcatttgatctgctgatttatacagacaaagatttggttgtacctgaaaaatgggaagagtcgggaccacagtttattaccaattctgaggaagtccgccttcgttcatttactactacaatccacaaagtaaatagcatggtggcctacaaaattcctgtcaatgactgaggatgacatgaggaaaataatgtaattgtaattttgaaatgtggttttcctgaaatcaagtcatctatagttgatatgttttatttcattggttaatttttacatggagaaaaccaaaatgatacttactgaactgtgtgtaattgttccttttatttttttggtacctatttgacttaccatggagttaacatcatgaatttattgcacattgttcaaaaggaaccaggaggtttttttgtcaacattgtgatgtatattcctttgaagatagtaactgtagatggaaa

SEQ ID NO: 150495 - DNA, 1860 bp, Homo sapiens
  Payload ID: 9726
  Gene Symbol: MAD2L2
  Gene Name: MAD2 mitotic arrest deficient-like 2 (yeast)
  Uniprot ID: Q9UI95
  ENST ID: ENST00000235310
  CDS Start-End: 930-1565
gaggaggggcggcgggtggcgggctcgactgcccccagccgaggggcagccccggggccgggcccggcgcgcacccggccagcgcgccctcgccagctgcgctctgagttctgggccagctccccagaggcctaggcgccgccgccgcgagggcgcggggcagacaaaggaggcagacaaaggcgggcgcagcccagcagccgtgcgggcaccgggcgaggcaggcccactcctcccgtaatatcatctctgagggcccttacaggacttccagaccgagtccacgcccctgggggacttgggagcagtaaaatgtagtggcaggaggcacctcggccatcgcccaccccaccagctgggagactcgggcaggttattcacccttctgcacctcgcttgacttatctgtataaagagaacagtcacagtaactgcctcatggagttactcccaggactgagataatccacggacacacttagcccagtgcccagcactcggctggagctccaaaaagccctcttccggcgcctgctaaagcgagagaaatgccctcgggggaagatatgtagcgatccaatggaacgtggagatcaacgttgtgttttcttcgcgcccacccgaagttgaagggaggtggcgcggcgggtctcagcccctcccggacgccgaggcccggcccccgcccctcggagacccgcccccgcatgcggaaccgccctctgcgaggcccggtttgggccgtgcgggaatgggcgtggcctgggcggggcgggcgctaggacccaccggagcgccgtgaacgtcaccgagcggcgccgaggccccgggttgagcgggaggcgcgatcggtccggtcggtggctccccgcggcggggccgggcccgatctcgggcgggaaccgagcgcagagccggtagcgggaaggatgaccacgctcacacgacaagacctcaactttggccaagtggtggccgatgtgctctgcgagttcctggaggtggctgtgcatctcatcctctacgtgcgcgaggtctaccccgtgggcatcttccagaaacgcaagaagtacaacgtgccggtccagatgtcctgccacccggagctgaatcagtatatccaggacacgctgcactgcgtcaagccactcctggagaagaatgatgtggagaaagtggtggtggtgattttggataaagagcaccgcccagtggagaaattcgtctttgagatcacccagcctccactgctgtccatcagctcagactcgctgttgtctcatgtggagcagctgctccgggccttcatcctgaagatcagcgtgtgcgatgccgtcctggaccacaaccccccaggctgtaccttcacagtcctggtgcacacgagagaagccgccactcgcaacatggagaagatccaggtcatcaaggatttcccctggatcctggcggatgagcaggatgtccacatgcatgacccccggctgataccactaaaaaccatgacgtcggacattttaaagatgcagctttacgtggaagagcgcgctcataaaggcagctgagggggcacctgccaccccactgatgcccaaactgtcagactttgggggatccccgcctagggcagtgctgcatggctgccctgattccaagtgctcttatcgcctctgtgtgtggatcgcccgccccagcccggggccgctcaggtctgcttggaggatgcctcccccaggagggcagtgagggatgccgcaacctcgacttctcagcctcctggggttccgccggccaacactgtctgtctcaaatactgtgctgtgagttgtttcaataaaggggccccaagggctgggctga

SEQ ID NO: 150496 - DNA, 872 bp, Homo sapiens
  Payload ID: 9726
  Gene Symbol: MAD2L2
  Gene Name: MAD2 mitotic arrest deficient-like 2 (yeast)
  Uniprot ID: Q9UI95
  ENST ID: ENST00000376667
  CDS Start-End: 210-845
aggggcagccccggggccgggcccggcgcgcacccggccagcgcgccctcgccagctgcgctctgagttctgggccagctccccagaggcctaggcgccgccgccgcgagggcgcggggcagacaaaggaggcagacaaaggcgggcgcagcccagcagccgtgcgggcaccgggcgaggcaggcccactcctcccggtagcgggaaggatgaccacgctcacacgacaagacctcaactttggccaagtggtggccgatgtgctctgcgagttcctggaggtggctgtgcatctcatcctctacgtgcgcgaggtctaccccgtgggcatcttccagaaacgcaagaagtacaacgtgccggtccagatgtcctgccacccggagctgaatcagtatatccaggacacgctgcactgcgtcaagccactcctggagaagaatgatgtggagaaagtggtggtggtgattttggataaagagcaccgcccagtggagaaattcgtctttgagatcacccagcctccactgctgtccatcagctcagactcgctgttgtctcatgtggagcagctgctccgggccttcatcctgaagatcagcgtgtgcgatgccgtcctggaccacaaccccccaggctgtaccttcacagtcctggtgcacacgagagaagccgccactcgcaacatggagaagatccaggtcatcaaggatttcccctggatcctggcggatgagcaggatgtccacatgcatgacccccggctgataccactaaaaaccatgacgtcggacattttaaagatgcagctttacgtggaagagcgcgctcataaaggcagctgagggggcacctgccaccccactgatgcc

SEQ ID NO: 150497 - DNA, 864 bp, Homo sapiens
  Payload ID: 9726
  Gene Symbol: MAD2L2
  Gene Name: MAD2 mitotic arrest deficient-like 2 (yeast)
  ENST ID: ENST00000376669
  CDS Start-End: 93-767
gggaggcgcgatcggtccggtcggtggctccccgcggcggggccgggcccgatctcgggcgggaaccgagcgcagagccggtagcgggaaggatgaccacgctcacacgacaagacctcaactttggccaagtggtggccgatgtgctctgcgagttcctggaggtggctgtgcatctcatcctctacgtgcgcgaggtctaccccgtgggcatcttccagaaacgcaagaagtacaacgtgccggtccagatgtcctgccacccggagctgaatcagtatatccaggacacgctgcactgcgtcaagccactcctggagaagaatgatgtggagaaagtggtggtggtgattttggataaagagcaccgcccagtggagaaattcgtctttgagatcacccagcctccactgctgtccatcaggtgggctgcccctgcccctcgcccactagctggcatcagctcagactcgctgttgtctcatgtggagcagctgctccgggccttcatcctgaagatcagcgtgtgcgatgccgtcctggaccacaaccccccaggctgtaccttcacagtcctggtgcacacgagagaagccgccactcgcaacatggagaagatccaggtcatcaaggatttcccctggatcctggcggatgagcaggatgtccacatgcatgacccccggctgataccactaaaaaccatgacgtcggacattttaaagatgcagctttacgtggaagagcgcgctcataaaggcagctgagggggcacctgccaccccactgatgcccaaactgtcagactttgggggatccccgcctagggcagtgctgcatggctgccctgattccaagtgctct

SEQ ID NO: 150498 - DNA, 1002 bp, Homo sapiens
  Payload ID: 9726
  Gene Symbol: MAD2L2
  Gene Name: MAD2 mitotic arrest deficient-like 2 (yeast)
  ENST ID: ENST00000376672
  CDS Start-End: 78-752
cagacaaaggcgggcgcagcccagcagccgtgcgggcaccgggcgaggcaggcccactcctcccggtagcgggaaggatgaccacgctcacacgacaagacctcaactttggccaagtggtggccgatgtgctctgcgagttcctggaggtggctgtgcatctcatcctctacgtgcgcgaggtctaccccgtgggcatcttccagaaacgcaagaagtacaacgtgccggtccagatgtcctgccacccggagctgaatcagtatatccaggacacgctgcactgcgtcaagccactcctggagaagaatgatgtggagaaagtggtggtggtgattttggataaagagcaccgcccagtggagaaattcgtctttgagatcacccagcctccactgctgtccatcaggtgggctgcccctgcccctcgcccactagctggcatcagctcagactcgctgttgtctcatgtggagcagctgctccgggccttcatcctgaagatcagcgtgtgcgatgccgtcctggaccacaaccccccaggctgtaccttcacagtcctggtgcacacgagagaagccgccactcgcaacatggagaagatccaggtcatcaaggatttcccctggatcctggcggatgagcaggatgtccacatgcatgacccccggctgataccactaaaaaccatgacgtcggacattttaaagatgcagctttacgtggaagagcgcgctcataaaggcagctgagggggcacctgccaccccactgatgcccaaactgtcagactttgggggatccccgcctagggcagtgctgcatggctgccctgattccaagtgctcttatcgcctctgtgtgtggatcgcccgccccagcccggggccgctcaggtctgcttggaggatgcctcccccaggagggcagtgagggatgccgcaacctcgacttctcagcctcctggggttccgccggccaacactgtctgtctcaaatact

SEQ ID NO: 150499 - DNA, 1118 bp, Homo sapiens
  Payload ID: 9726
  Gene Symbol: MAD2L2
  Gene Name: MAD2 mitotic arrest deficient-like 2 (yeast)
  Uniprot ID: Q9UI95
  ENST ID: ENST00000376692
  CDS Start-End: 189-824
ccgtgcgggaatgggcgtggcctgggcggggcgggcgctaggacccaccggagcgccgtgaacgtcaccgagcggcgccgaggccccgggttgagcgggaggcgcgatcggtccggtcggtggctccccgcggcggggccgggcccgatctcgggcgggaaccgagcgcagagccggtagcgggaaggatgaccacgctcacacgacaagacctcaactttggccaagtggtggccgatgtgctctgcgagttcctggaggtggctgtgcatctcatcctctacgtgcgcgaggtctaccccgtgggcatcttccagaaacgcaagaagtacaacgtgccggtccagatgtcctgccacccggagctgaatcagtatatccaggacacgctgcactgcgtcaagccactcctggagaagaatgatgtggagaaagtggtggtggtgattttggataaagagcaccgcccagtggagaaattcgtctttgagatcacccagcctccactgctgtccatcagctcagactcgctgttgtctcatgtggagcagctgctccgggccttcatcctgaagatcagcgtgtgcgatgccgtcctggaccacaaccccccaggctgtaccttcacagtcctggtgcacacgagagaagccgccactcgcaacatggagaagatccaggtcatcaaggatttcccctggatcctggcggatgagcaggatgtccacatgcatgacccccggctgataccactaaaaaccatgacgtcggacattttaaagatgcagctttacgtggaagagcgcgctcataaaggcagctgagggggcacctgccaccccactgatgcccaaactgtcagactttgggggatccccgcctagggcagtgctgcatggctgccctgattccaagtgctcttatcgcctctgtgtgtggatcgcccgccccagcccggggccgctcaggtctgcttggaggatgcctcccccaggagggcagtgagggatgccgcaacctcgacttctcagcctcctggggttccgccggccaacactgtctgtctcaaatactgtgctgtgagttgtttcaataaaggggccccaagggctgggctg

SEQ ID NO: 150500 - DNA, 1032 bp, Homo sapiens
  Payload ID: 9726
  Gene Symbol: MAD2L2
  Gene Name: MAD2 mitotic arrest deficient-like 2 (yeast)
  ENST ID: ENST00000456915
  CDS Start-End: 531-1032
ccccgggttgagcgggaggcgcgatcggtccggtcggtggctccccgcggcggggccgggcccgatctcgggcgggaaccgagcgcagagccggtactgggggaggggagagggggcgggattcccgccgggagggatccggcgtagcagggggcggagtcttattccaaccccgcttcgctttccgcatgtcccgctttgcgctcccggccctgggcatcccgctgtttccctctgcgtccgcggccctgcccttttcgggggcacagctgtggtctttccaccccgcgagacagcggggcgagggggcgcgggcggccagtggatagaggctgatgcccccaagcacggacgccagcgtgggggtggaggttcttccagctgccctgagcctgtgcgaagcgggaggtccttccccagttcccacagactgtggggagggaagagacggtggaagcgagcgggttctgggctcctgggtctctggaactaccctctgcccttgccccaacactcaggtagcgggaaggatgaccacgctcacacgacaagacctcaactttggccaagtggtggccgatgtgctctgcgagttcctggaggtggctgtgcatctcatcctctacgtgcgcgaggtctaccccgtgggcatcttccagaaacgcaagaagtacaacgtgccggtccagatgtcctgccacccggagctgaatcagtatatccaggacacgctgcactgcgtcaagccactcctggagaagaatgatgtggagaaagtggtggtggtgattttggataaagagcaccgcccagtggagaaattcgtctttgagatcacccagcctccactgctgtccatcagctcagactcgctgttgtctcatgtggagcagctgctccgggccttcatcctgaagatcagcgtgtgcgatgccgtcctggaccacaaccccccaggctgtaccttcacagtcctggtgcacacgagagaagccgccactcgcaacatggagaagatccaggtcatcaagg

SEQ ID NO: 150501 - DNA, 678 bp, Homo sapiens
  Payload ID: 9726
  Gene Symbol: MAD2L2
  Gene Name: MAD2 mitotic arrest deficient-like 2 (yeast)
  ENST ID: ENST00000445656
  CDS Start-End: 86-678
gcgatcggtccggtcggtggctccccgcggcggggccgggcccgatctcgggcgggaaccgagcgcagagccggtagcgggaaggatgaccacgctcacacgacaagacctcaactttggccaaggtagggaggctggacctgcgggcccgggggcgggggcgtctgggccggcgggcttcctcgagcgcgccaccggcttgtgcccccctgcagtggtggccgatgtgctctgcgagttcctggaggtggctgtgcatctcatcctctacgtgcgcgaggtctaccccgtgggcatcttccagaaacgcaagaagtacaacgtgccggtccagatgtcctgccacccggagctgaatcagtatatccaggacacgctgcactgcgtcaagccactcctggagaagaatgatgtggagaaagtggtggtggtgattttggataaagagcaccgcccagtggagaaattcgtctttgagatcacccagcctccactgctgtccatcagctcagactcgctgttgtctcatgtggagcagctgctccgggccttcatcctgaagatcagcgtgtgcgatgccgtcctggaccacaaccccccaggctgtaccttcacagtcctggtgcacacgagagaagccgccactcgcaacatggagaagatccaggtcatcaaggt

SEQ ID NO: 150502 - DNA, 1301 bp, Homo sapiens
  Payload ID: 9727
  Gene Symbol: MAD2L1BP
  Gene Name: MAD2L1 binding protein
  Uniprot ID: Q15013
  ENST ID: ENST00000372171
  CDS Start-End: 58-882
atgatgccccgcgagacctttattctaaccgcaaggagtagcggaggggaggtcgtgatggcggcgccggaggcggaggttctgtcctcagccgcagtccctgatttggagtggtatgagaagtccgaagaaactcacgcctcccagatagaactacttgagacaagctctacgcaggaacctctcaacgcttcggaggccttttgcccaagagactgcatggtaccagtggtgtttcctgggcctgtgagccaggaaggctgctgtcagtttacttgtgaacttctaaagcatatcatgtatcaacgccagcagctccctctgccctatgaacagcttaagcacttttaccgaaaaccttctccccaggcagaggagatgctgaagaagaaacctcgggccaccactgaggtgagcagcaggaaatgccaacaagccctggcagaactggagagtgtcctcagccacctggaggacttctttgcacggacactagtaccgcgagtgctgattctccttgggggcaatgccctaagccccaaggagttctatgaactcgacttgtctctgctggccccctacagcgtggaccagagcctgagcacagcagcttgtttgcgccgtctcttccgagccatattcatggctgatgcctttagcgagcttcaggctcctccactcatgggcaccgtcgtcatggcacagggacaccgcaactgtggagaagattggtttcgacccaagctcaactatcgagtgcccagccggggccataaactgactgtgaccctgtcatgtggcagaccttccatccgaaccacggcttgggaagactacatttggttccaggcaccagtgacatttaaaggcttccgcgagtgaatgagtgcttcttaatcctaaaaacacaatggctgaattatctttctccatgtggcgctgaatcacccatctggtttggagctagagttgcttcctggtgagagaggaagcaactctccttctggttgtctgcctcccctcagatttcctgataggctgatggcatgtggctgtgactgtgactgtaatcattgctgaacaacatctctttgaatcaaaggttgattttcccagagggtgctgggtcaggcatttctattaggagttggaaagcaaaaatgggtccatagacactctatggaggtgtccctttctgctctttgctgtgtcctttcagaatttttaccaggaacataatgtggatgtgacttatgaacttaaatataaaataaatagattcttattatattttcctgaaa

SEQ ID NO: 150503 - DNA, 1517 bp, Homo sapiens
  Payload ID: 9727
  Gene Symbol: MAD2L1BP
  Gene Name: MAD2L1 binding protein
  Uniprot ID: Q15013
  ENST ID: ENST00000451025
  CDS Start-End: 211-1131
gggggaatttagagcctcgaggcctggggtggggacgcgaggacaccagcgtagaagagcttacatcagaatcgagctttgtgggcgctccgggatttggccctttagcgcggatcctagacaacaggttttggacctcgagagctgcagaactgaggctactggtgccgccagcctgctggctccgcctctgcctcagtttcttcccctatggcccgcgtgccgctggggcggagtctcactctgtcacccaggctggagcacaatggcatgacctcagctcaccacaacttccgcctcccaggttcaagggattctcctgcctcagcctcccaagtagctgagattatagatttggagtggtatgagaagtccgaagaaactcacgcctcccagatagaactacttgagacaagctctacgcaggaacctctcaacgcttcggaggccttttgcccaagagactgcatggtaccagtggtgtttcctgggcctgtgagccaggaaggctgctgtcagtttacttgtgaacttctaaagcatatcatgtatcaacgccagcagctccctctgccctatgaacagcttaagcacttttaccgaaaaccttctccccaggcagaggagatgctgaagaagaaacctcgggccaccactgaggtgagcagcaggaaatgccaacaagccctggcagaactggagagtgtcctcagccacctggaggacttctttgcacggacactagtaccgcgagtgctgattctccttgggggcaatgccctaagccccaaggagttctatgaactcgacttgtctctgctggccccctacagcgtggaccagagcctgagcacagcagcttgtttgcgccgtctcttccgagccatattcatggctgatgcctttagcgagcttcaggctcctccactcatgggcaccgtcgtcatggcacagggacaccgcaactgtggagaagattggtttcgacccaagctcaactatcgagtgcccagccggggccataaactgactgtgaccctgtcatgtggcagaccttccatccgaaccacggcttgggaagactacatttggttccaggcaccagtgacatttaaaggcttccgcgagtgaatgagtgcttcttaatcctaaaaacacaatggctgaattatctttctccatgtggcgctgaatcacccatctggtttggagctagagttgcttcctggtgagagaggaagcaactctccttctggttgtctgcctcccctcagatttcctgataggctgatggcatgtggctgtgactgtgactgtaatcattgctgaacaacatctctttgaatcaaaggttgattttcccagagggtgctgggtcaggcatttctattaggagttggaaagcaaaaatgggtccatagacactctatggaggtgtccctttctgctctttgctgtgtcctttcagaatttttaccaggaacataatgtggatgtgacttatgaacttaaatata

SEQ ID NO: 150504 - DNA, 1831 bp, Homo sapiens
  Payload ID: 9728
  Gene Symbol: MAEL
  Gene Name: maelstrom spermatogenic transposon silencer
  Uniprot ID: Q96JY0
  ENST ID: ENST00000367870
  CDS Start-End: 265-1476
tgccacgcacccagccaatcagagcacttggcacctgcgacggcgctctccccccacctcacccgcaaggcggcacgagccggaatcttccagtctcaggctgtttgttcccccgcggggcaatgcgactgcgcgtcgcttcctgattggccgagagttgcgggctgcgtgcgcaggcgcctacctctgttacttagggcgggagcccggcgagggcgccggtgctttgttctgtctgaggccaggaagtttgaccgcgctgccatgccgaaccgtaaggccagccggaatgcttactatttcttcgtgcaggagaagatccccgaactacggcgacgaggcctgcctgtggctcgcgttgctgatgccatcccttactgctcctcagactgggcgaaacctgttttcacaccactgaggaggccaggcatgcttgtaccaaagcagaatgtttcacctccagatatgtcagctttgtctttaaaaggtgatcaagctctccttggaggcattttttattttttgaacatttttagccatggcgagctacctcctcattgtgaacagcgcttcctcccttgtgaaattggctgtgttaagtattctctccaagaaggtattatggcagatttccacagttttataaatcctggtgaaattccacgaggatttcgatttcattgtcaggctgcaagtgattctagtcacaagattcctatttcaaattttgaacgtgggcataaccaagcaactgtgttacaaaacctttatagatttattcatcccaacccagggaactggccacctatctactgcaagtctgatgatagaaccagagtcaactggtgtttgaagcatatggcaaaggcatcagaaatcaggcaagatctacaacttctcactgtagaggaccttgtagtggggatctaccaacaaaaatttctcaaggagccctctaagacttggattcgaagcctcctagatgtggccatgtgggattattctagcaacacaaggtgcaagtggcatgaagaaaatgatattctcttctgtgctttagctgtttgcaagaagattgcgtactgcatcagtaattctctggccactctctttggaatccagctcacagaggctcatgtaccactacaagattatgaggccagcaatagtgtgacacccaaaatggttgtattggatgcagggcgttaccagaagctaagggttgggagttcaggattctctcatttcaactcttctaatgaggaacaaagatcaaacacacccattggtgactacccatctagggcaaaaatttctggccaaaacagcagcgttcggggaagaggaattacccgcttactagagagcatttccaattcttccagcaatatccacaaattctccaactgtgacacttcactctcaccttacatgtcccaaaaagatggatacaaatctttctcttccttatcttaatgatggtactcttttcaatttctgaaaacagtaacaggcccaacttccttcttactacagtcatattaaacagatcacatcaatgacaaatgtcactactataaaaactacttaatttgtaaggaaattgtttcatagatttaaaaaaattgtggttggagagcatcttggcatttgtgctttttttcttgagggattgttctgcttcctggctgtatgatgggtatatcattaaagtttggagtcctatatgaacaaaactgacatttttagagttgtacttttgggaatgttatagattgatcattctttctcctgataataaaggtattgaatatctgttatgaaaggttct

SEQ ID NO: 150505 - DNA, 1908 bp, Homo sapiens
  Payload ID: 9728
  Gene Symbol: MAEL
  Gene Name: maelstrom spermatogenic transposon silencer
  Uniprot ID: Q96JY0
  ENST ID: ENST00000367872
  CDS Start-End: 245-1549
agagcacttggcacctgcgacggcgctctccccccacctcacccgcaaggcggcacgagccggaatcttccagtctcaggctgtttgttcccccgcggggcaatgcgactgcgcgtcgcttcctgattggccgagagttgcgggctgcgtgcgcaggcgcctacctctgttacttagggcgggagcccggcgagggcgccggtgctttgttctgtctgaggccaggaagtttgaccgcgctgccatgccgaaccgtaaggccagccggaatgcttactatttcttcgtgcaggagaagatccccgaactacggcgacgaggcctgcctgtggctcgcgttgctgatgccatcccttactgctcctcagactgggcgcttctgagggaggaagaaaaggagaaatacgcagaaatggctcgagaatggagggccgctcagggaaaggaccctgggccctcagagaagcagaaacctgttttcacaccactgaggaggccaggcatgcttgtaccaaagcagaatgtttcacctccagatatgtcagctttgtctttaaaaggtgatcaagctctccttggaggcattttttattttttgaacatttttagccatggcgagctacctcctcattgtgaacagcgcttcctcccttgtgaaattggctgtgttaagtattctctccaagaaggtattatggcagatttccacagttttataaatcctggtgaaattccacgaggatttcgatttcattgtcaggctgcaagtgattctagtcacaagattcctatttcaaattttgaacgtgggcataaccaagcaactgtgttacaaaacctttatagatttattcatcccaacccagggaactggccacctatctactgcaagtctgatgatagaaccagagtcaactggtgtttgaagcatatggcaaaggcatcagaaatcaggcaagatctacaacttctcactgtagaggaccttgtagtggggatctaccaacaaaaatttctcaaggagccctctaagacttggattcgaagcctcctagatgtggccatgtgggattattctagcaacacaaggtgcaagtggcatgaagaaaatgatattctcttctgtgctttagctgtttgcaagaagattgcgtactgcatcagtaattctctggccactctctttggaatccagctcacagaggctcatgtaccactacaagattatgaggccagcaatagtgtgacacccaaaatggttgtattggatgcagggcgttaccagaagctaagggttgggagttcaggattctctcatttcaactcttctaatgaggaacaaagatcaaacacacccattggtgactacccatctagggcaaaaatttctggccaaaacagcagcgttcggggaagaggaattacccgcttactagagagcatttccaattcttccagcaatatccacaaattctccaactgtgacacttcactctcaccttacatgtcccaaaaagatggatacaaatctttctcttccttatcttaatgatggtactcttttcaatttctgaaaacagtaacaggcccaacttccttcttactacagtcatattaaacagatcacatcaatgacaaatgtcactactataaaaactacttaatttgtaaggaaattgtttcatagatttaaaaaaattgtggttggagagcatcttggcatttgtgctttttttcttgagggattgttctgcttcctggctgtatgatgggtatatcattaaagtttggagtcctatatgaacaaaactgacatttttagagttgtacttttgggaatgttatagattgatcattctttctcctgataataaaggtattgaatatctgttatgaaaggttctaaaa

SEQ ID NO: 150506 - DNA, 1013 bp, Homo sapiens
  Payload ID: 9728
  Gene Symbol: MAEL
  Gene Name: maelstrom spermatogenic transposon silencer
  ENST ID: ENST00000447624
  CDS Start-End: 66-1013
cgggagcccggcgagggcgccggtgctttgttctgtctgaggccaggaagtttgaccgcgctgccatgccgaaccgtaaggccagccggaatgcttactatttcttcgtgcaggagaagatccccgaactacggcgacgaggcctgcctgtggctcgcgttgctgatgccatcccttactgctcctcagactgggcgaaacctgttttcacaccactgaggaggccaggcatgcttgtaccaaagcagaatgtttcacctccagatatgtcagctttgtctttaaaaggtgatcaagctctccttggaggcattttttattttttgaacatttttagccatggcgagctacctcctcattgtgaacagcgcttcctcccttgtgaaattggctgtgttaagtattctctccaagaaggtattatggcagatttccacagttttataaatcctggtgaaattccacgaggatttcgatttcattgtcaggctgcaagtgattctagtcacaagattcctatttcaaattttgaacgtgggcataaccaagcaactgtgttacaaaacctttatagatttattcatcccaacccagggaactggccacctatctactgcaagtctgatgatagaaccagagtcaactggtgtttgaagcatatggcaaaggcatcagaaatcaggcaagatctacaacttctcactgtagaggaccttgtagtggggatctaccaacaaaaatttctcaaggagccctctaagacttggattcgaagcctcctagatgtggccatgtgggattattctagcaacacaaggtgcaagtggcatgaagaaaatgatattctcttctgtgctttagctgtttgcaagaagattgcgtactgcatcagtaattctctggccactctctttggaatccagctcacagaggctcatgtaccactacaagattatgaggccagcaatagtgtgacacccaaaatggttgtattggatgcagggcgttaccag

SEQ ID NO: 150507 - DNA, 1700 bp, Homo sapiens
  Payload ID: 9728
  Gene Symbol: MAEL
  Gene Name: maelstrom spermatogenic transposon silencer
  ENST ID: ENST00000622874
  CDS Start-End: 206-1342
accgcctcccgcgcctccgccccgccgcccgctgccgcgactgccaaagtttctcggtcacgtgctggcccccggcggcccaaaggagaagatccccgaactacggcgacgaggcctgcctgtggctcgcgttgctgatgccatcccttactgctcctcagactgggcgcttctgagggaggaagaaaaggagaaatacgcagaaatggctcgagaatggagggccgctcagggaaaggaccctgggccctcagagaagcagaaacctgttttcacaccactgaggaggccaggcatgcttgtaccaaagcagaatgtttcacctccagatatgtcagctttgtctttaaaaggtgatcaagctctccttggaggcattttttattttttgaacatttttagccatggcgagctacctcctcattgtgaacagcgcttcctcccttgtgaaattggctgtgttaagtattctctccaagaaggtattatggcagatttccacagttttataaatcctggtgaaattccacgaggatttcgatttcattgtcaggctgcaagtgattctagtcacaagattcctatttcaaattttgaacgtgggcataaccaagcaactgtgttacaaaacctttatagatttattcatcccaacccagggaactggccacctatctactgcaagtctgatgatagaaccagagtcaactggtgtttgaagcatatggcaaaggcatcagaaatcaggcaagatctacaacttctcactgtagaggaccttgtagtggggatctaccaacaaaaatttctcaaggagccctctaagacttggattcgaagcctcctagatgtggccatgtgggattattctagcaacacaaggtgcaagtggcatgaagaaaatgatattctcttctgtgctttagctgtttgcaagaagattgcgtactgcatcagtaattctctggccactctctttggaatccagctcacagaggctcatgtaccactacaagattatgaggccagcaatagtgtgacacccaaaatggttgtattggatgcagggcgttaccagaagctaagggttgggagttcaggattctctcatttcaactcttctaatgaggaacaaagatcaaacacacccattggtgactacccatctagggcaaaaatttctggccaaaacagcagcgttcggggaagaggaattacccgcttactagagagcatttccaattcttccagcaatatccacaaattctccaactgtgacacttcactctcaccttacatgtcccaaaaagatggatacaaatctttctcttccttatcttaatgatggtactcttttcaatttctgaaaacagtaacaggcccaacttccttcttactacagtcatattaaacagatcacatcaatgacaaatgtcactactataaaaactacttaatttgtaaggaaattgtttcatagatttaaaaaaattgtggttggagagcatcttggcatttgtgctttttttcttgagggattgttctgcttcctggctgtatgatgggtatatcattaaagtttggagtcctatatgaacaaaactgacatttttagagttgtacttttgggaatgttatagattgatcattctttctcctgataataaaggtattgaatatctgttatgaaaggttctaaa

SEQ ID NO: 150508 - DNA, 5166 bp, Homo sapiens
  Payload ID: 9729
  Gene Symbol: MRO
  Gene Name: maestro
  Uniprot ID: Q9BYG7
  ENST ID: ENST00000256425
  CDS Start-End: 203-949
attcatattcacccttcatgaggatgagcacagagcaagaagctagccacgctgggctcctcattgcctagctcaggaattcagggctgggaaaatttagccgagtcatcacatttggctactacccgggaaagcagccctcccgagtcaggaacgggctccggttcatcacgtggcagccgcctgcaggagccgcagttccatggaccaaagacagaggagaatcctgggccagcccctttccatccctacttcccagcccaagcagaaaaggacatcaatgatatctttcttttccaaggtctcttggaaactgaggttccagaagcgggagcctctgaagaatgtgtttttcatcttggcagaaagagctcgggaccccagtgctaaaaagcgtcacatggcaatgagaaacttgggaaccatggcctatgaagcccctgacaaggtgagaaagtataagaaaattgtcctcgacctgctggtgtatggactgtatgaccctgtgaatttggaagtcatccatgagagtatgaagactctgaccgtcgttctgggcaagatccaggggaaaggtttgggttccttcttcatagatatcacccttcagaccaggactttattagatgacgagaacgacagtctgagatactcggcctttgttttgtttgggcaattggctgcctttgccgggaggaaatggaaaaaatttttcaccagtcaggttaagcagacacgagattccctcctgatccatttacaggacagaaatccccaggttgccaaggcttgcaaaacaacatttcaagcctgttctccatatctgaaactaaaggaggaatacagcttccagagtgaagaagatcaaaggaacactaagctctaccagcagctgagccactatcatccagagatcctgcagttcttctacgcaaataaaattctgtaagcgcagagcagcagggaaatggttctgtatgagtgcattgctgagccatcatgttcccctgttttatctcactggatgcctcttctcactgcttgcctcttgggattgtaatgggaaagagggtgctgggagagcaatcaaaggcaaaaataatacatggaattgtatgattttatctaaagtaaaattctagactgctttcacttatttcatttcctccccatacaaatttgatgagcaggtacacactttctttaaaacattccaagtgtatatagattcagtgcttatttctcagctttttctttcttaagttcatctctgtcacctagcttttatttttaatactcaatttctgaggcttaggagaatacttgttaccttaagcgtttttttgtttttttgttgttgttgttttgtttttttttagtgtatttgctattgatactttgctattgatacctttacttgccaagatttatttaaagttggccaagataccaagaaggtggcttgcaggggcatctttggcttctcataattttaaacagtcattgctttcaagatcatgctaaacaagaattaatagagagaaaaaaatctataaagcatgtgttgaaaatcctcaggctcatgataacttacgggataacaatagtaggtaacaccgagtgcttacaattcagtgggcacggtcaaagtgctttttgtaagttctatttaatacttgcgacaaccctgagatagtaagtattattattgttctcattttatagatgagaaagctaacacatagggaaattaggtaactttccccagataactcagtaaacagtggagctggaattcaaacatgtacggtctgacttcttgagcccatactcaataatcatgccatcctgcctttccatggaataactgatggatggttagaaatgttaaaaacaaagcaaatgcaaacatctctgcttctgctcctctactaagcccagttaacttttgattttatatgtactaagtatacatttttattaatttatgtgagctgagtgtttttattaattactttttggctattaatgtcaattattttggtgatcaatcctagttatccaaggagtcacatcactcgtaaaaattacaagaaaaatctctaagtccctctcaccctccctctaaccagattgcatcccaagcttctatagaaactctggtaccacccctgaattcagtatccaggccacacccggagcgttttgttcaagacaatttaaaacacgggggattataaaagctatagctggatcttaagtggcattctgagaatgaggaactcaattttctgctgtagctcccagggacagggtggtgtgacacagatgcggggatgaggagagacctaggcgagatgaggatgtgggagatggcagacagagtggcaagtgccaggcaggaatggattttcttccttcctgttctgaatctgaagaacatgacagcaagagattttaggagggacacaggctcacgagcaaatgggtggttctgagctgtaagccccctgcccctccctagcacccactccccggatgctggcctctttgaaattttgttgcaaggttggtttaaacttgatgcagttccattaagtgatcagtgagtggtctgagaaatggctgcatgtggctggcattcaaaaaggtggggatagggtgagatgggtggggttacgtgctctggagtagaaaaacctatgcagttaatgtccctctgtcggttaaaattgtggaagatgcggttggattatttgactttaagattcaatggtaggcttttattttggtggcccccaatgagtcatgcctcctgatactcatgtctttatttagtcccttctgtttgaatctgggctgcctttgtgacttgctttaatcaggagattgtgataaatggcactgtgccgggcatagaaaccctggcagtttcctcgtttgaattgtgggggaagccagctgccacataaggagttgaactaccaggaacaaatgagagtgcctgagatcaccatgtgaaggagaacggagacacccaacccacagcagagtctgaggcccggacacatgacacaagttgtcccttccagccagacccgagctgttgaagctactccagctgacaccatacggaaaagagacgagcgtctccatcaagcctgtgtcagttgcagaagcatgaacaaagaatcaaatgattgttgttttaagtcattaacctttgggataatttgtcacactgcaataagtaaccagagaagattccttattattaactgttgtcttggctaattttgttttgctcttcataagtcctctttgagtttaaattctatttccagaaatttatgttatcatgaaatttggtggcaagagcaagggactatgtttttttgtttgtttgtttctgtttctcaccatacctaccacagagcctggccatgtgattaaggaacatttgctgaatgactaaatgattccaaattgtagagggaataaagtccaatgtccagtctgccatttcaggctttcaaccttcgttttcttctgttactctctttgcttcagacaagtttgggtcctttctcttctctcaacatgtcttgttctcctataccccctcacctttgctcagtctgctatttctgtgttgagtcccctccctgctcacctgtacacacccacctggaatcacatgcacacacacacacacacatttcacgtgtatctcttatctgtactccaatgcctaggtcaaagtcctgatccccccaatcaggggagagctcaagtctctgaattcccagaacattctagcaatattataccacttatatcttatctgaaaagtttttttttgtatatggctttatgtttttttttttatcctgttagattgaaactacagaaggcagggctgtatcttgtacatcattgtatctccccggtgactgcaaaagtactctgtaaatgaatgttgattagggggaaaaatgtcagaaagtcatctgaagctgtcattccttactgggaggagcccattttgacaaatgagggtcaccaatttcattccttataaccaatgtacaggttacttttatgcttgtgcatttcaagtttccccttccccacgtttatctgaatgccaacccaaaggtaatgttttgacatttcttaattttgaacattaattttgaaccttattgagcagttgaatgaaagaaagaaaaaaggaatgttcaagtgccccgaccctcatgctaagtgcccagggtagagctttgcttggtccctgtgtctctggtgctcatgagataggtctttctttctttatttttatttttgagatggagcctcactctgtcacccaggctggagtgcaatgacacgatctcggctcactgcaacctccacctcctgggttcaagcgattctcctgtctcagcctcctgagtagctgggattacaggtgcctgccaccatggctggctaatttttgtgtttttagtagagacggggtttcaccatgttggccaggctggtctcaaactcctgacctcaagtgatctgctcaccttggtctcccaaagtgctgggattacaggcgtgagccaccgctcctggctgagataggtctttcttaaaggggagagggaagtggtggagagagaggagagaaaatgacaaaggaggaggctgagaatctaacaggtgtgaccaattctgctactgaatgagagcagaagcctgtgaacttccagttaatagaccacttaattgggggaacgcttcacacgttataaaaaagcactagaatgttttgaaagcgagaaacaacagctgtgtagggtagctagcagttagtgttgtacagaagacagatatttgtgcatttctgcattttctaagtttgctgcaatgagcatgtattactttcatagttataaaacacatgcaaaatgcccttttaaaatgaaaaaaaagtccatgagtgtaagtgatatatatgctttggaaagcctgggacggtcattgtttactctcaatagtatgtgtttgcctttgtctttttgagacattttgttttaatctgttgatgacaataacctgttgataatataacttgataacaaataaaatgacttatgattgattatcatttta

SEQ ID NO: 150509 - DNA, 951 bp, Homo sapiens
  Payload ID: 9729
  Gene Symbol: MRO
  Gene Name: maestro
  Uniprot ID: Q9BYG7
  ENST ID: ENST00000398439
  CDS Start-End: 159-905
aaaacacctcagcatggcgtggggaagcaaaggaattcagggctgggaaaatttagccgagtcatcacatttggctactacccgggaaagcagccctcccgagtcaggaacgggctccggttcatcacgtggcagccgcctgcaggagccgcagttccatggaccaaagacagaggagaatcctgggccagcccctttccatccctacttcccagcccaagcagaaaaggacatcaatgatatctttcttttccaaggtctcttggaaactgaggttccagaagcgggagcctctgaagaatgtgtttttcatcttggcagaaagagctcgggaccccagtgctaaaaagcgtcacatggcaatgagaaacttgggaaccatggcctatgaagcccctgacaaggtgagaaagtataagaaaattgtcctcgacctgctggtgtatggactgtatgaccctgtgaatttggaagtcatccatgagagtatgaagactctgaccgtcgttctgggcaagatccaggggaaaggtttgggttccttcttcatagatatcacccttcagaccaggactttattagatgacgagaacgacagtctgagatactcggcctttgttttgtttgggcaattggctgcctttgccgggaggaaatggaaaaaatttttcaccagtcaggttaagcagacacgagattccctcctgatccatttacaggacagaaatccccaggttgccaaggcttgcaaaacaacatttcaagcctgttctccatatctgaaactaaaggaggaatacagcttccagagtgaagaagatcaaaggaacactaagctctaccagcagctgagccactatcatccagagatcctgcagttcttctacgcaaataaaattctgtaagcgcagagcagcagggaaatggttctgtatgagtgcattgctgagc

SEQ ID NO: 150510 - DNA, 1657 bp, Homo sapiens
  Payload ID: 9729
  Gene Symbol: MRO
  Gene Name: maestro
  Uniprot ID: Q9BYG7
  ENST ID: ENST00000431965
  CDS Start-End: 150-782
aacgggccttggcagggaggttttgtttggtgcagaggaaaggtccccagaattgccatctgcagaatttctgcagaaagtgtcgaccaggctggcatgagggaagaaggaggggaaatcacagcaaggagaaggaaaaacacctcagcatggcgtggggaagcaaaggaattcagggctgggaaaatttagccgagtcatcacatttggctactacccgggaaagcagccctcccgagtcaggaacgggctccggttcatcacgtggcagccgcctgcaggagccgcaggtctcttggaaactgaggttccagaagcgggagcctctgaagaatgtgtttttcatcttggcagaaagagctcgggaccccagtgctaaaaagcgtcacatggcaatgagaaacttgggaaccatggcctatgaagcccctgacaaggtgagaaagtataagaaaattgtcctcgacctgctggtgtatggactgtatgaccctgtgaatttggaagtcatccatgagagtatgaagactctgaccgtcgttctgggcaagatccaggggaaaggtttgggttccttcttcatagatatcacccttcagaccaggactttattagatgacgcttgcaaaacaacatttcaagcctgttctccatatctgaaactaaaggaggaatacagcttccagagtgaagaagatcaaaggaacactaagctctaccagcagctgagccactatcatccagagatcctgcagttcttctacgcaaataaaattctgtaagcgcagagcagcagggaaatggttctgtatgagtgcattgctgagccatcatgttcccctgttttatctcactggatgcctcttctcactgcttgcctcttgggattgtaatgggaaagagggtgctgggagagcaatcaaaggcaaaaataatacatggaattgtatgattttatctaaagtaaaattctagactgctttcacttatttcatttcctccccatacaaatttgatgagcaggtacacactttctttaaaacattccaagtgtatatagattcagtgcttatttctcagctttttctttcttaagttcatctctgtcacctagcttttatttttaatactcaatttctgaggcttaggagaatacttgttaccttaagcgtttttttgtttttttgttgttgttgttttgtttttttttagtgtatttgctattgatactttgctattgatacctttacttgccaagatttatttaaagttggccaagataccaagaaggtggcttgcaggggcatctttggcttctcataattttaaacagtcattgctttcaagatcatgctaaacaagaattaatagagagaaaaaaatctataaagcatgtgttgaaaatcctcaggctcatgataacttacgggataacaatagtaggtaacaccgagtgcttacaattcagtgggcacggtcaaagtgctttttgtaagttctatttaatacttgcgacaaccctgagatagtaagtattattattgttctcattttatagatgagaaagctaacacatagggaaattaggtaactttccccagataactcagtaaacagtggagctggaattcaaacatgtacggtctgacttcttgag

SEQ ID NO: 150511 - DNA, 1125 bp, Homo sapiens
  Payload ID: 9729
  Gene Symbol: MRO
  Gene Name: maestro
  Uniprot ID: Q9BYG7
  ENST ID: ENST00000436348
  CDS Start-End: 150-938
aacgggccttggcagggaggttttgtttggtgcagaggaaaggtccccagaattgccatctgcagaatttctgcagaaagtgtcgaccaggctggcatgagggaagaaggaggggaaatcacagcaaggagaaggaaaaacacctcagcatggcgtggggaagcaaaggaattcagggctgggaaaatttagccgagtcatcacatttggctactacccgggaaagcagccctcccgagtcaggaacgggctccggttcatcacgtggcagccgcctgcaggagccgcaggtctcttggaaactgaggttccagaagcgggagcctctgaagaatgtgtttttcatcttggcagaaagagctcgggaccccagtgctaaaaagcgtcacatggcaatgagaaacttgggaaccatggcctatgaagcccctgacaaggtgagaaagtataagaaaattgtcctcgacctgctggtgtatggactgtatgaccctgtgaatttggaagtcatccatgagagtatgaagactctgaccgtcgttctgggcaagatccaggggaaaggtttgggttccttcttcatagatatcacccttcagaccaggactttattagatgacgagaacgacagtctgagatactcggcctttgttttgtttgggcaattggctgcctttgccgggaggaaatggaaaaaatttttcaccagtcaggttaagcagacacgagattccctcctgatccatttacaggacagaaatccccaggttgccaaggcttgcaaaacaacatttcaagcctgttctccatatctgaaactaaaggaggaatacagcttccagagtgaagaagatcaaaggaacactaagctctaccagcagctgagccactatcatccagagatcctgcagttcttctacgcaaataaaattctgtaagcgcagagcagcagggaaatggttctgtatgagtgcattgctgagccatcatgttcccctgttttatctcactggatgcctcttctcactgcttgcctcttgggattgtaatgggaaagagggtgctgggagagcaatcaaaggcaaaaataatacatggaattgtatgattttatctaaagtaaaa

SEQ ID NO: 150512 - DNA, 1966 bp, Homo sapiens
  Payload ID: 9729
  Gene Symbol: MRO
  Gene Name: maestro
  Uniprot ID: Q9BYG7
  ENST ID: ENST00000428869
  CDS Start-End: 260-1006
agagatgtttctagattgattcatattcacccttcatgaggatgagcacagagcaagaagctagccacgctgggctcctcattgcctagctcaggaattcagggctgggaaaatttagccgagtcatcacatttggctactacccgggaaagcagccctcccgagtcaggaacgggctccggttcatcacgtggcagccgcctgcaggagccgcagatttttagttcctaatgcatttgggacaactgtttcaagttccatggaccaaagacagaggagaatcctgggccagcccctttccatccctacttcccagcccaagcagaaaaggacatcaatgatatctttcttttccaaggtctcttggaaactgaggttccagaagcgggagcctctgaagaatgtgtttttcatcttggcagaaagagctcgggaccccagtgctaaaaagcgtcacatggcaatgagaaacttgggaaccatggcctatgaagcccctgacaaggtgagaaagtataagaaaattgtcctcgacctgctggtgtatggactgtatgaccctgtgaatttggaagtcatccatgagagtatgaagactctgaccgtcgttctgggcaagatccaggggaaaggtttgggttccttcttcatagatatcacccttcagaccaggactttattagatgacgagaacgacagtctgagatactcggcctttgttttgtttgggcaattggctgcctttgccgggaggaaatggaaaaaatttttcaccagtcaggttaagcagacacgagattccctcctgatccatttacaggacagaaatccccaggttgccaaggcttgcaaaacaacatttcaagcctgttctccatatctgaaactaaaggaggaatacagcttccagagtgaagaagatcaaaggaacactaagctctaccagcagctgagccactatcatccagagatcctgcagttcttctacgcaaataaaattctgtaagcgcagagcagcagggaaatggttctgtatgagtgcattgctgagccatcatgttcccctgttttatctcactggatgcctcttctcactgcttgcctcttgggattgtaatgggaaagagggtgctgggagagcaatcaaaggcaaaaataatacatggaattgtatgattttatctaaagtaaaattctagactgctttcacttatttcatttcctccccatacaaatttgatgagcaggtacacactttctttaaaacattccaagtgtatatagattcagtgcttatttctcagctttttctttcttaagttcatctctgtcacctagcttttatttttaatactcaatttctgaggcttaggagaatacttgttaccttaagcgtttttttgtttttttgttgttgttgttttgtttttttttagtgtatttgctattgatactttgctattgatacctttacttgccaagatttatttaaagttggccaagataccaagaaggtggcttgcaggggcatctttggcttctcataattttaaacagtcattgctttcaagatcatgctaaacaagaattaatagagagaaaaaaatctataaagcatgtgttgaaaatcctcaggctcatgataacttacgggataacaatagtaggtaacaccgagtgcttacaattcagtgggcacggtcaaagtgctttttgtaagttctatttaatacttgcgacaaccctgagatagtaagtattattattgttctcattttatagatgagaaagctaacacatagggaaattaggtaactttccccagataactcagtaaacagtggagctggaattcaaacatgtacggtctgacttcttgagcccatactcaataatcatgccatcctgcctttccatggaataactgatggatggttagaaatgttaaaaacaaagcaaatgcaaa

SEQ ID NO: 150513 - DNA, 866 bp, Homo sapiens
  Payload ID: 9729
  Gene Symbol: MRO
  Gene Name: maestro
  Uniprot ID: Q9BYG7
  ENST ID: ENST00000588444
  CDS Start-End: 77-667
atattcacccttcatgaggatgagcacagagcaagaagctagccacgctgggctcctcattgcctagctcagttccatggaccaaagacagaggagaatcctgggccagcccctttccatccctacttcccagcccaagcagaaaaggacatcaatgatatctttcttttccaaggtctcttggaaactgaggttccagaagcgggagcctctgaagaatgtgtttttcatcttggcagaaagagctcgggaccccagtgctaaaaagcgtcacatggcaatgagaaacttgggaaccatggcctatgaagcccctgacaaggtgagaaagtataagaaaattgtcctcgacctgctggtgtatggactgtatgaccctgtgaatttggaagtcatccatgagagtatgaagactctgaccgtcgttctgggcaagatccaggggaaaggtttgggttccttcttcatagatatcacccttcagaccaggactttattagatgacgcttgcaaaacaacatttcaagcctgttctccatatctgaaactaaaggaggaatacagcttccagagtgaagaagatcaaaggaacactaagctctaccagcagctgagccactatcatccagagatcctgcagttcttctacgcaaataaaattctgtaagcgcagagcagcagggaaatggttctgtatgagtgcattgctgagccatcatgttcccctgttttatctcactggatgcctcttctcactgcttgcctcttgggattgtaatgggaaagagggtgctgggagagcaatcaaaggcaaaaataatacatggaattgtatgattttatctaaagtaaaattctagactgct

SEQ ID NO: 150514 - DNA, 2129 bp, Homo sapiens
  Payload ID: 9729
  Gene Symbol: MRO
  Gene Name: maestro
  ENST ID: ENST00000585524
  CDS Start-End: 105-437
cccagaattgccatctgcagaatttctgcagaaagtgtcgaccaggctggcatgagggaagaaggaggggaaatcacagcaaggagaaggaaaaacacctcagcatggcgtggggaagcaaaggaattcagggctgggaaaatttagccgagtcatcacatttggctactacccgggaaagcagccctcccgagtcaggaacgggctccggttcatcacgtggcagccgcctgcaggagccgcagttccatggaccaaagacagaggagaatcctgggccagcccctttccatccctacttcccagcccaagcagaaaaggacatcaatgatatctttcttttccaaggtctcttggaaactgaggttccagaagcgggagcctctgaagaatgtgtttttcatcttggcagaaagagctcgggaccccagtgctaaaaagcgtcacatggcaatgagaaacttgggaaccatggcctatgaagcccctgacaaggtgagaaagtataagaaaattgtcctcgacctgctggtgtatggactgtatgaccctgtgaatttggaagtcatccatgagagtatgaagactctgaccgtcgttctgggcaagatccaggggaaaggtttgggttccttcttcatagatatcacccttcagaccaggactttattagatgacgagaacgacagtctgagatactcggcctttgttttgtttgggcaattggctgcctttgccgggaggaaatggaaaaaatttttcaccagtcaggttaagcagacacgagattccctcctgatccatttacaggacagaaatccccaggttgccaaggcttgcaaaacaacatttcaagcctgttctccatatctgaaactaaaggaggaatacagcttccagagtgaagaagatcaaaggaacactaagctctaccagcagctgagccactatcatccagagatcctgcagttcttctacgcaaataaaattctgtaagcgcagagcagcagggaaatggttctgtatgagtgcattgctgagccatcatgttcccctgttttatctcactggatgcctcttctcactgcttgcctcttgggattgtaatgggaaagagggtgctgggagagcaatcaaaggcaaaaataatacatggaattgtatgattttatctaaagtaaaattctagactgctttcacttatttcatttcctccccatacaaatttgatgagcaggtacacactttctttaaaacattccaagtgtatatagattcagtgcttatttctcagctttttctttcttaagttcatctctgtcacctagcttttatttttaatactcaatttctgaggcttaggagaatacttgttaccttaagcgtttttttgtttttttgttgttgttgttttgtttttttttagtgtatttgctattgatactttgctattgatacctttacttgccaagatttatttaaagttggccaagataccaagaaggtggcttgcaggggcatctttggcttctcataattttaaacagtcattgctttcaagatcatgctaaacaagaattaatagagagaaaaaaatctataaagcatgtgttgaaaatcctcaggctcatgataacttacgggataacaatagtaggtaacaccgagtgcttacaattcagtgggcacggtcaaagtgctttttgtaagttctatttaatacttgcgacaaccctgagatagtaagtattattattgttctcattttatagatgagaaagctaacacatagggaaattaggtaactttccccagataactcagtaaacagtggagctggaattcaaacatgtacggtctgacttcttgagcccatactcaataatcatgccatcctgcctttccatggaataactgatggatggttagaaatgttaaaaacaaagcaaatgcaaacatctctgcttctgctcctctactaagcccagttaacttttgattttatatgtactaagtatacatttttattaatttatgtgagctgagtgtttttattaattactttttggctattaatgtcaattattttggtgatcaatcctagttatccaaggagtcacatcactcgt

SEQ ID NO: 150515 - DNA, 583 bp, Homo sapiens
  Payload ID: 9729
  Gene Symbol: MRO
  Gene Name: maestro
  ENST ID: ENST00000590988
  CDS Start-End: 122-265
attgccatctgcagaatttctgcagaaagtgtcgaccaggctggcatgagggaagaaggaggggaaatcacagcaaggagaaggaaaaacacctcagcatggcgtggggaagcaaagttccatggaccaaagacagaggagaatcctgggccagcccctttccatccctacttcccagcccaagcagaaaaggacatcaatgatatctttcttttccaagaaagagctcgggaccccagtgctaaaaagcgtcacatggcaatgagaaacttgggaaccatggcctatgaagcccctgacaaggtgagaaagtataagaaaattgtcctcgacctgctggtgtatggactgtatgaccctgtgaatttggaagtcatccatgagagtatgaagactctgaccgtcgttctgggcaagatccaggggaaaggtttgggttccttcttcatagatatcacccttcagaccaggactttattagatgacgcttgcaaaacaacatttcaagcctgttctccatatctgaaactaaaggaggaatacagcttccagagtgaagaagatcaaaggaacactaagctct

SEQ ID NO: 150516 - DNA, 797 bp, Homo sapiens
  Payload ID: 9729
  Gene Symbol: MRO
  Gene Name: maestro
  ENST ID: ENST00000592966
  CDS Start-End: 261-797
ccctcccctgcccaaatactctataaactttgactttcccctcttatttgattctcactttccaacactctgtgccgacccgttatcctggacagaccctgcgtcacctcctaatttcccttcttgtatgttaggaattcagggctgggaaaatttagccgagtcatcacatttggctactacccgggaaagcagccctcccgagtcaggaacgggctccggttcatcacgtggcagccgcctgcaggagccgcagttccatggaccaaagacagaggagaatcctgggccagcccctttccatccctacttcccagcccaagcagaaaaggacatcaatgatatctttcttttccaaggtctcttggaaactgaggttccagaagcgggagcctctgaagaatgtgtttttcatcttggcagaaagagctcgggaccccagtgctaaaaagcgtcacatggcaatgagaaacttgggaaccatggcctatgaagcccctgacaaggtgagaaagtataagaaaattgtcctcgacctgctggtgtatggactgtatgaccctgtgaatttggaagtcatccatgagagtatgaagactctgaccgtcgttctgggcaagatccaggggaaaggtttgggttccttcttcatagatatcacccttcagaccaggactttattagatgacgcttgcaaaacaacatttcaagcctgttctccatatctgaaactaaaggaggaatacagcttccagagtgaagaagatcaaaggaacactaagctctaccagcagctg

SEQ ID NO: 150517 - DNA, 5257 bp, Homo sapiens
  Payload ID: 9729
  Gene Symbol: MRO
  Gene Name: maestro
  Uniprot ID: Q9BYG7
  ENST ID: ENST00000610511
  CDS Start-End: 295-1041
aacgggccttggcagggaggttttgtttggtgcagaggaaaggtccccagaattgccatctgcagaatttctgcagaaagtgtcgaccaggctggcatgagggaagaaggaggggaaatcacagcaaggagaaggaaaaacacctcagcatggcgtggggaagcaaaggaattcagggctgggaaaatttagccgagtcatcacatttggctactacccgggaaagcagccctcccgagtcaggaacgggctccggttcatcacgtggcagccgcctgcaggagccgcagttccatggaccaaagacagaggagaatcctgggccagcccctttccatccctacttcccagcccaagcagaaaaggacatcaatgatatctttcttttccaaggtctcttggaaactgaggttccagaagcgggagcctctgaagaatgtgtttttcatcttggcagaaagagctcgggaccccagtgctaaaaagcgtcacatggcaatgagaaacttgggaaccatggcctatgaagcccctgacaaggtgagaaagtataagaaaattgtcctcgacctgctggtgtatggactgtatgaccctgtgaatttggaagtcatccatgagagtatgaagactctgaccgtcgttctgggcaagatccaggggaaaggtttgggttccttcttcatagatatcacccttcagaccaggactttattagatgacgagaacgacagtctgagatactcggcctttgttttgtttgggcaattggctgcctttgccgggaggaaatggaaaaaatttttcaccagtcaggttaagcagacacgagattccctcctgatccatttacaggacagaaatccccaggttgccaaggcttgcaaaacaacatttcaagcctgttctccatatctgaaactaaaggaggaatacagcttccagagtgaagaagatcaaaggaacactaagctctaccagcagctgagccactatcatccagagatcctgcagttcttctacgcaaataaaattctgtaagcgcagagcagcagggaaatggttctgtatgagtgcattgctgagccatcatgttcccctgttttatctcactggatgcctcttctcactgcttgcctcttgggattgtaatgggaaagagggtgctgggagagcaatcaaaggcaaaaataatacatggaattgtatgattttatctaaagtaaaattctagactgctttcacttatttcatttcctccccatacaaatttgatgagcaggtacacactttctttaaaacattccaagtgtatatagattcagtgcttatttctcagctttttctttcttaagttcatctctgtcacctagcttttatttttaatactcaatttctgaggcttaggagaatacttgttaccttaagcgtttttttgtttttttgttgttgttgttttgtttttttttagtgtatttgctattgatactttgctattgatacctttacttgccaagatttatttaaagttggccaagataccaagaaggtggcttgcaggggcatctttggcttctcataattttaaacagtcattgctttcaagatcatgctaaacaagaattaatagagagaaaaaaatctataaagcatgtgttgaaaatcctcaggctcatgataacttacgggataacaatagtaggtaacaccgagtgcttacaattcagtgggcacggtcaaagtgctttttgtaagttctatttaatacttgcgacaaccctgagatagtaagtattattattgttctcattttatagatgagaaagctaacacatagggaaattaggtaactttccccagataactcagtaaacagtggagctggaattcaaacatgtacggtctgacttcttgagcccatactcaataatcatgccatcctgcctttccatggaataactgatggatggttagaaatgttaaaaacaaagcaaatgcaaacatctctgcttctgctcctctactaagcccagttaacttttgattttatatgtactaagtatacatttttattaatttatgtgagctgagtgtttttattaattactttttggctattaatgtcaattattttggtgatcaatcctagttatccaaggagtcacatcactcgtaaaaattacaagaaaaatctctaagtccctctcaccctccctctaaccagattgcatcccaagcttctatagaaactctggtaccacccctgaattcagtatccaggccacacccggagcgttttgttcaagacaatttaaaacacgggggattataaaagctatagctggatcttaagtggcattctgagaatgaggaactcaattttctgctgtagctcccagggacagggtggtgtgacacagatgcggggatgaggagagacctaggcgagatgaggatgtgggagatggcagacagagtggcaagtgccaggcaggaatggattttcttccttcctgttctgaatctgaagaacatgacagcaagagattttaggagggacacaggctcacgagcaaatgggtggttctgagctgtaagccccctgcccctccctagcacccactccccggatgctggcctctttgaaattttgttgcaaggttggtttaaacttgatgcagttccattaagtgatcagtgagtggtctgagaaatggctgcatgtggctggcattcaaaaaggtggggatagggtgagatgggtggggttacgtgctctggagtagaaaaacctatgcagttaatgtccctctgtcggttaaaattgtggaagatgcggttggattatttgactttaagattcaatggtaggcttttattttggtggcccccaatgagtcatgcctcctgatactcatgtctttatttagtcccttctgtttgaatctgggctgcctttgtgacttgctttaatcaggagattgtgataaatggcactgtgccgggcatagaaaccctggcagtttcctcgtttgaattgtgggggaagccagctgccacataaggagttgaactaccaggaacaaatgagagtgcctgagatcaccatgtgaaggagaacggagacacccaacccacagcagagtctgaggcccggacacatgacacaagttgtcccttccagccagacccgagctgttgaagctactccagctgacaccatacggaaaagagacgagcgtctccatcaagcctgtgtcagttgcagaagcatgaacaaagaatcaaatgattgttgttttaagtcattaacctttgggataatttgtcacactgcaataagtaaccagagaagattccttattattaactgttgtcttggctaattttgttttgctcttcataagtcctctttgagtttaaattctatttccagaaatttatgttatcatgaaatttggtggcaagagcaagggactatgtttttttgtttgtttgtttctgtttctcaccatacctaccacagagcctggccatgtgattaaggaacatttgctgaatgactaaatgattccaaattgtagagggaataaagtccaatgtccagtctgccatttcaggctttcaaccttcgttttcttctgttactctctttgcttcagacaagtttgggtcctttctcttctctcaacatgtcttgttctcctataccccctcacctttgctcagtctgctatttctgtgttgagtcccctccctgctcacctgtacacacccacctggaatcacatgcacacacacacacacacatttcacgtgtatctcttatctgtactccaatgcctaggtcaaagtcctgatccccccaatcaggggagagctcaagtctctgaattcccagaacattctagcaatattataccacttatatcttatctgaaaagtttttttttgtatatggctttatgtttttttttttatcctgttagattgaaactacagaaggcagggctgtatcttgtacatcattgtatctccccggtgactgcaaaagtactctgtaaatgaatgttgattagggggaaaaatgtcagaaagtcatctgaagctgtcattccttactgggaggagcccattttgacaaatgagggtcaccaatttcattccttataaccaatgtacaggttacttttatgcttgtgcatttcaagtttccccttccccacgtttatctgaatgccaacccaaaggtaatgttttgacatttcttaattttgaacattaattttgaaccttattgagcagttgaatgaaagaaagaaaaaaggaatgttcaagtgccccgaccctcatgctaagtgcccagggtagagctttgcttggtccctgtgtctctggtgctcatgagataggtctttctttctttatttttatttttgagatggagcctcactctgtcacccaggctggagtgcaatgacacgatctcggctcactgcaacctccacctcctgggttcaagcgattctcctgtctcagcctcctgagtagctgggattacaggtgcctgccaccatggctggctaatttttgtgtttttagtagagacggggtttcaccatgttggccaggctggtctcaaactcctgacctcaagtgatctgctcaccttggtctcccaaagtgctgggattacaggcgtgagccaccgctcctggctgagataggtctttcttaaaggggagagggaagtggtggagagagaggagagaaaatgacaaaggaggaggctgagaatctaacaggtgtgaccaattctgctactgaatgagagcagaagcctgtgaacttccagttaatagaccacttaattgggggaacgcttcacacgttataaaaaagcactagaatgttttgaaagcgagaaacaacagctgtgtagggtagctagcagttagtgttgtacagaagacagatatttgtgcatttctgcattttctaagtttgctgcaatgagcatgtattactttcatagttataaaacacatgcaaaatgcccttttaaaatgaaaaaaaagtccatgagtgtaagtgatatatatgctttggaaagcctgggacggtcattgtttactctcaatagtatgtgtttgcctttgtctttttgagacattttgttttaatctgttgatgacaataacctgttgataatataacttgataacaaataaaatgacttatgattgattatcatttt

SEQ ID NO: 150518 - DNA, 5183 bp, Homo sapiens
  Payload ID: 9730
  Gene Symbol: MROH1
  Gene Name: maestro heat-like repeat family member 1
  Uniprot ID: Q8NDA8
  ENST ID: ENST00000326134
  CDS Start-End: 58-4983
gatgggagaagaagttgtccatgttcacactgggtgaaggaagctgaaaccacagacatgactgagtcctccatgaagaagctggcctccaccctgctggacgccatcaccgataaggaccccctggtgcaggagcaggtctgcagtgccctgtgctccctcggggaggcgcggccggtggagacgctccgtgcctgcgaggagtatctgcggcagcatgacaagctggcacacccataccgagcagcggtcctgagggccatggagagggtcctgagcagtcgcgccagtgagctggacaaggacacagccagcaccatcatcctcctggcctccagcgagatgaccaagacgaaggacctggtctgggactggcagcaggcggcgagtggcgtcctggtggccgtgggaagacagttcatcagcaaggtgatggaggagctgctgcgcaggctgcaccctgggaccctgccacactgcgccgtgctgcacaccctcgccagcctctcggtggccaacgcgttcggcgtagtccccttcctgccatccgtcctgagctccctgctgcccgtgctgggcgtggccaagcaggacacggtgcgcgtggccttctgctccgctctgcagcgcttcagcgagggtgccctggagtacctagccaacctggaccgagccccagaccccacggtcaggaaggacgcctttgccaccgacatcttcagcgcctacgatgttctcttccatcagtggctgcagagtcgagaagccaagctccgtcttgccgtggtggaggctctggggcctatgagccatctgctgcccagtgagaggctggaagagcagctgcccaagctcctccctgggattctcgccctctacaagaagcacgcagagaccttctacttgtccaagagcctgggccagatcctcgaggcagctgtgagtgtgggcagccgcacactggagacccagctggatgccctcttggctgcactgcactcccagatctgtgtgcctgtggagtcctcaagccccctggtgatgagtaaccagaaggaggtgctgcgctgcttcactgtgctggcctgcagctcgcctgaccgcctactggccttcctgctgcccaggctggacaccagcaatgagaggacccgcgtgggcaccctgcaggtggtcagacatgtcatcaactcagctgctgctcagatggaagataaaaagccctttatcctgtcttccatgaggcttcctctcctggacaccaacagcaaggtgaagcgggcagtggtgcaggtgattagcgccatggcccaccacggctacctggagcagcctggaggtgaggcgatgatcgagtacatcgtgcagcagtgcgcgctgccccccgagcaggagcctgagaagccaggccccggcagcaaggaccccaaggccgacagcgtgcgggccatcagcgtgcgcaccctctacctggtcagcaccaccgtggacaggatgagtcacgtcctctggccatacctgctccagttcctcacccctgtgcgcttcactggggccctgactccgctctgcaggagcctcgtgcatctggcgcagaagaggcaggaggccggggccgacgccttcctcatccagtacgacgcccatgcgagcctcccgtctccctatgctgtaaccggaagactgttggttgtgtcttccagcccctacctaggggacggacgtggggcagcggcgctgcgcctcctcagtgttctgcacccaaacattcaccctttgctgggtcagcattgggaaacgactgtcccgctgctgctggggtacctggatgagcacacagaagagaccctgccacaggaggagtgggaggagaagctgttgatgttcctgcgagacaccctggccatcatttctgacaacgcgtggatctgccagctgagcctggagctgtgcaggcagctgccctgctacgatgaggcaccccaggagaagaacttcctgtacaaatgcataggcaccaccctgggtgctgcttcaagtaaggaggtggtgaggaagcaccttcaagagctgctggagacggccagataccaggaggaggcagaacgcgagggcctcgcctgctgcttcgggatctgtgccatctcccacctcgaggacacgctggcccagctggaggacttcgtgaggtcagaggtcttcagaaaatccattggcattctcaacatttttaaggatcgaagtgagaacgaagtggagaaggtgaagagtgctctgatcctgtgctatgggcacgtggcggcccgggccccccgggagctggtgctggccaaggtagagtcagacatcctccggaacatctgccagcacttcagcaccaaggttctaggaataaaggtagaaaccaaggacccagccctgaagctgtgccttgtccagagtgtgtgcatggtcagccgcgccatctgcagcagcacccaggctggctccttccacttcacccggaaagcagagctggtggcacagatgatggagttcatcagggcagagcccccggactccttgaggacacctattcggaagaaagccatgctcacctgcacttacttggtctccgtggagccagcgctggacgagcaggcccgggcggatgtgatccatggctgcctgcacagcatcatggccctgctgcctgagcccaaggaggaggacggaggctgccagaagtccctgtatctggagacactgcacgcccttgaggatctgctgacgagcctcctgcagcggaacatgaccccccaaggcctgcagatcatgattgagcacctgagcccatggatcaagtccccaagaggtcacgagcgggcgcgggccctgggcctgagcgccctcctgctgcgctacttcctggagcacctgcgtgtcagcgccctggtgcccttccacaacctgggccttctcatcggcctcttctccccacggtgtgcggacctgtggcctgccacccgccaggaggccgtggactgtgtctactccctgctgtacctccagctcggctatgagggcttctcccgggactaccgcgatgacgtggcggagcggctcctcagcctcaaggacggcctcgtgcaccctgaccccgccattctcttccacacctgccacagtgtaggccagattattgccaagcgcctccccccagaccagctcatcagcctcttgctaaccatgtttgaggccctgggagaccccgaaaagaactgctcccgagcagctaccgtcatgatcaactgcctgctgcaggagcggggcggtgtgctccaggagaaggtgcccgagatcgtgagcgtcctgcgctccaagcttcaggaggcccagggagagcacgtcctgccggccgcccagcacagcgtgtacctcctggccacccagcactgcgcagccgtggtgtccagcctcctgggcagccccttgcccttggacagccacacctgcatgctgtggcgggcgctggcggtggagcctcgcctagctgcccaggtcctggggctgctgctggagaagatgagtagggacgtccctttcaaggagagccgggccttcctgctgggccgcaccccagaccgcgtggccacgctgctgcctctctcggctacctgtgcactgtttgaggtcatgtccacgcctgcagcggggcccgcggtgctcgagctctacccccagctgtttgtggtgcttctgctgcgcgtcagctgcaccgtgggtgtccagctgccccggaacctgcaggcccaggaaaggaggggtgccagtccagccctagccaccaggaacctggaaccctgcagctctgcagtggacaccctgcggtccatgctactccgcagcggcagcgaggatgtggtacagcgcatggacctggagggaggctgggaactgctcaggacctcggcggggcatgaggagggggccaccaggttggccagggccatggctgagcacgcagggccccgactccccctggtgctgaagacgctggcatgcacacacagcagtgcgtatgagaaccagagggtgaccaccaccgccttcctggccgagctgctgaacagcaacgtggccaacgacctcatgctcttggactcgctgctggagagcctggcggctcgccagaaggacacatgcgccagcgtgcggaggctggtgctccgcggcctggccaacctggcctccggctgccctgacaaggtgcgaacccacggcccccagctcctcacagccatgattggcgggctggacgacggggacaaccctcacagcccagtggccctggaggccatgctgggccttgcgaggctggtgcacctggtggagtcctgggacctgcgctcagggctgctgcacgtggccatccgcatccggcctttcttcgacagtgagaagatggagttccggacggcatctatccgcctctttgggcaccttaacaaggtctgccacggagactgtgaggacgtcttcctggaccaggtggtgggcgggctggcgcccctgctgctgcacctgcaggaccctcaggccaccgtggccagcgcctgcaggtttgccctgcgcatgtgtggccccaatctggcatgtgaggagctctcagctgctttccagaaacacctgcaggagggccgagccctgcacttcggggagttcctcaacaccacctgcaagcacctgatgcaccatttcccagacctgctgggccgtctcctgaccacctgcctgttctacttcaagagcagctgggagaacgtccgagctgctgcacccctgttcaccgggttcctggtgctgcactcggagcccaggcagcagccgcaggtggacctggaccagctcattgcggcgctccagatcctgctgaaggacccggcccccgaggtgcggacgagggctgctgaggccctgggccgcctggtgaagctcgcctaaggctccggccagcacccccagcgaggagtatgcacccagacctgtgcctgagctccaagacagggcctcctgaggaccacagcctgggcacacgactggaggggcctggccccagaacaggcactgctggggaccaaacccaagcccttcagtgagggatgtgcccaataaactcatctgctcccagcgagtgactgaca

SEQ ID NO: 150519 - DNA, 1712 bp, Homo sapiens
  Payload ID: 9730
  Gene Symbol: MROH1
  Gene Name: maestro heat-like repeat family member 1
  Uniprot ID: Q8NDA8
  ENST ID: ENST00000423230
  CDS Start-End: 98-1366
gggaaggcggcgccccggccgaggtggcggcggctcctcagatgggagaagaagttgtccatgttcacactgggtgaaggaagctgaaaccacagacatgactgagtcctccatgaagaagctggcctccaccctgctggacgccatcaccgataaggaccccctggtgcaggagcaggtctgcagtgccctgtgctccctcggggaggcgcggccggtggagacgctccgtgcctgcgaggagtatctgcggcagcatgacaagctggcacacccataccgagcagcggtcctgagggccatggagagggtcctgagcagtcgcgccagtgagctggacaaggacacagccagcaccatcatcctcctggcctccagcgagatgaccaagacgaaggacctggtctgggactggcagcaggcggcgagtggcgtcctggtggccgtgggaagacagttcatcagcaaggtgatggaggagctgctgcgcaggctgcaccctgggaccctgccacactgcgccgtgctgcacaccctcgccagcctctcggtggccaacgcgttcggcgtagtccccttcctgccatccgtcctgagctccctgctgcccgtgctgggcgtggccaagcaggacacggtgcgcgtggccttctgctccgctctgcagcgcttcagcgagggtgccctggagtacctagccaacctggaccgagccccagaccccacggtcaggaaggacgcctttgccaccgacatcttcagcgcctacgatgttctcttccatcagtggctgcagagtcgagaagccaagctccgtcttgccgtggtggaggctctggggcctatgagccatctgctgcccagtgagaggctggaagagcagctgcccaagctcctccctgggattctcgccctctacaagaagcacgcagagaccttctacttgtccaagagcctgggccagatcctcgaggcagctgtgagtgtgggcagccgcacactggagacccagctggatgccctcttggctgcactgcactcccagatctgtgtgcctgtggagtcctcaagccccctggtgatgagtaaccagaaggaggtgctgcgctgcttcactgtgctggcctgcagctcgcctgaccgcctactggccttcctgctgcccaggctggacaccagcaatgagaggacccgcgtgggcaccctgcaggtggtcagacatgtcatcaactcagctggcagcactaacaccagaataacactgatgttgccatcagcagtcacacgactgaaacatgaggactgccctgcacgtgctgctccgcagcctgctgatctaacggccgcgcccgcgtctgttgcttgagtcaccacggctgttacatcccgtgctctcccttctctgccttcttggtgttggttctgcgggcgactgcccatgtggccctcagccccatcctctgttcatggctctctgccactcttgttgtccaaagctctttctctgtaggttccgtgggaagagctcatgggaacatgatcttcgacctcatgcttgctgatcatagtttattgtgccttttatcgttgatggttttgctggttacaggattcttggctgacatttccttgagtgtcttaagttattccatattcttctggcagagagttgccagatttagcaaaaacaaataaacaggatgccccgaata

SEQ ID NO: 150520 - DNA, 5234 bp, Homo sapiens
  Payload ID: 9730
  Gene Symbol: MROH1
  Gene Name: maestro heat-like repeat family member 1
  Uniprot ID: Q8NDA8
  ENST ID: ENST00000528919
  CDS Start-End: 122-5047
ccaggccacctgcattccttgtctcagagcctccctcctgcatcctccaagccagcagttgtgggatgggagaagaagttgtccatgttcacactgggtgaaggaagctgaaaccacagacatgactgagtcctccatgaagaagctggcctccaccctgctggacgccatcaccgataaggaccccctggtgcaggagcaggtctgcagtgccctgtgctccctcggggaggcgcggccggtggagacgctccgtgcctgcgaggagtatctgcggcagcatgacaagctggcacacccataccgagcagcggtcctgagggccatggagagggtcctgagcagtcgcgccagtgagctggacaaggacacagccagcaccatcatcctcctggcctccagcgagatgaccaagacgaaggacctggtctgggactggcagcaggcggcgagtggcgtcctggtggccgtgggaagacagttcatcagcaaggtgatggaggagctgctgcgcaggctgcaccctgggaccctgccacactgcgccgtgctgcacaccctcgccagcctctcggtggccaacgcgttcggcgtagtccccttcctgccatccgtcctgagctccctgctgcccgtgctgggcgtggccaagcaggacacggtgcgcgtggccttctgctccgctctgcagcgcttcagcgagggtgccctggagtacctagccaacctggaccgagccccagaccccacggtcaggaaggacgcctttgccaccgacatcttcagcgcctacgatgttctcttccatcagtggctgcagagtcgagaagccaagctccgtcttgccgtggtggaggctctggggcctatgagccatctgctgcccagtgagaggctggaagagcagctgcccaagctcctccctgggattctcgccctctacaagaagcacgcagagaccttctacttgtccaagagcctgggccagatcctcgaggcagctgtgagtgtgggcagccgcacactggagacccagctggatgccctcttggctgcactgcactcccagatctgtgtgcctgtggagtcctcaagccccctggtgatgagtaaccagaaggaggtgctgcgctgcttcactgtgctggcctgcagctcgcctgaccgcctactggccttcctgctgcccaggctggacaccagcaatgagaggacccgcgtgggcaccctgcaggtggtcagacatgtcatcaactcagctgctgctcagatggaagataaaaagccctttatcctgtcttccatgaggcttcctctcctggacaccaacagcaaggtgaagcgggcagtggtgcaggtgattagcgccatggcccaccacggctacctggagcagcctggaggtgaggcgatgatcgagtacatcgtgcagcagtgcgcgctgccccccgagcaggagcctgagaagccaggccccggcagcaaggaccccaaggccgacagcgtgcgggccatcagcgtgcgcaccctctacctggtcagcaccaccgtggacaggatgagtcacgtcctctggccatacctgctccagttcctcacccctgtgcgcttcactggggccctgactccgctctgcaggagcctcgtgcatctggcgcagaagaggcaggaggccggggccgacgccttcctcatccagtacgacgcccatgcgagcctcccgtctccctatgctgtaaccggaagactgttggttgtgtcttccagcccctacctaggggacggacgtggggcagcggcgctgcgcctcctcagtgttctgcacccaaacattcaccctttgctgggtcagcattgggaaacgactgtcccgctgctgctggggtacctggatgagcacacagaagagaccctgccacaggaggagtgggaggagaagctgttgatgttcctgcgagacaccctggccatcatttctgacaacgcgtggatctgccagctgagcctggagctgtgcaggcagctgccctgctacgatgaggcaccccaggagaagaacttcctgtacaaatgcataggcaccaccctgggtgctgcttcaagtaaggaggtggtgaggaagcaccttcaagagctgctggagacggccagataccaggaggaggcagaacgcgagggcctcgcctgctgcttcgggatctgtgccatctcccacctcgaggacacgctggcccagctggaggacttcgtgaggtcagaggtcttcagaaaatccattggcattctcaacatttttaaggatcgaagtgagaacgaagtggagaaggtgaagagtgctctgatcctgtgctatgggcacgtggcggcccgggccccccgggagctggtgctggccaaggtagagtcagacatcctccggaacatctgccagcacttcagcaccaaggttctaggaataaaggtagaaaccaaggacccagccctgaagctgtgccttgtccagagtgtgtgcatggtcagccgcgccatctgcagcagcacccaggctggctccttccacttcacccggaaagcagagctggtggcacagatgatggagttcatcagggcagagcccccggactccttgaggacacctattcggaagaaagccatgctcacctgcacttacttggtctccgtggagccagcgctggacgagcaggcccgggcggatgtgatccatggctgcctgcacagcatcatggccctgctgcctgagcccaaggaggaggacggaggctgccagaagtccctgtatctggagacactgcacgcccttgaggatctgctgacgagcctcctgcagcggaacatgaccccccaaggcctgcagatcatgattgagcacctgagcccatggatcaagtccccaagaggtcacgagcgggcgcgggccctgggcctgagcgccctcctgctgcgctacttcctggagcacctgcgtgtcagcgccctggtgcccttccacaacctgggccttctcatcggcctcttctccccacggtgtgcggacctgtggcctgccacccgccaggaggccgtggactgtgtctactccctgctgtacctccagctcggctatgagggcttctcccgggactaccgcgatgacgtggcggagcggctcctcagcctcaaggacggcctcgtgcaccctgaccccgccattctcttccacacctgccacagtgtaggccagattattgccaagcgcctccccccagaccagctcatcagcctcttgctaaccatgtttgaggccctgggagaccccgaaaagaactgctcccgagcagctaccgtcatgatcaactgcctgctgcaggagcggggcggtgtgctccaggagaaggtgcccgagatcgtgagcgtcctgcgctccaagcttcaggaggcccagggagagcacgtcctgccggccgcccagcacagcgtgtacctcctggccacccagcactgcgcagccgtggtgtccagcctcctgggcagccccttgcccttggacagccacacctgcatgctgtggcgggcgctggcggtggagcctcgcctagctgcccaggtcctggggctgctgctggagaagatgagtagggacgtccctttcaaggagagccgggccttcctgctgggccgcaccccagaccgcgtggccacgctgctgcctctctcggctacctgtgcactgtttgaggtcatgtccacgcctgcagcggggcccgcggtgctcgagctctacccccagctgtttgtggtgcttctgctgcgcgtcagctgcaccgtgggtgtccagctgccccggaacctgcaggcccaggaaaggaggggtgccagtccagccctagccaccaggaacctggaaccctgcagctctgcagtggacaccctgcggtccatgctactccgcagcggcagcgaggatgtggtacagcgcatggacctggagggaggctgggaactgctcaggacctcggcggggcatgaggagggggccaccaggttggccagggccatggctgagcacgcagggccccgactccccctggtgctgaagacgctggcatgcacacacagcagtgcgtatgagaaccagagggtgaccaccaccgccttcctggccgagctgctgaacagcaacgtggccaacgacctcatgctcttggactcgctgctggagagcctggcggctcgccagaaggacacatgcgccagcgtgcggaggctggtgctccgcggcctggccaacctggcctccggctgccctgacaaggtgcgaacccacggcccccagctcctcacagccatgattggcgggctggacgacggggacaaccctcacagcccagtggccctggaggccatgctgggccttgcgaggctggtgcacctggtggagtcctgggacctgcgctcagggctgctgcacgtggccatccgcatccggcctttcttcgacagtgagaagatggagttccggacggcatctatccgcctctttgggcaccttaacaaggtctgccacggagactgtgaggacgtcttcctggaccaggtggtgggcgggctggcgcccctgctgctgcacctgcaggaccctcaggccaccgtggccagcgcctgcaggtttgccctgcgcatgtgtggccccaatctggcatgtgaggagctctcagctgctttccagaaacacctgcaggagggccgagccctgcacttcggggagttcctcaacaccacctgcaagcacctgatgcaccatttcccagacctgctgggccgtctcctgaccacctgcctgttctacttcaagagcagctgggagaacgtccgagctgctgcacccctgttcaccgggttcctggtgctgcactcggagcccaggcagcagccgcaggtggacctggaccagctcattgcggcgctccagatcctgctgaaggacccggcccccgaggtgcggacgagggctgctgaggccctgggccgcctggtgaagctcgcctaaggctccggccagcacccccagcgaggagtatgcacccagacctgtgcctgagctccaagacagggcctcctgaggaccacagcctgggcacacgactggaggggcctggccccagaacaggcactgctggggaccaaacccaagcccttcagtgagggatgtgcccaataaactcatctgctcccag

SEQ ID NO: 150521 - DNA, 5092 bp, Homo sapiens
  Payload ID: 9730
  Gene Symbol: MROH1
  Gene Name: maestro heat-like repeat family member 1
  ENST ID: ENST00000534366
  CDS Start-End: 125-5023
tgactggtcatagcgtgccgggcatagcgctggcagggccgccgggagccagccctcactcagccaagatgggagaagaagttgtccatgttcacactgggtgaaggaagctgaaaccacagacatgactgagtcctccatgaagaagctggcctccaccctgctggacgccatcaccgataaggaccccctggtgcaggagcaggtctgcagtgccctgtgctccctcggggaggcgcggccggtggagacgctccgtgcctgcgaggagtatctgcggcagcatgacaagctggcacacccataccgagcagcggtcctgagggccatggagagggtcctgagcagtcgcgccagtgagctggacaaggacacagccagcaccatcatcctcctggcctccagcgagatgaccaagacgaaggacctggtctgggactggcagcaggcggcgagtggcgtcctggtggccgtgggaagacagttcatcagcaaggtgatggaggagctgctgcgcaggctgcaccctgggaccctgccacactgcgccgtgctgcacaccctcgccagcctctcggtggccaacgcgttcggcgtagtccccttcctgccatccgtcctgagctccctgctgcccgtgctgggcgtggccaagcaggacacggtgcgcgtggccttctgctccgctctgcagcgcttcagcgagggtgccctggagtacctagccaacctggaccgagccccagaccccacggtcaggaaggacgcctttgccaccgacatcttcagcgcctacgatgttctcttccatcagtggctgcagagtcgagaagccaagctccgtcttgccgtggtggaggctctggggcctatgagccatctgctgcccagtgagaggctggaagagcagctgcccaagctcctccctgggattctcgccctctacaagaagcacgcagagaccttctacttgtccaagagcctgggccagatcctcgaggcagctgtgagtgtgggcagccgcacactggagacccagctggatgccctcttggctgcactgcactcccagatctgtgtgcctgtggagtcctcaagccccctggtgatgagtaaccagaaggaggtgctgcgctgcttcactgtgctggcctgcagctcgcctgaccgcctactggccttcctgctgcccaggctggacaccagcaatgagaggacccgcgtgggcaccctgcaggtggtcagacatgtcatcaactcagctgctgctcagatggaagataaaaagccctttatcctgtcttccatgaggcttcctctcctggacaccaacagcaaggtgaagcgggcagtggtgcaggtgattagcgccatggcccaccacggctacctggagcagcctggaggtgaggcgatgatcgagtacatcgtgcagcagtgcgcgctgccccccgagcaggagcctgagaagccaggccccggcagcaaggaccccaaggccgacagcgtgcgggccatcagcgtgcgcaccctctacctggtcagcaccaccgtggacaggatgagtcacgtcctctggccatacctgctccagttcctcacccctgtgcgcttcactggggccctgactccgctctgcaggagcctcgtgcatctggcgcagaagaggcaggaggccggggccgacgccttcctcatccagtacgacgcccatgcgagcctcccgtctccctatgctgtaaccggaagactgttggttgtgtcttccagcccctacctaggggacggacgtggggcagcggcgctgcgcctcctcagtgttctgcacccaaacattcaccctttgctgggtcagcattgggaaacgactgtcccgctgctgctggggtacctggatgagcacacagaagagaccctgccacaggaggagtgggaggagaagctgttgatgttcctgcgagacaccctggccatcatttctgacaacgcgtggatctgccagctgagcctggagctgtgcaggcagctgccctgctacgatgaggcaccccaggagaagaacttcctgtacaaatgcataggcaccaccctgggtgctgcttcaagtaaggaggtggtgaggaagcaccttcaagagctgctggagacggccagataccaggaggaggcagaacgcgagggcctcgcctgctgcttcgggatctgtgccatctcccacctcgaggacacgctggcccagctggaggacttcgtgaggtcagaggtcttcagaaaatccattggcattctcaacatttttaaggatcgaagtgagaacgaagtggagaaggtgaagagtgctctgatcctgtgctatgggcacgtggcggcccgggccccccgggagctggtgctggccaaggtagagtcagacatcctccggaacatctgccagcacttcagcaccaaggacccagccctgaagctgtgccttgtccagagtgtgtgcatggtcagccgcgccatctgcagcagcacccaggctggctccttccacttcacccggaaagcagagctggtggcacagatgatggagttcatcagggcagagcccccggactccttgaggacacctattcggaagaaagccatgctcacctgcacttacttggtctccgtggagccagcgctggacgagcaggcccgggcggatgtgatccatggctgcctgcacagcatcatggccctgctgcctgagcccaaggaggaggacggaggctgccagaagtccctgtatctggagacactgcacgcccttgaggatctgctgacgagcctcctgcagcggaacatgaccccccaaggcctgcagatcatgattgagcacctgagcccatggatcaagtccccaagaggtcacgagcgggcgcgggccctgggcctgagcgccctcctgctgcgctacttcctggagcacctgcgtgtcagcgccctggtgcccttccacaacctgggccttctcatcggcctcttctccccacggtgtgcggacctgtggcctgccacccgccaggaggccgtggactgtgtctactccctgctgtacctccagctcggctatgagggcttctcccgggactaccgcgatgacgtggcggagcggctcctcagcctcaaggacggcctcgtgcaccctgaccccgccattctcttccacacctgccacagtgtaggccagattattgccaagcgcctccccccagaccagctcatcagcctcttgctaaccatgtttgaggccctgggagaccccgaaaagaactgctcccgagcagctaccgtcatgatcaactgcctgctgcaggagcggggcggtgtgctccaggagaaggtgcccgagatcgtgagcgtcctgcgctccaagcttcaggaggcccagggagagcacgtcctgccggccgcccagcacagcgtgtacctcctggccacccagcactgcgcagccgtggtgtccagcctcctgggcagccccttgcccttggacagccacacctgcatgctgtggcgggcgctggcggtggagcctcgcctagctgcccaggtcctggggctgctgctggagaagatgagtagggacgtccctttcaaggagagccgggccttcctgctgggccgcaccccagaccgcgtggccacgctgctgcctctctcggctacctgtgcactgtttgaggtcatgtccacgcctgcagcggggcccgcggtgctcgagctctacccccagctgtttgtggtgcttctgctgcgcgtcagctgcaccgtgggtgtccagctgccccggaacctgcaggcccaggaaaggaggggtgccagtccagccctagccaccaggaacctggaaccctgcagctctgcagtggacaccctgcggtccatgctactccgcagcggcagcgaggatgtggtacagcgcatggacctggagggaggctgggaactgctcaggacctcggcggggcatgaggagggggccaccaggttggccagggccatggctgagcacgcagggccccgactccccctggtgctgaagacgctggcatgcacacacagcagtgcgtatgagaaccagagggtgaccaccaccgccttcctggccgagctgctgaacagcaacgtggccaacgacctcatgctcttggactcgctgctggagagcctggcggctcgccagaaggacacatgcgccagcgtgcggaggctggtgctccgcggcctggccaacctggcctccggctgccctgacaaggtgcgaacccacggcccccagctcctcacagccatgattggcgggctggacgacggggacaaccctcacagcccagtggccctggaggccatgctgggccttgcgaggctggtgcacctggtggagtcctgggacctgcgctcagggctgctgcacgtggccatccgcatccggcctttcttcgacagtgagaagatggagttccggacggcatctatccgcctctttgggcaccttaacaaggtctgccacggagactgtgaggacgtcttcctggaccaggtggtgggcgggctggcgcccctgctgctgcacctgcaggaccctcaggccaccgtggccagcgcctgcaggtttgccctgcgcatgtgtggccccaatctggcatgtgaggagctctcagctgctttccagaaacacctgcaggagggccgagccctgcacttcggggagttcctcaacaccacctgcaagcacctgatgcaccatttcccagacctgctgggccgtctcctgaccacctgcctgttctacttcaagagcagctgggagaacgtccgagctgctgcacccctgttcaccgggttcctggtgctgcactcggagcccaggcagcagccgcaggtggacctggaccagctcattgcggcgctccagatcctgctgaaggacccggcccccgaggtgcggacgagggctgctgaggccctgggccgcctggtgaagctcgcctaaggctccggccagcacccccagcgaggagtatgcacccagacctgtgcctgagctccaagacagggcctc

SEQ ID NO: 150522 - DNA, 3673 bp, Homo sapiens
  Payload ID: 9730
  Gene Symbol: MROH1
  Gene Name: maestro heat-like repeat family member 1
  Uniprot ID: Q8NDA8
  ENST ID: ENST00000544576
  CDS Start-End: 1610-3457
cgtgcatctggcgcagaagaggcaggaggccggggccgacgccttcctcatccagtacgacgcccatgcgagcctcccgtctccctatgctgtaaccggaagactgttggttgtgtcttccagcccctacctaggggacggacgtggggcagcggcgctgcgcctcctcagtgttctgcacccaaacattcaccctttgctgggtcagcattgggaaacgactgtcccgctgctgctggggtacctggatgagcacacagaagagaccctgccacaggaggagtgggaggagaagctgttgatgttcctgcgagacaccctggccatcatttctgacaacgcgtggatctgccagctgagcctggagctgtgcaggcagctgccctgctacgatgaggcaccccaggagaagaacttcctgtacaaatgcataggcaccaccctgggtgctgcttcaagtaaggaggtggtgaggaagcaccttcaagagctgctggagacggccagataccaggaggaggcagaacgcgagggcctcgcctgctgcttcgggatctgtgccatctcccacctcgaggacacgctggcccagctggaggacttcgtgaggtcagaggtcttcagaaaatccattggcattctcaacatttttaagattcaggtggtgccgtgcacggctgggtcacacctctgctgtcactgactggctctggcccttcttctgggaggatttcaggagtttctgagccgaggattcccgtcggggagtgtaattgtgtaactgaagtcccgctggttcctctggcctctcaggatcgaagtgagaacgaagtggagaaggtgaagagtgctctgatcctgtgctatgggcacgtggcggcccgggccccccgggagctggtgctggccaaggtagagtcagacatcctccggaacatctgccagcacttcagcaccaaggacccagccctgaagctgtgccttgtccagagtgtgtgcatggtcagccgcgccatctgcagcagcacccaggctggctccttccacttcacccggaaagcagagctggtggcacagatgatggagttcatcagggcagagcccccggactccttgaggacacctattcggaagaaagccatgctcacctgcacttacttggtctccgtggagccagcgctggacgagcaggcccgggcggatgtgatccatggctgcctgcacagcatcatggccctgctgcctgagcccaaggaggaggacggaggctgccagaagtccctgtatctggagacactgcacgcccttgaggatctgctgacgagcctcctgcagcggaacatgaccccccaaggcctgcagatcatgattgagcacctgagcccatggatcaagtccccaagaggtcacgagcgggcgcgggccctgggcctgagcgccctcctgctgcgctacttcctggagcacctgcgtgtcagcgccctggtgcccttccacaacctgggccttctcatcggcctcttctccccacggtgtgcggacctgtggcctgccacccgccaggaggccgtggactgtgtctactccctgctgtacctccagctcggctatgaggattattgccaagcgcctccccccagaccagctcatcagcctcttgctaaccatgtttgaggccctgggagaccccgaaaagaactgctcccgagcagctaccgtcatgatcaactgcctgctgcaggagcggggcggtgtgctccaggagaaggtgcccgagatcgtgagcgtcctgcgctccaagcttcaggaggcccagggagagcacgtcctgccggccgcccagcacagcgtgtacctcctggccacccagcactgcgcagccgtggtgtccagcctcctgggcagccccttgcccttggacagccacacctgcatgctgtggcgggcgctggcggtggagcctcgcctagctgcccaggtcctggggctgctgctggagaagatgagtagggacgtccctttcaaggagagccgggccttcctgctgggccgcaccccagaccgcgtggccacgctgctgcctctctcggctacctgtgcactgtttgaggtcatgtccacgcctgcagcggggcccgcggtgctcgagctctacccccagctgtttgtggtgcttctgctgcgcgtcagctgcaccgtgggtgtccagctgccccggaacctgcaggcccaggaaaggaggggtgccagtccagccctagccaccaggaacctggaaccctgcagctctgcagtggacaccctgcggtccatgctactccgcagcggcagcgaggatgtggtacagcgcatggacctggagggaggctgggaactgctcaggacctcggcggggcatgaggagggggccaccaggttggccagggccatggctgagcacgcagggccccgactccccctggtgctgaagacgctggcatgcacacacagcagtgcgtatgagaaccagagggtgaccaccaccgccttcctggccgagctgctgaacagcaacgtggccaacgacctcatgctcttggactcgctgctggagagcctggcggctcgccagaaggacacatgcgccagcgtgcggaggctggtgctccgcggcctggccaacctggcctccggctgccctgacaaggtgcgaacccacggcccccagctcctcacagccatgattggcgggctggacgacggggacaaccctcacagcccagtggccctggaggccatgctgggccttgcgaggctggtgcacctggtggagtcctgggacctgcgctcagggctgctgcacgtggccatccgcatccggcctttcttcgacagtgagaagatggagttccggacggcatctatccgcctctttgggcaccttaacaaggtctgccacggagactgtgaggacgtcttcctggaccaggtggtgggcgggctggcgcccctgctgctgcacctgcaggaccctcaggccaccgtggccagcgcctgcaggtttgccctgcgcatgtgtggccccaatctggcatgtgaggagctctcagctgctttccagaaacacctgcaggagggccgagccctgcacttcggggagttcctcaacaccacctgcaagcacctgatgcaccatttcccagacctgctgggccgtctcctgaccacctgcctgttctacttcaagagcagctgggagaacgtccgagctgctgcacccctgttcaccggtaagcaccaccccctgccccacccccacgccgcccggcagccccgcctgatgcccccacttcacagggttcctggtgctgcactcggagcccaggcagcagccgcaggtggacctggaccagctcattgcggcgctccagatcctgctgaaggacccggcccccgaggtgcggacgagggctgctgaggccctgggccgcctggtgaagctcgcctaaggctccggccagcacccccagcgaggagtatgcacccagacctgtgcctgagctccaagacagggcctcctgaggaccacagcctgggcacacgactggaggggcctggccccagaacaggcactgctggggaccaaacccaagcccttcagtgagggatgtgcccaataaactcatctgctccc

SEQ ID NO: 150523 - DNA, 5355 bp, Homo sapiens
  Payload ID: 9731
  Gene Symbol: MROH2A
  Gene Name: maestro heat-like repeat family member 2A
  Uniprot ID: A6NES4
  ENST ID: ENST00000389758
  CDS Start-End: 167-5191
attcctataagaaatatgactgaagagcccagctgtctcactttgataaccaattcttccatttgcatttccattgatgtgtattgggccaagagcagagctttttcttgtggttaatatctgtttaatccagaagaagaccctaaggaaagagcttgaggaagagatgactgaagccattacagaagcagcagtagcctcaagtgaggaggtgtcagaggaaagagacgacctggggcctcttgaattacatgacagtggtacctttcaacaagtcgtgaaccttctggacatcattgacagcgagtcagcaaagacggacacaacaggggcaggccttgacatgcggaagaccctggcctcggtgataatcatggagaaggccaccactgagccttctgtagtgataaacactctcatccgctgcctgcaggtgccagagatttccacccagcgcaaggtcaacatttacaacatcctccaggacatcatccagcaggagggggagctggaggagcagtgcgtgcagaggctggtggccattgcctccaaggagatgagggagatcccagagatggagggctatatgaaggcagaggtggccagcgacacactggtggctctgtcccgaaaccacttcagcttggtcatgtacgagctgcagcaccacctcaagcccctcaacctcactgatgaatttgtcatcatcacactggccaagctggccaacggcaatgtgtttgagttcatgccatacatgggcatcaccctggctaccatattcaccatgctgagacttgccaatgaagccaagatacgccaggcgatctgcagtgccatggagaccttctgtgagacggtgcagttttatctgaagcacctggaggagagcgtgtaccccgtgatgactgaggaggagtttgccctgaaggtgttccccatgtatcgctacttcgtgacagtgtggctgaggcactacaaccccgaggtgaagctgggggtgatcaagtccctgaagcccatgctcggcctccttctgcccaacgatgacctgcgggagcaggtctacgactacatccccctgctgctggcggagtaccagggcagtctggaggtgctcttcgtcacgcaggtcttgaggcagatcctggaactgtcagtcaccaccaacacccctgtcccccaaatgcagctacacaccattttcacagaactgcacgtccaggtgtgcaacaaggccccggcccagcatcagtacagcagccagaatctgatggagatggtgcactgcttcgtagcccttgctcgctcctaccccaaggagctgatgaagttcttcttcagccagatggagacaaacaaggaggccgtccgcgtggggactctgaatctgattagggctatagtgagcgcagatgagcccaggatgagtatcagggccatctacctggctatccgggtagtcaagaacaccatctctgatacccggtccaaggtgaggatggctattctccacatcattgggcagttggctctctgtggctaccaggagagaatcaaaggctggggcctgaagtacctgtctgtgcagctgaccttatccacctacaaactgacaaatcgccgggagaagttttatcagagggacttggaggagaggatggtccacaaagtcaccatggacactgtgaagatcattacctcttctgtcagtgggatgaccaccgagttttgggtgaggctgctgtgctacatcatggagacagactacgtggaagctttgactcctatctgtatcagcctcacaaacctggcagaacaccagctccatggccaggatgtggatgtcagcgtggctggcaagagcaggcaagtggacctgcctgcacctcagaagctgctggcccgtctcctggtgctgatgtcatcaccttacaagggggagggtcgtgggatagccatgctcaacctcttgaggaccctgagccagagcatcgcaccctccatggccgacatgtgggagctggagattgcgctactggtccggtacctggaagaacatactgagttcacttgggatcagaaagcctgggaagacaagctgattcagtttctgcgaaactccctcaagaagacccgggggtctagctggagcctgcgcttgagtaaagagctgaacaaccagattgcgagctttgacagcccctctctggagaagggctttctgtaccgggccttgggcttcaccttggccacaggcctggaggccagcaaggtggaggtcctgctgttggagctgctgtacaagacggactacagcaatgactttgacagcgagggtgtgattatgtgctttggcctgtgtgcccggggccaggtaaaaacggtgctgaatgtgcttcatgacttcgaggagaggatccaggagtcagagcagtcctggcagatcagtgcttggcggaaggaccatccctggaggcgggagacagtgaaaagtgccctcatggtgatgtatagctgcgtggcctcctactgccacccccagttgctcctcaacctcgtggacagccccatcaccgctaagatcattcaccattatgtcagcagctgccaggacatctgtctcaaaatggccttcatgaagagtgttgtgcaggttaccaaggccatcaacaacatcaaggacctggaggactttcactttgcccagaagacgactcttaccagcattatagtggcggtcatcaaggcagaaccgactgacaacctggtttctccagtgcgagccttggcgatggaggccctctcgcacctgagcaagctgaagcctttctactccacagaggaaaacagtgagctgatggatatcagcatacattctgtaatttctctccaactcccaggagaggacaatgagtccattaagaccctgtatgcaaatgccctgagctccctggagcagctgatggagagcctcctgcagaggcagctggaccccaaggggctgcaggagatggtgcagctcctggaaaagtggatcttgtcggagaaagaatgggagcgggaaaaggccgtgagcctccatctctatctcatgtggatttatgtccacagcactgctgtctgtatccacctaaagctggggcagtttggcacaatggtcggactcattgccccgtgcacctgtgatgcccatcaaagaacccgcatggcctcaatgaatgtcctgtccagcctgctagatcttcacgcaagccagacctgctccttgtggggcccttccaagcagaaggagcttgagaaatgtaagggggacctccagagcacagatgtggagaagatcttctgtgcatcctccagaatcgccaaggtggtctgcatggagtttagctgcgatgaggtggtctcgctcatccagaagctctgcgagaacactggggccatgaacctgcagcatgacaaggcctctgtcacctggatagccttcttcctccagatgcgggccaaggagctggaggacaaggtggccgagatcctgagtgccatcctggtgcacctgccggtggtggaccacccagaggtgcggcgccttctcattgacggcatcctgctgctggcgcaccaccaccaggagaccatcctcacatcgctcctgaggcagccactgcccatggagagccacctggcagaggtgtggctggcagtgtcggagaacgtgcccttcgcccggaccatgctccacagcctgatgggccggctgcagtcacggctcagccccagaatcagtgccacctccaaggctgacatctggcgcctggctgcggtggaccccctgatgaccctgtgcaccatccaccttctcattcagaagctggatgagaatgacaagctcccggacttcctccctgacctcatctacaccctcctgctgcagcttggaagcagccaccgaccagaggccgccccgccggtcttgaagatgtggaagctggtccacaccactcctctgccggaggagatgaacctgcaaagggtcactatcaagtccatgcagctcttgttcaagagagtcaagagccagcacctggcacataccctggacgagcaggcagtgtgggacctcctgcaggacggcgggacattcctggagggtgtgagcctgctggccaggctgtgcatgcagcacgtggagggccacaggcagaggctggccgagctggtgctcaggggcatggactcagaagtcctgagctgccgcatcagcagcacagcggtctgcttcatgagcggcccagttctgtaccaggagaagctgctgaagccggcagctttgctgctggagaagggtgccgaccaggaggaagacgaggccctgcgggtgctgtccctgcgcgccctcggcaacatggccctgggcgcccccaagaaggtgaagcagtaccggaaggtcttgctggagaagtgcctgggccccctgagggagcccgtgagcaacagcgtgactgccgagggcatggaggccctgaccaagatcctggctgagctccgggaaggggatgtggggtcctctttcgacgccatgtctgagcagtgcaggatcttcttcgacaacgagagcgagctgctgcgtctgaaagccttcatcctctttggaaagctggcaagggtggtcgggatgtccaagaagcatttcttcaaaggggaggtgaagaaggcctggatccccctcatgctgcactcccaggacccctgctccaatgcagcccaagcctgtatggctaccatgtttcagtgtgtgcacttctggggctggaagtccctggagcatccctcagggccaagtgataccgctactgatgacaagatgaccgttttccagacaaccatgtgctccatcctgactcggaaaaagccggctgttctctaccgcttcttgctagaaacaatggcctatgttaaaaataacttgtcaagaatcagaatcgctgcttgcaacttggcaggaattattatgaagcagatgtctacacattatctgaaaaagctggacttcccagcattacggaattccctccaggaactacagctggacccggatcccggggtcaggagggcagccctggagacgctcacagtcttggatagctgtagtcagcatgggtttctggcttcaccccaaggaatgtcctaggtggtccaaacataagacgtaaactgtcttcttagtgccaaatgcaagccctttttaatttagtttgtaagaagtttagtttgtaggaaaaacactattgtaaaataactagtatccttttgtttccttccgttgaaataaacctccactgtcgttggagtaga

SEQ ID NO: 150524 - DNA, 254 bp, Homo sapiens
  Payload ID: 9731
  Gene Symbol: MROH2A
  Gene Name: maestro heat-like repeat family member 2A
  ENST ID: ENST00000430892
  CDS Start-End: 49-254
cgggcagaatccaccctgtagagactgcctctggagcttgaggaagagatgactgaagccattacagaagcagcagtagcctcaagtgaggaggtgtcagaggaaagagacgacctggggcctcttgaattacatgacagtggtacctttcaacaagtcgtgaaccttctggacatcattgacagcgagtcagcaaagacggacacaacaggggcaggccttgacatgcggaagaccctggcctcggtgataat

SEQ ID NO: 150525 - DNA, 252 bp, Homo sapiens
  Payload ID: 9731
  Gene Symbol: MROH2A
  Gene Name: maestro heat-like repeat family member 2A
  ENST ID: ENST00000428446
  CDS Start-End: 47-252
cgggcagaatccaccctgtagagactgcctctggcttgaggaagagatgactgaagccattacagaagcagcagtagcctcaagtgaggaggtgtcagaggaaagagacgacctggggcctcttgaattacatgacagtggtacctttcaacaagtcgtgaaccttctggacatcattgacagcgagtcagcaaagacggacacaacaggggcaggccttgacatgcggaagaccctggcctcggtgataat

SEQ ID NO: 150526 - DNA, 146 bp, Homo sapiens
  Payload ID: 9731
  Gene Symbol: MROH2A
  Gene Name: maestro heat-like repeat family member 2A
  ENST ID: ENST00000454283
  CDS Start-End: 118-146
cgggcagaatccaccctgtagagactgcctctgggtacctttcaacaagtcgtgaaccttctggacatcattgacagcgagtcagcaaagacggacacaacaggggcaggccttgacatgcggaagaccctggcctcggtgataat

SEQ ID NO: 150527 - DNA, 5324 bp, Homo sapiens
  Payload ID: 9731
  Gene Symbol: MROH2A
  Gene Name: maestro heat-like repeat family member 2A
  ENST ID: ENST00000610772
  CDS Start-End: 94-5160
cattgctgtggctgcttgggccacgggagagggaaccttgtgagccgggcagaatccaccctgtagagactgcctctggagcttgaggaagagatgactgaagccattacagaagcagcagtagcctcaagtgaggaggtgtcagaggaaagagacgacctggggcctcttgaattacatgacagtggtacctttcaacaagtcgtgaaccttctggacatcattgacagcgagtcagcaaagacggacacaacaggggcaggccttgacatgcggaagaccctggcctcggtgataatcatggagaaggccaccactgagccttctgtagtgataaacactctcatccgctgcctgcaggtgccagagatttccacccagcgcaaggtcaacatttacaacatcctccaggacatcatccagcaggagggggagctggaggagcagtgcgtgcagaggctggtggccattgcctccaaggagatgagggagatcccagagatggagggctatatgaaggcagaggtggccagcgacacactggtggctctgtcccgaaaccacttcagcttggtcatgtacgagctgcagcaccacctcaagcccctcaacctcactgatgaatttgtcatcatcacactggccaagctggccaacggcaatgtgtttgagttcatgccatacatgggcatcaccctggctaccatattcaccatgctgagacttgccaatgaagccaagatacgccaggcgatctgcagtgccatggagaccttctgtgagacggtgcagttttatctgaagcacctggaggagagcgtgtaccccgtgatgactgaggaggagtttgccctgaaggtgttccccatgtatcgctacttcgtgacagtgtggctgaggcactacaaccccgaggtgaagctgggggtgatcaagtccctgaagcccatgctcggcctccttctgcccaacgatgacctgcgggagcaggtctacgactacatccccctgctgctggcggagtaccagggcaaaggtcacctgccaccatttgccaatccactgcaggtcttgaggcagatcctggaactgtcagtcaccaccaacacccctgtcccccaaatgcagctacacaccattttcacagaactgcacgtccaggtgtgcaacaaggccccggcccagcatcagtacagcagccagaatctgatggagatggtgcactgcttcgtagcccttgctcgctcctaccccaaggagctgatgaagttcttcttcagccagatggagacaaacaaggaggccgtccgcgtggggactctgaatctgattagggctatagtgagcgcagatgagcccaggatgagtatcagggccatctacctggctatccgggtagtcaagaacaccatctctgatacccggtccaaggtgaggatggctattctccacatcattgggcagttggctctctgtggctaccaggagagaatcaaaggctggggcctgaagtacctgtctgtgcagctgaccttatccacctacaaactgacaaatcgccgggagaagttttatcagagggacttggaggagaggatggtccacaaagtcaccatggacactgtgaagatcattacctcttctgtcagtgggatgaccaccgagttttgggtgaggctgctgtgctacatcatggagacagactacgtggaagctttgactcctatctgtatcagcctcacaaacctggcagaacaccagctccatggccaggatgtggatgtcagcgtggctggcaagagcaggcaagtggacctgcctgcacctcagaagctgctggcccgtctcctggtgctgatgtcatcaccttacaagggggagggtcgtgggatagccatgctcaacctcttgaggaccctgagccagagcatcgcaccctccatggccgacatgtgggagctggagattgcgctactggtccggtacctggaagaacatactgagttcacttgggatcagaaagcctgggaagacaagctgattcagtttctgcgaaactccctcaagaagacccgggggtctagctggagcctgcgcttgagtaaagagctgaacaaccagattgcgagctttgacagcccctctctggagaagggctttctgtaccgggccttgggcttcaccttggccacaggcctggaggccagcaaggtggaggtcctgctgttggagctgctgtacaagacggactacagcaatgactttgacagcgagggtgtgattatgtgctttggcctgtgtgcccggggccaggtaaaaacggtgctgaatgtgcttcatgacttcgaggagaggatccaggagtcagagcagtcctggcagatcagtgcttggcggaaggaccatccctggaggcgggagacagtgaaaagtgccctcatggtgatgtatagctgcgtggcctcctactgccacccccagttgctcctcaacctcgtggacagccccatcaccgctaagatcattcaccattatgtcagcagctgccaggacatctgtctcaaaatggccttcatgaagagtgttgtgcaggttaccaaggccatcaacaacatcaaggacctggaggactttcactttgcccagaagacgactcttaccagcattatagtggcggtcatcaaggcagaaccgactgacaacctggtttctccagtgcgagccttggcgatggaggccctctcgcacctgagcaagctgaagcctttctactccacagaggaaaacagtgagctgatggatatcagcatacattctgtaatttctctccaactcccaggagaggacaatgagtccattaagaccctgtatgcaaatgccctgagctccctggagcagctgatggagagcctcctgcagaggcagctggaccccaaggggctgcaggagatggtgcagctcctggaaaagtggatcttgtcggagaaagaatgggagcgggaaaaggccgtgagcctccatctctatctcatgtggatttatgtccacagcactgctgtctgtatccacctaaagctggggcagtttggcacaatggtcggactcattgccccgtgcacctgtgatgcccatcaaagaacccgcatggcctcaatgaatgtcctgtccagcctgctagatcttcacgcaagccagacctgctccttgtggggcccttccaagcagaaggagcttgagaaatgtaagggggacctccagagcacagatgtggagaagatcttctgtgcatcctccagaatcgccaaggtggtctgcatggagtttagctgcgatgaggtggtctcgctcatccagaagctctgcgagaacactggggccatgaacctgcagcatgacaaggcctctgtcacctggatagccttcttcctccagatgcgggccaaggagctggaggacaaggtggccgagatcctgagtgccatcctggtgcacctgccggtggtggaccacccagaggtgcggcgccttctcattgacggcatcctgctgctggcgcaccaccaccaggagaccatcctcacatcgctcctgaggcagccactgcccatggagagccacctggcagaggtgtggctggcagtgtcggagaacgtgcccttcgcccggaccatgctccacagcctgatgggccggctgcagtcacggctcagccccagaatcagtgccacctccaaggctgacatctggcgcctggctgcggtggaccccctgatgaccctgtgcaccatccaccttctcattcagaagctggatgagaatgacaagctcccggacttcctccctgacctcatctacaccctcctgctgcagcttggaagcagccaccgaccagaggccgccccgccggtcttgaagatgtggaagctggtccacaccactcctctgccggaggagatgaacctgcaaaggtgctctcgagggcgggtcactatcaagtccatgcagctcttgttcaagagagtcaagagccagcacctggcacataccctggacgagcaggcagtgtgggacctcctgcaggacggcgggacattcctggagggtgtgagcctgctggccaggctgtgcatgcagcacgtggagggccacaggcagaggctggccgagctggtgctcaggggcatggactcagaagtcctgagctgccgcatcagcagcacagcggtctgcgtggaaatgaggcaccggttcatgagcggcccagttctgtaccaggagaagctgctgaagccggcagctttgctgctggagaagggtgccgaccaggaggaagacgaggccctgcgggtgctgtccctgcgcgccctcggcaacatggccctgggcgcccccaagaaggtgaagcagtaccggaaggtcttgctggagaagtgcctgggccccctgagggagcccgtgagcaacagcgtgactgccgagggcatggaggccctgaccaagatcctggctgagctccgggaaggggatgtggggtcctctttcgacgccatgtctgagcagtgcaggatcttcttcgacaacgagagcgagctgctgcgtctgaaagccttcatcctctttggaaagctggcaagggtggtcgggatgtccaagaagcatttcttcaaaggggaggtgaagaaggcctggatccccctcatgctgcactcccaggacccctgctccaatgcagcccaagcctgtatggctaccatgtttcagtgtgtgcacttctggggctggaagtccctggagcatccctcagggccaagtgataccgctactgatgacaagatgaccgttttccagacaaccatgtgctccatcctgactcggaaaaagccggctgttctctaccgcttcttgctagaaacaatggcctatgttaaaaataacttgtcaagaatcagaatcgctgcttgcaacttggcaggaattattatgaagcagatgtctacacattatctgaaaaagctggacttcccagcattacggaattccctccaggaactacagctggacccggatcccggggtcaggagggcagccctggagacgctcacagtcttggatagctgtagtcagcatgggtttctggcttcaccccaaggaatgtcctaggtggtccaaacataagacgtaaactgtcttcttagtgccaaatgcaagccctttttaatttagtttgtaagaagtttagtttgtaggaaaaacactattgtaaaataactagtatccttttgtttccttccgttgaaataaacctccactgtcgttggagtaga

SEQ ID NO: 150528 - DNA, 5239 bp, Homo sapiens
  Payload ID: 9732
  Gene Symbol: MROH2B
  Gene Name: maestro heat-like repeat family member 2B
  Uniprot ID: Q7Z745
  ENST ID: ENST00000399564
  CDS Start-End: 452-5209
gagttcaccataaagcctttcccaacatcaggacagtaaagcaactactgaaaaccattcctgaatttgtgatcaatggactcaagtttagggagaggagcacctttggtctgcaacaatggtttgaatcccagtctctaattacttctttcccaaatactctggtcaccaaagggacaatatttggtgagatgcagccattttgttggttagcaggagttcagacgcaagacaatgtcatagtggtagaatacagtatcaacttcaacagcaagcccatctctggaagctcccagaccattgtgccaatcaagtggaggaggcactttcatttagagaggcttatgtgaaccttatatgagaaacttgccaacctgcctctttgattttttagccttactatttctaatacttaggtgctatcttttagagaccctgaaacagccaagacatgacacttagtacagaggaatccatagagatgtttggggatattaacctcactcttggcatgctgaacaaggaagatattgttaacaaggaagacatttacagtcatctcacttctgttattcagaatactgacatcttggatgatgcaattgtccaacgattgatttattatgcttctaaggatatgagagacaacaatatgctcagagaaatcagaatgctagctggtgaggttttggtgtctcttgctgcacatgatttcaactctgtgatgtatgaagtacaaagtaacttcaggatcttagagctaccagatgaattcgttgtgcttgccctggctgaattggcaaccagctatgtgtcccagagtattcctttcatgatgatgaccctgctcaccatgcaaaccatgctcaggctggccgaggatgaaaggatgaaggggactttctgtattgcccttgagaaattcagcaaagccatttacaaatatgtcaaccactggagagattttccctaccccagactggatgccaaccgactgtctgacaagatcttcatgctgttctggtatataatggagaagtgggcccctttggcctcacccatgcagactttgagcatcgttaaggcccacgggcccacggtgagcttgctgctgcatcgggaagacttccgtggatacgccctgggccaggtgccctggctcctgaaccagtataaagacaaagagattgatttccatgtcactcagagcctaaaacaaatactgactgcagcagttctttatgacattggccttccaaggagcttgagaagatccatctttatcaatttactccagcagatctgcagagctccagagcctccagtaaaggaaaatgaaatgaaagcttcaagctgttttctcattctagcccattccaatcctggagagctgatggaattttttgatgaacaagtaagaagtaataatgaagccattcgagtgggaatcttgactttgttaagattggctgtcaatgctgatgagcccaggttgagggatcacatcatttcaatagaaagaacagtcaaaatcgtcatgggtgatctcagtacaaaagtaagaaattctgttcttctcctcatccaaaccatgtgtgaaaagtcctatattgaagctcgggaaggatggccattgattgattatgtcttctcccagtttgcaacgttgaacaggaatctggagaaaccagtgaaaactaactttcatgagaatgaaaaggaagaggaatctgtccgagaaacaagccttgaggtcttaaaaaccctggacccactggtcattggaatgcctcaggtgctatggccaaggatcctgacttttgtggtacctgcagaatacacagaagctctggagcccctgtttagtatcatcagaattctgattatggcagaggagaagaagcagcacagtgccaaggagtcgacagcacttgtcgtctctacaggagctgtgaaacttccttcaccacagcagctactggccagacttctggtaatatctatgcctgccagtttaggggagttacgtggggctggtgcaatagggcttttgaagatactgcctgagataattcacccaaaattggtagacctatggaaaacacgtttacctgagcttctgcagcctctggaaggaaagaacatcagtaccgttctatgggaaaccatgctgcttcagttgctcaaagaatccttatggaagatcagtgatgtggcctggaccattcagctgactcaggatttcaaacagcaaatgggcagttacagcaataactccactgagaagaaattcctttggaaagccttgggaaccaccttagcatgctgccaagattcagactttgtaaactcacagattaaggagtttctgactgctcccaaccaactgggggatcaaagacagggaataacatctattttaggatactgtgccgagaaccatttggatattgttttaaaagttcttaaaacattccaaaatcaggaaaagtttttcatgaatcgatgtaagagccttttttctgggaaaaagagcctgaccaagacagatgtcatggtcatctatggagcagtggccctccatgctcccaagaagcaacttctctccagacttaatcaagatatcatatcccaagtcctgtctcttcatggccagtgctctcaggttctgggcatgtctgtgatgaacaaggacatggatctgcaaatgagtttcacaagaagcatcactgagattggcattgctgtccaagatgctgaggatcaggggttccagttttcctacaaggagatgctgattggttacatgctggacttcattagagacgagcccctggattccttagctagccctattcggtggaaagccttaatcgccattaggtatctcagtaaactgaaacctcagctctcactacaagaccaccttaacattcttgaggagaatattcggaggctgctgccccttccacctctggaaaatctgaaaagtgaaggccagacagacaaggacaaggagcacattcaatttctctatgaacgatccatggacgccctaggaaaacttctgaagaccatgatgtgggataatgtgaatgcagaggactgtcaagaaatgtttaatcttctccaaatgtggcttgtttcacaaaaagagtgggaaagagaaagagccttccagatcactgcgaaagtgctgacaaatgatattgaggcaccagagaactttaaaattggttcactgcttggacttctggctcctcactcctgtgataccctgcccaccatccgtcaggcggctgctagctcaactattggtctgttctatataaaaggcattcacttggaagtggaaagactgcagggtttgcaggaagggctggaaagtgatgacgtgcaggttcagatcaagatttcttctaaaatagctaagattgtcagtaagttcatcccaaatgaagaaattctgatgttcctagaggaaatgctggacggtctggagagcctcaaccccacttgtacaaaggcctgtggcatatggatgatcactgtcctgaagcagcagggagctgctctggaagatcagctattggagatcttaggcacaatctaccatcacatgccagtcctcagacaaaaagaagaaagttttcagttcattctagaagccatctcccagatagccagctttcacatggatacagttgttgtcaaccttttacagaagcctctgccttttgacagggacacaaagacattgtggaaggcgctggctgaaaagccagcctccagtgggaaactcttgcaagccttaatagacaaactggagactgagttagaagatgacatcgccagggttgaggcaatttcagtggcctgtgctatgtatgaagtgatctcaatgggcacctctgtcaccggcttgtatccagagctgttcactctcctcctgaagctggttagctgcacactgggccagaagatgctcacttgtccctggagccataggcggcatgtgatgcagcagggagaacagcagcagatcccagacccctgcaggctttcaactgctactttaaaatgtttgcaagcccaagccatgagagaaggccttgcaaaggaatctgatgagggggacaacttatggactctactcagcagtcctagtacccaccacataggcgtatgttcactggccaggagcatggcagtgtggcaacacggagtcatactggacatcatggaacagctgctctcatctcttacctcctcctcggagaactaccggataaccggcgcagctttcttctctgagctcatgaaggaaccaatcctttggaagcatgggaatctgcgaaatgtgctgatcttgatggatcaaagtgcctgggactccaacgccactctgaggcagatggccatccgagggctcggcaacacagcatccggggctcctcacaaggtgaagaaacataagcagttaatgctagaatctatcatcagaggcctgtatcacctagctcgcactgaagtcgtctgtgaaagcttgaaggctctaaaaaaaatcctggagctgctgacagaccgagacgtgagcttctacttcaaggaaatagtgctgcaaacaaggaccttctttgaagatgagcaggatgatgtgagattgactgccatcttcttatttgaggacctggcacccctaacaggaagaaggtggaagattttttttgctgaagaaataaaaaagagcctgatttcattccttctgcacctttgggatcccaaccccaagattggagttgcttgccgtgatgtcttgatggtctgcattccctttttgggcctccaggagctctatggggtattagaccgtctccttgatcaggatctaccaagggccagggatttctacaggcaattctgtgtgaaactggccaagaaaaaccaggaaattctgtggatcctccacacacactccttcaccttcttcaccagcacctgggaggtgatcaggagtgcagctgtcaaactcacagatgccgttgttctcaatttgaccagccaatatgtggagttactagacagagaacaactgaccacacgactccaagcacttcgtcaagatccgtgtattagtgtccagagagcagctgaggctgctttgcaaaccctcctgagaaggtgtaaagagacaagcattcctctgtaagccatcaagaaataaactgctggcttttcc

SEQ ID NO: 150529 - DNA, 3745 bp, Homo sapiens
  Payload ID: 9732
  Gene Symbol: MROH2B
  Gene Name: maestro heat-like repeat family member 2B
  ENST ID: ENST00000506092
  CDS Start-End: 292-3714
atttgtttgctgcctgtacagactttgagcatcgttaaggcccacgggcccacggtgagcttgctgctgcatcgggaagacttccgtggatacgccctgggccaggtgccctggctcctgaaccagtataaagacaaagagattgatttccatgtcactcagtttgcaacgttgaacaggaatctggagaaaccagtgaaaactaactttcatgagaatgaaaaggaagaggaatctgtccgagaaacaagccttgaggtcttaaaaaccctggacccactggtcattggaatgcctcaggtgctatggccaaggatcctgacttttgtggtacctgcagaatacacagaagctctggagcccctgtttagtatcatcagaattctgattatggcagaggagaagaagcagcacagtgccaaggagtcgacagcacttgtcgtctctacaggagctgtgaaacttccttcaccacagcagctactggccagacttctggtaatatctatgcctgccagtttaggggagttacgtggggctggtgcaatagggcttttgaagatactgcctgagataattcacccaaaattggtagacctatggaaaacacgtttacctgagcttctgcagcctctggaaggaaagaacatcagtaccgttctatgggaaaccatgctgcttcagttgctcaaagaatccttatggaagatcagtgatgtggcctggaccattcagctgactcaggatttcaaacagcaaatgggcagttacagcaataactccactgagaagaaattcctttggaaagccttgggaaccaccttagcatgctgccaagattcagactttgtaaactcacagattaaggagtttctgactgctcccaaccaactgggggatcaaagacagggaataacatctattttaggatactgtgccgagaaccatttggatattgttttaaaagttcttaaaacattccaaaatcaggaaaagtttttcatgaatcgatgtaagagccttttttctgggaaaaagagcctgaccaagacagatgtcatggtcatctatggagcagtggccctccatgctcccaagaagcaacttctctccagacttaatcaagatatcatatcccaagtcctgtctcttcatggccagtgctctcaggttctgggcatgtctgtgatgaacaaggacatggatctgcaaatgagtttcacaagaagcatcactgagattggcattgctgtccaagatgctgaggatcaggggttccagttttcctacaaggagatgctgattggttacatgctggacttcattagagacgagcccctggattccttagctagccctattcggtggaaagccttaatcgccattaggtatctcagtaaactgaaacctcagctctcactacaagaccaccttaacattcttgaggagaatattcggaggctgctgccccttccacctctggaaaatctgaaaagtgaaggccagacagacaaggacaaggagcacattcaatttctctatgaacgatccatggacgccctaggaaaacttctgaagaccatgatgtgggataatgtgaatgcagaggactgtcaagaaatgtttaatcttctccaaatgtggcttgtttcacaaaaagagtgggaaagagaaagagccttccagatcactgcgaaagtgctgacaaatgatattgaggcaccagagaactttaaaattggttcactgcttggacttctggctcctcactcctgtgataccctgcccaccatccgtcaggcggctgctagctcaactattggtctgttctatataaaaggcattcacttggaagtggaaagactgcagggtttgcaggaagggctggaaagtgatgacgtgcaggttcagatcaagatttcttctaaaatagctaagattgtcagtaagttcatcccaaatgaagaaattctgatgttcctagaggaaatgctggacggtctggagagcctcaaccccacttgtacaaaggcctgtggcatatggatgatcactgtcctgaagcagcagggagctgctctggaagatcagctattggagatcttaggcacaatctaccatcacatgccagtcctcagacaaaaagaagaaagttttcagttcattctagaagccatctcccagatagccagctttcacatggatacagttgttgtcaaccttttacagaagcctctgccttttgacagggacacaaagacattgtggaaggcgctggctgaaaagccagcctccagtgggaaactcttgcaagccttaatagacaaactggagactgagttagaagatgacatcgccagggttgaggcaatttcagtggcctgtgctatgtatgaagtgatctcaatgggcacctctgtcaccggcttgtatccagagctgttcactctcctcctgaagctggttagctgcacactgggccagaagatgctcacttgtccctggagccataggcggcatgtgatgcagcagggagaacagcagcagatcccagacccctgcaggctttcaactgctactttaaaatgtttgcaagcccaagccatgagagaaggccttgcaaaggaatctgatgagggggacaacttatggactctactcagcagtcctagtacccaccacataggcgtatgttcactggccaggagcatggcagtgtggcaacacggagtcatactggacatcatggaacagctgctctcatctcttacctcctcctcggagaactaccggataaccggcgcagctttcttctctgagctcatgaaggaaccaatcctttggaagcatgggaatctgcgaaatgtgctgatcttgatggatcaaagtgcctgggactccaacgccactctgaggcagatggccatccgagggctcggcaacacagcatccggggctcctcacaaggtgaagaaacataagcagttaatgctagaatctatcatcagaggcctgtatcacctagctcgcactgaagtcgtctgtgaaagcttgaaggctctaaaaaaaatcctggagctgctgacagaccgagacgtgagcttctacttcaaggaaatagtgctgcaaacaaggaccttctttgaagatgagcaggatgatgtgagattgactgccatcttcttatttgaggacctggcacccctaacaggaagaaggtggaagattttttttgctgaagaaataaaaaagagcctgatttcattccttctgcacctttgggatcccaaccccaagattggagttgcttgccgtgatgtcttgatggtctgcattccctttttgggcctccaggagctctatggggtattagaccgtctccttgatcaggatctaccaagggccagggatttctacaggcaattctgtgtgaaactggccaagaaaaaccaggaaattctgtggatcctccacacacactccttcaccttcttcaccagcacctgggaggtgatcaggagtgcagctgtcaaactcacagatgccgttgttctcaatttgaccagccaatatgtggagttactagacagagaacaactgaccacacgactccaagcacttcgtcaagatccgtgtattagtgtccagagagcagctgaggctgctttgcaaaccctcctgagaaggtgtaaagagacaagcattcctctgtaagccatcaagaaataaactgctggcttttcct

SEQ ID NO: 150530 - DNA, 3818 bp, Homo sapiens
  Payload ID: 9733
  Gene Symbol: MROH5
  Gene Name: maestro heat-like repeat family member 5
  ENST ID: ENST00000523857
  CDS Start-End: 82-201
agtgccgtagacagggccggcccacaggcgtgaggccagagttagtggtgagctcctgtgggtctgcactgcaccccaaccatggacaggcagtgttctgaaaggccatacagctgcaccccgacgggtagagtgtcgtcagccgtgtcccaaaactccagccaccggcttcaagatgctgcaggacatgaacagtgctgaccccttccacttgaagtacatcatcaagaagatcaagaacatggctcatggctcccccaagctggtgatggaaaccatccacgactacttcatagacaacccagagatctccagcaggcacaagttccggctgttccagaccctggagatggtcatcggggccagtgacgtcctggaggagacctgggagaaaactttcacacggctcgctctggagaacatgaccaaggccacggagctggaagacatataccaggacgcggccagcaacatgctggtggccatctgcaggcactcgtggcgggtggtggcgcagcatctggagacggagctcctgacgggcgtcttcccacacagaagcctcctctacgtgatgggcgtcctgtcctccagcgtattgcaacagctggacctggacggagccaggatgacagaggaggtcccaggaggtggcccaggacaggtgtgaggctggcacatggccgggcaactccactgccagctgctgcatctgtctcctcccttggtcacacaagaggagctcttcagccaggaagacaaggcctgctgggaagagcaactgatccagatggccatcaagtcagtcccgttcctgagcacggatgtgtggtccaaggagctgctgtggacactcaccacgcccagctggacccaacaggagcagtcccctgagaaggccttcctgtttacctactatgggctaatccttcaagctgaaaaaaatggtgccacggtcaggagacacctgcaagccctcctggaaacatcccaccagtggcccaagcagagggagggcatggctctgaccttggggctggcggccacacgccacctggatgacgtctgggccgtcctggaccagtttggcaggagcaggcccatcagatggagtctccccagctcctccccaaaggtactggctcaggggtcctcagagaccagcaggggtctaggacagcaagacccccaccatctgtgaagaactcggaggacctgcgctggaaatgggccagcagcaccatcctcctggcatacggccaggtggcagccaaagcccgggcccacatcctcccgtgggtggacaacatcgtgtccaggatggtcttctacttccactacagctcttgggacgagaccctgaagcagagcttcctcacagccaccctgatgctgatgggtgcggtgagccggagtgagggcgcccacagctacgagttcttccagacctctgagctcctccagtgtctgatggttttgatggagaaggagccccaggacactctgtgcacgcggagtcgccagcaggccatgcacatcgcgtccagcctctgagcctgtacagcaggaccatggaggcgctggacttcatgctgcaaagcctcatcatgcagaaccccaccgccgacgagctgcatttcctgctgtcggtgaggctgcagggaggccagtcggctggggccgaggggtcctcagcctatggccagactccaaaggagggcatctcagaggagacaaggcgggacctgggggcttcgagtggtccaggaaccaggagggcacctgtacatctggctggcgtcggagaaggcgcatgagcggcagcgggctgtgcacagctgcatgatcctcctcaaattcctgaaccacaatggctacttggacccaaaagaggacttcaaaaggattgggcaattggtgggcatactggggatgctgtgccaggacccagacagggccacccagcgctgcagcctggaaggggcaagccatctctaccagctcttgatgtgccacaaaagagaagctttgcaggcagaatcacaggcccccaaggagctctcccaggcccattcggacggagccccactctggaacagcagagaccagaaggccactcccctgggcccccaggagatggcaaagaaccacatcttccagctctgcagcttccaagtcatcaaggatatcatgcagcagctcacactggcagagttgagcgacctcatctggacggccatcgacggcctgggctccaccagccccttccgcgtgcaggcagcctccgagatgctgctcacagccgtccaggagcacggggccaagctggagatcgtttccagcatggcccaggccatccgcctccgcctgtgctctgtccacatcccgcaagccaaggaaaagaccctgcacgccatcaccctgctggcccggagccacacctgtgagctggtggccaccttcctgaacatctccatccccttggacagccacaccttccagctgtggagggccctgggggctgggcagcccacgagccacctggtgctgaccacactgctggcctgtctgcaggagcgacccctgcccaccggtgccagcgacagcagcccctgccccaaggagaagacctacctgcgtttgctggctgccatgaacatgctgcacgagctgcagtttgcccgggagttcaagcaggccgtgcaggagggctaccccaagctcttcctggccctcctcacccagatgcactatgtcttggagctgaacctgcccagcgagccctagcccaagcagcaggcccaggaggcggccgtgcccagcccccaaagctgcagcacgtcactggaggcactgaagagcctgctgtccaccacggggcactggcatgactttgcccacctggagctgcagggatcctgggagctcttcaccaccatccacacctacccgaagggcgtgggcctccttgccagggccatggtgcagaaccactgcaggcagatcccagcggtgctgcgtcagctgctgcccagcctgcagagcccacaggagcgtgagaggaaggtggccatcctcatcctcaccaagttcctctacagccctgtcctgctggaggtgcttcccaaacaagctgccttgaccgtgctggcacaaggcctccacgaccccagccctgaggtccgcgtgttgagtctgcagggcctaagcaacatcctcttccacccagataaggagcgggacgggattcgggcggcagccatggcactgttcggggacctggtggcggccatggcagacagggagctgagcggcctgcggacccaggtgcaccagagcatggtgcccctgctcctacacctgaaggaccaatgcccagctgtcgccacgcaggccaagttcaccttctaccgctgtgctgtgctgctccgctggcggctactgcacaccctcttctgcacgctggcctgggagaggggcctcagcgcccgccacttcctctggacctgcctggccacaccatctgctaccacccccaggccgtgttccagatgctgaatgctgtggacaccaacctgctgttccgcacttttgaacatctcagaagtgaccctgagcccagcatccgggaattcgccaccagccagctctccttcctccagaaggtgtcggccagacccaagcagtgacctccagccatcctcccccacccaccgccttcccctcccgtgtccacctggtcagccctgccccatccgccccccacagagcttggttgcataacgtttttccatttgaaagaaagatctagattcaac

SEQ ID NO: 150531 - DNA, 3830 bp, Homo sapiens
  Payload ID: 9733
  Gene Symbol: MROH5
  Gene Name: maestro heat-like repeat family member 5
  ENST ID: ENST00000521053
  CDS Start-End: 82-201
agtgccgtagacagggccggcccacaggcgtgaggccagagttagtggtgagctcctgtgggtctgcactgcaccccaaccatggacaggcagtgttctgaaaggccatacagctgcaccccgacgggtagagtgtcgtcagccgtgtcccaaaactccagccaccggcttcaagatgctgcaggacatgaacagtgctgaccccttccacttgaagtacatcatcaagaagatcaagaacatggctcatggctcccccaagctggtgatggaaaccatccacgactacttcatagacaacccagagatctccagcaggcacaagttccggctgttccagaccctggagatggtcatcggggccagtgacgtcctggaggagacctgggagaaaactttcacacggctcgctctggagaacatgaccaaggccacggagctggaagacatataccaggacgcggccagcaacatgctggtggccatctgcaggcactcgtggcgggtggtggcgcagcatctggagacggagctcctgacgggcgtcttcccacacagaagcctcctctacgtgatgggcgtcctgtcctccagcgaggagctcttcagccaggaagacaaggcctgctgggaagagcaactgatccagatggccatcaagtcagtcccgttcctgagcacggatgtgtggtccaaggagctgctgtggacactcaccacgcccagctggacccaacaggagcagtcccctgagaaggccttcctgtttacctactatgggctaatccttcaagctgaaaaaaatggtgccacggtcaggagacacctgcaagccctcctggaaacatcccaccagtggcccaagcagagggagggcatggctctgaccttggggctggcggccacacgccacctggatgacgtctgggccgtcctggaccagtttggcaggagcaggcccatcagatggagtctccccagctcctccccaaaggtactggctcaggggtcctcagagaccagcaggggtctaggacagcaagacccccaccatctgtgaagaactcggaggacctgcgctggaaatgggccagcagcaccatcctcctggcatacggccaggtggcagccaaagcccgggcccacatcctcccgtgggtggacaacatcgtgtccaggatggtcttctacttccactacagctcttgggacgagaccctgaagcagagcttcctcacagccaccctgatgctgatgggtgcggtgagccggagtgagggcgcccacagctacgagttcttccagacctctgagctcctccagtgtctgatggttttgatggagaaggagccccaggacactctgtgcacgcggagtcgccagcaggccatgcacatcgcgtccagcctctgagcctgtacagcaggaccatggaggcgctggacttcatgctgcaaagcctcatcatgcagaaccccaccgccgacgagctgcatttcctgctgtcgcacctgtacatctggctggcgtcggagaaggcgcatgagcggcagcgggctgtgcacagctgcatgatcctcctcaaattcctgaaccacaatggctacttggacccaaaagaggacttcaaaaggattgggcaattggtgggcatactggggatgctgtgccaggacccagacagggccacccagcgctgcagcctggaaggggcaagccatctctaccagctcttgatgtgccacaaaacaggagaagctttgcaggcagaatcacaggcccccaaggagctctcccaggcccattcggacggagccccactctggaacagcagagaccagaaggccactcccctgggcccccaggagatggcaaagaaccacatcttccagctctgcagcttccaagtcatcaaggatatcatgcagcagctcacactggcagagttgagcgacctcatctggacggccatcgacggcctgggctccaccagccccttccgcgtgcaggcagcctccgagatgctgctcacagccgtccaggagcacggggccaagctggagatcgtttccagcatggcccaggccatccgcctccgcctgtgctctgtccacatcccgcaagccaaggaaaagaccctgcacgccatcaccctgctggcccggagccacacctgtgagctggtggccaccttcctgaacatctccatccccttggacagccacaccttccagctgtggagggccctgggggctgggcagcccacgagccacctggtgctgaccacactgctggcctgtctgcaggagcgacccctgcccaccggtgccagcgacagcagcccctgccccaaggagaagacctacctgcgtttgctggctgccatgaacatgctgcacgagctgcagtttgcccgggagttcaagcaggccgtgcaggagggctaccccaagctcttcctggccctcctcacccagatgcactatgtcttggagctgaacctgcccagcgagccctagcccaagcagcaggcccaggaggcggccgtgcccagcccccaaagctgcagcacgtcactggaggcactgaagagcctgctgtccaccacggggcactggcatgactttgcccacctggagctgcagggatcctgggagctcttcaccaccatccacacctacccgaagggcgtgggcctccttgccagggccatggtgcagaaccactgcaggcagatcccagcggtgctgcgtcagctgctgcccagcctgcagagcccacaggagcgtgagaggaaggtggccatcctcatcctcaccaagttcctctacagccctgtcctgctggaggtgcttcccaaacaagctgccttgaccgtgctggcacaaggcctccacgaccccagccctgaggtccgcgtgttgagtctgcagggcctaagcaacatcctcttccacccagataagggaagcctgctccagggacagctgcggcccttgctcgacggcttcttccagagcagcgaccaggtgatcgtgtgcatcatgggcaccgtgtcagacacgctgcaccgcctgggcgcgcagggcacagggagtcagagcctcggcgttgccatcagcacacgctccttctttaatgacgagcgggacgggattcgggcggcagccatggcactgttcggggacctggtggcggccatggcagacagggagctgagcggcctgcggacccaggtgcaccagagcatggtgcccctgctcctacacctgaaggaccaatgcccagctgtcgccacgcaggccaagttcaccttctaccgctgtgctgtgctgctccgctggcggctactgcacaccctcttctgcacgctggcctgggagaggggcctcagcgcccgccacttcctctggacctgcctgatgacccgcagccaggaggaattcagcatccacttgtcacaggccctcagctacctgcacagccactcctgccacatcaagacctgggtgacactcttcataggccacaccatctgctaccacccccaggccgtgttccagatgctgaatgctgtggacaccaacctgctgttccgcacttttgaacatctcagaagtgaccctgagcccagcatccgggaattcgccaccagccagctctccttcctccagaaggtgtcggccagacccaagcagtgacctccagccatcctcccccacccaccgccttcccctcccgtgtccacctggtcagccctgccccatccgccccccacagagcttggttgcataacgtttttccatttgaaagaaagatctagattcaac

SEQ ID NO: 150532 - DNA, 613 bp, Homo sapiens
  Payload ID: 9733
  Gene Symbol: MROH5
  Gene Name: maestro heat-like repeat family member 5
  ENST ID: ENST00000521161
  CDS Start-End: 284-613
ctcagaacctgacacttgcacggaggccaggccgcaccaggcctacaggtgatgctgcctactcaacagtgtccttgaggcctcgagacccctgccctcctcccagggcccagccagtccattgaatggaaggacaaacacatggaaggatgcagctgagcccgatggaagtcaatgctgcgctcagcaccccctgtactaacgcagaaatatacacgcactcagatgccaacacccagggcccctcctccatttcagaatctccccccctgtctccacatccatgaaggactcatcttgcatgaaggtacaccaggactctgcccgcagggacagatggtcacaccccaccaccatcctgcttcacaagtcgcagagcagccaggccacactgatgctacaggagcacaggatgttcatgggggaagcctacagtgcagccaccggcttcaagatgctgcaggacatgaacagtgctgaccccttccacttgaagtacatcatcaagaagatcaagaacatggctcatggctcccccaagctggtgatggaaaccatccacgactacttcatagacaacccagagatctccagcaggcacaagttccggctg

SEQ ID NO: 150533 - DNA, 4164 bp, Homo sapiens
  Payload ID: 9733
  Gene Symbol: MROH5
  Gene Name: maestro heat-like repeat family member 5
  ENST ID: ENST00000430863
  CDS Start-End: 82-4038
agtgccgtagacagggccggcccacaggcgtgaggccagagttagtggtgagctcctgtgggtctgcactgcaccccaaccatggacaggcagtgttctgaaaggccatacagctgcaccccgacgggtagagtgtcgtcagccgtgtcccaaaactccagaatctccccccctgtctccacatccatgaaggactcatcttgcatgaaggtacaccaggactctgcccgcagggacagatggtcacaccccaccaccatcctgcttcacaagtcgcagagcagccaggccacactgatgctacaggagcacaggatgttcatgggggaagcctacagtgcagccaccggcttcaagatgctgcaggacatgaacagtgctgaccccttccacttgaagtacatcatcaagaagatcaagaacatggctcatggctcccccaagctggtgatggaaaccatccacgactacttcatagacaacccagagatctccagcaggcacaagttccggctgttccagaccctggagatggtcatcggggccagtgacgtcctggaggagacctgggagaaaactttcacacggctcgctctggagaacatgaccaaggccacggagctggaagacatataccaggacgcggccagcaacatgctggtggccatctgcaggcactcgtggcgggtggtggcgcagcatctggagacggagctcctgacgggcgtcttcccacacagaagcctcctctacgtgatgggcgtcctgtcctccagcgaggagctcttcagccaggaagacaaggcctgctgggaagagcaactgatccagatggccatcaagtcagtcccgttcctgagcacggatgtgtggtccaaggagctgctgtggacactcaccacgcccagctggacccaacaggagcagtcccctgagaaggccttcctgtttacctactatgggctaatccttcaagctgaaaaaaatggtgccacggtcaggagacacctgcaagccctcctggaaacatcccaccagtggcccaagcagagggagggcatggctctgaccttggggctggcggccacacgccacctggatgacgtctgggccgtcctggaccagtttggcaggagcaggcccatcagatggagtctccccagctcctccccaaagaactcggaggacctgcgctggaaatgggccagcagcaccatcctcctggcatacggccaggtggcagccaaagcccgggcccacatcctcccgtgggtggacaacatcgtgtccaggatggtcttctacttccactacagctcttgggacgagaccctgaagcagagcttcctcacagccaccctgatgctgatgggtgcggtgagccggagtgagggcgcccacagctacgagttcttccagacctctgagctcctccagtgtctgatggttttgatggagaaggagccccaggacactctgtgcacgcggagtcgccagcaggccatgcacatcgcgtccagcctctgcaagctgaggcctcccatagacttggaaaggaagtctcagctcctgtccacctgcttccgcagcgtgtttgccctgccactgctggatgccctggagaagcacacctgcctctttctggagcctcccaacatccagctgtggcccgtggctcgggagcgggcaggctggacgcaccagggctggggacccagggcagttcttcactgctctgagcacctacagagcctgtacagcaggaccatggaggcgctggacttcatgctgcaaagcctcatcatgcagaaccccaccgccgacgagctgcatttcctgctgtcgcacctgtacatctggctggcgtcggagaaggcgcatgagcggcagcgggctgtgcacagctgcatgatcctcctcaaattcctgaaccacaatggctacttggacccaaaagaggacttcaaaaggattgggcaattggtgggcatactggggatgctgtgccaggacccagacagggccacccagcgctgcagcctggaaggggcaagccatctctaccagctcttgatgtgccacaaaacaggagaagctttgcaggcagaatcacaggcccccaaggagctctcccaggcccattcggacggagccccactctggaacagcagagaccagaaggccactcccctgggcccccaggagatggcaaagaaccacatcttccagctctgcagcttccaagtcatcaaggatatcatgcagcagctcacactggcagagttgagcgacctcatctggacggccatcgacggcctgggctccaccagccccttccgcgtgcaggcagcctccgagatgctgctcacagccgtccaggagcacggggccaagctggagatcgtttccagcatggcccaggccatccgcctccgcctgtgctctgtccacatcccgcaagccaaggaaaagaccctgcacgccatcaccctgctggcccggagccacacctgtgagctggtggccaccttcctgaacatctccatccccttggacagccacaccttccagctgtggagggccctgggggctgggcagcccacgagccacctggtgctgaccacactgctggcctgtctgcaggagcgacccctgcccaccggtgccagcgacagcagcccctgccccaaggagaagacctacctgcgtttgctggctgccatgaacatgctgcacgagctgcagtttgcccgggagttcaagcaggccgtgcaggagggctaccccaagctcttcctggccctcctcacccagatgcactatgtcttggagctgaacctgcccagcgagccctagcccaagcagcaggcccaggaggcggccgtgcccagcccccaaagctgcagcacgtcactggaggcactgaagagcctgctgtccaccacggggcactggcatgactttgcccacctggagctgcagggatcctgggagctcttcaccaccatccacacctacccgaagggcgtgggcctccttgccagggccatggtgcagaaccactgcaggcagatcccagcggtgctgcgtcagctgctgcccagcctgcagagcccacaggagcgtgagaggaaggtggccatcctcatcctcaccaagttcctctacagccctgtcctgctggaggtgcttcccaaacaagctgccttgaccgtgctggcacaaggcctccacgaccccagccctgaggtccgcgtgttgagtctgcagggcctaagcaacatcctcttccacccagataagggaagcctgctccagggacagctgcggcccttgctcgacggcttcttccagagcagcgaccaggtgatcgtgtgcatcatgggcaccgtgtcagacacgctgcaccgcctgggcgcgcagggcacagggagtcagagcctcggcgttgccatcagcacacgctccttctttaatgacgagcgggacgggattcgggcggcagccatggcactgttcggggacctggtggcggccatggcagacagggagctgagcggcctgcggacccaggtgcaccagagcatggtgcccctgctcctacacctgaaggaccaatgcccagctgtcgccacgcaggccaagttcaccttctaccgctgtgctgtgctgctccgctggcggctactgcacaccctcttctgcacgctggcctgggagaggggcctcagcgcccgccacttcctctggacctgcctgatgacccgcagccaggaggaattcagcatccacttgtcacaggccctcagctacctgcacagccactcctgccacatcaagacctgggtgacactcttcataggccacaccatctgctaccacccccaggccgtgttccagatgctgaatgctgtggacaccaacctgctgttccgcacttttgaacatctcagaagtgaccctgagcccagcatccgggaattcgccaccagccagctctccttcctccagaaggtgtcggccagacccaagcagtgacctccagccatcctcccccacccaccgccttcccctcccgtgtccacctggtcagccctgccccatccgccccccacagagcttggttgcataacgtttttccatttgaaagaaagatctagattc

SEQ ID NO: 150534 - DNA, 4164 bp, Homo sapiens
  Payload ID: 9733
  Gene Symbol: MROH5
  Gene Name: maestro heat-like repeat family member 5
  ENST ID: ENST00000621837
  CDS Start-End: 82-4035
agtgccgtagacagggccggcccacaggcgtgaggccagagttagtggtgagctcctgtgggtctgcactgcaccccaaccatggacaggcagtgttctgaaaggccatacagctgcaccccgacgggtagagtgtcgtcagccgtgtcccaaaactccagaatctccccccctgtctccacatccatgaaggactcatcttgcatgaaggtacaccaggactctgcccgcagggacagatggtcacaccccaccaccatcctgcttcacaagtcgcagagcagccaggccacactgatgctacaggagcacaggatgttcatgggggaagcctacagtgcagccaccggcttcaagatgctgcaggacatgaacagtgctgaccccttccacttgaagtacatcatcaagaagatcaagaacatggctcatggctcccccaagctggtgatggaaaccatccacgactacttcatagacaacccagagatctccagcaggcacaagttccggctgttccagaccctggagatggtcatcggggccagtgacgtcctggaggagacctgggagaaaactttcacacggctcgctctggagaacatgaccaaggccacggagctggaagacatataccaggacgcggccagcaacatgctggtggccatctgcaggcactcgtggcgggtggtggcgcagcatctggagacggagctcctgacgggcgtcttcccacacagaagcctcctctacgtgatgggcgtcctgtcctccagcgaggagctcttcagccaggaagacaaggcctgctgggaagagcaactgatccagatggccatcaagtcagtcccgttcctgagcacggatgtgtggtccaaggagctgctgtggacactcaccacgcccagctggacccaacaggagcagtcccctgagaaggccttcctgtttacctactatgggctaatccttcaagctgaaaaaaatggtgccacggtcaggagacacctgcaagccctcctggaaacatcccaccagtggcccaagcagagggagggcatggctctgaccttggggctggcggccacacgccacctggatgacgtctgggccgtcctggaccagtttggcaggagcaggcccatcagatggagtctccccagctcctccccaaagaactcggaggacctgcgctggaaatgggccagcagcaccatcctcctggcatacggccaggtggcagccaaagcccgggcccacatcctcccgtgggtggacaacatcgtgtccaggatggtcttctacttccactacagctcttgggacgagaccctgaagcagagcttcctcacagccaccctgatgctgatgggtgcggtgagccggagtgagggcgcccacagctacgagttcttccagacctctgagctcctccagtgtctgatggttttgatggagaaggagccccaggacactctgtgcacgcggagtcgccagcaggccatgcacatcgcgtccagcctctgcaagctgaggcctcccatagacttggaaaggaagtctcagctcctgtccacctgcttccgcagcgtgtttgccctgccactgctggatgccctggagaagcacacctgcctctttctggagcctcccaacatccagctgtggcccgtggctcgggagcgggcaggctggacgcaccagggctggggacccagggcagttcttcactgctctgagcacctacagagcctgtacagcaggaccatggaggcgctggacttcatgctgcaaagcctcatcatgcagaaccccaccgccgacgagctgcatttcctgctgtcgcacctgtacatctggctggcgtcggagaaggcgcatgagcggcagcgggctgtgcacagctgcatgatcctcctcaaattcctgaaccacaatggctacttggacccaaaagaggacttcaaaaggattgggcaattggtgggcatactggggatgctgtgccaggacccagacagggccacccagcgctgcagcctggaaggggcaagccatctctaccagctcttgatgtgccacaaaacaggagaagctttgcaggcagaatcacaggcccccaaggagctctcccaggcccattcggacggagccccactctggaacagcagagaccagaaggccactcccctgggcccccaggagatggcaaagaaccacatcttccagctctgcagcttccaagtcatcaaggatatcatgcagcagctcacactggcagagttgagcgacctcatctggacggccatcgacggcctgggctccaccagccccttccgcgtgcaggcagcctccgagatgctgctcacagccgtccaggagcacggggccaagctggagatcgtttccagcatggcccaggccatccgcctccgcctgtgctctgtccacatcccgcaagccaaggaaaagaccctgcacgccatcaccctgctggcccggagccacacctgtgagctggtggccaccttcctgaacatctccatccccttggacagccacaccttccagctgtggagggccctgggggctgggcagcccacgagccacctggtgctgaccacactgctggcctgtctgcaggagcgacccctgcccaccggtgccagcgacagcagcccctgccccaaggagaagacctacctgcgtttgctggctgccatgaacatgctgcacgagctgcagtttgcccgggagttcaagcaggccgtgcaggagggctaccccaagctcttcctggccctcctcacccagatgcactatgtcttggagctgaacctgcccagcgagccccccaagcagcaggcccaggaggcggccgtgcccagcccccaaagctgcagcacgtcactggaggcactgaagagcctgctgtccaccacggggcactggcatgactttgcccacctggagctgcagggatcctgggagctcttcaccaccatccacacctacccgaagggcgtgggcctccttgccagggccatggtgcagaaccactgcaggcagatcccagcggtgctgcgtcagctgctgcccagcctgcagagcccacaggagcgtgagaggaaggtggccatcctcatcctcaccaagttcctctacagccctgtcctgctggaggtgcttcccaaacaagctgccttgaccgtgctggcacaaggcctccacgaccccagccctgaggtccgcgtgttgagtctgcagggcctaagcaacatcctcttccacccagataagggaagcctgctccagggacagctgcggcccttgctcgacggcttcttccagagcagcgaccaggtgatcgtgtgcatcatgggcaccgtgtcagacacgctgcaccgcctgggcgcgcagggcacagggagtcagagcctcggcgttgccatcagcacacgctccttctttaatgacgagcgggacgggattcgggcggcagccatggcactgttcggggacctggtggcggccatggcagacagggagctgagcggcctgcggacccaggtgcaccagagcatggtgcccctgctcctacacctgaaggaccaatgcccagctgtcgccacgcaggccaagttcaccttctaccgctgtgctgtgctgctccgctggcggctactgcacaccctcttctgcacgctggcctgggagaggggcctcagcgcccgccacttcctctggacctgcctgatgacccgcagccaggaggaattcagcatccacttgtcacaggccctcagctacctgcacagccactcctgccacatcaagacctgggtgacactcttcataggccacaccatctgctaccacccccaggccgtgttccagatgctgaatgctgtggacaccaacctgctgttccgcacttttgaacatctcagaagtgaccctgagcccagcatccgggaattcgccaccagccagctctccttcctccagaaggtgtcggccagacccaagcagtgacctccagccatcctcccccacccaccgccttcccctcccgtgtccacctggtcagccctgccccatccgccccccacagagcttggttgcataacgtttttccatttgaaagaaagatctagattcaac

SEQ ID NO: 150535 - DNA, 1606 bp, Homo sapiens
  Payload ID: 9733
  Gene Symbol: MROH5
  Gene Name: maestro heat-like repeat family member 5
  ENST ID: ENST00000632233
  CDS Start-End: 1-1480
ccacaccttccagctgtggagggccctgggggctgggcagcccacgagccacctggtgctgaccacactgctggcctgtctgcaggagcgacccctgcccaccggtgccagcgacagcagcccctgccccaaggagaagacctacctgcgtttgctggctgccatgaacatgctgcacgagctgcagtttgcccgggagttcaagcaggccgtgcaggagggctaccccaagctcttcctggccctcctcacccagatgcactatgtcttggagctgaacctgcccagcgagccctagcccaagcagcaggcccaggaggcggccgtgcccagcccccaaagctgcagcacgtcactggaggcactgaagagcctgctgtccaccacggggcactggcatgactttgcccacctggagctgcagggatcctgggagctcttcaccaccatccacacctacccgaagggcgtgggcctccttgccagggccatggtgcagaaccactgcaggcagatcccagcggtgctgcgtcagctgctgcccagcctgcagagcccacaggagcgtgagaggaaggtggccatcctcatcctcaccaagttcctctacagccctgtcctgctggaggtgcttcccaaacaagctgccttgaccgtgctggcacaaggcctccacgaccccagccctgaggtccgcgtgttgagtctgcagggcctaagcaacatcctcttccacccagataagggaagcctgctccagggacagctgcggcccttgctcgacggcttcttccagagcagcgaccaggtgatcgtgtgcatcatgggcaccgtgtcagacacgctgcaccgcctgggcgcgcagggcacagggagtcagagcctcggcgttgccatcagcacacgctccttctttaatgacgagcgggacgggattcgggcggcagccatggcactgttcggggacctggtggcggccatggcagacagggagctgagcggcctgcggacccaggtgcaccagagcatggtgcccctgctcctacacctgaaggaccaatgcccagctgtcgccacgcaggccaagttcaccttctaccgctgtgctgtgctgctccgctggcggctactgcacaccctcttctgcacgctggcctgggagaggggcctcagcgcccgccacttcctctggacctgcctgatgacccgcagccaggaggaattcagcatccacttgtcacaggccctcagctacctgcacagccactcctgccacatcaagacctgggtgacactcttcataggccacaccatctgctaccacccccaggccgtgttccagatgctgaatgctgtggacaccaacctgctgttccgcacttttgaacatctcagaagtgaccctgagcccagcatccgggaattcgccaccagccagctctccttcctccagaaggtgtcggccagacccaagcagtgacctccagccatcctcccccacccaccgccttcccctcccgtgtccacctggtcagccctgccccatccgccccccacagagcttggttgcataacgtttttccatttgaaagaaagatctagattc

SEQ ID NO: 150536 - DNA, 3469 bp, Homo sapiens
  Payload ID: 9734
  Gene Symbol: MROH6
  Gene Name: maestro heat-like repeat family member 6
  Uniprot ID: A6NGR9
  ENST ID: ENST00000398882
  CDS Start-End: 258-2417
gttctcagggccctggtgggtagagccacaccacaggcactcaggctgcaggtggccactcccctccagcagcccaggcaggagggcccctcaaaggcccattgtaggcacgtccgtgtggctccccagcccccgcaagctcacgctagcgcacgccaccacgcccgtccgtggtcccgcccggggcggcttctaggtcagtcctgggcacaacttcgcaggaggagcagcggcaggtgctgcaggcaagggccgccatggctgggggtgtgtggggccggagccgggcccgggaggctcccgtgggggctctaaccctgacagcactgactgaaggaatccgggccaggcaggggcagccccagggacccccttccgcaggccctcagcccaagtcctgggaggtcaaacctgaggctgagccacagacccaggcactcaccgccccctctgaggcagagcctggacgtggggccaccgtccctgaagctggcagcgagccctgctccctcaacagtgccctggaaccagcccctgaggggccccaccaggttccccagagttcctgggaggagggagttcttgccgacctcgcgttgtacacggctgcctgcctggaggaggctggctttgcagggacccaggcgacagtgctcaccctgtcctcagccctggaggcccggggcgagcggttggaggaccaggtgcatgctctggtgcgtgggctgctggcgcaggtgcccagcctagcggaggggaggccctggagggcggccctgcgagtgctgagcgcactggccctggagcatgcgcgggacgtggtgtgtgcgctgctaccccgctctctgcccgccgatcgggtagcagccgagctctggcgcagcctaagccgtaaccagcgtgtaaatgggcaggtgctggtgcaactgctgtgggcgctgaagggtgcttcggggccggagccccaggcactggcggccacacgtgctcttggggagatgctggctgtttcgggctgcgtgggagccacgaggggcttctacccacatctgctgcttgcgctggtcacacagctgcacaagctggcccgcagcccgtgctcccccgacatgcccaagatttgggttctgtcccaccgagggccaccacatagccatgccagctgtgctgtggaggccttgaaggcgctgctcaccggggatggaggccgcatggtggtcacgtgcatggagcaggcaggaggctggaggaggctggtgggagcccacacccacctggagggcgtcctgctgctggccagtgctatggtggcacatgccgaccaccacctgcgaggcctcttcgcagacttgctccctcggcttcgcagcgcggacgacccgcagcgtctcacggctatggccttcttcacagggctgttgcagagccggcccaccgcacggctcctgcgggaggaggtcatcctggagcgactcctcacctggcagggagaccccgaacccactgtgcgctggttgggcctgctgggcctgggccacctcgcgctgaatcgcaggaaggtgcggcacgtgagcacgctgctgccggcgctcctgggcgcactgggcgaaggcgacgcgcggctcgtgggtgcagcgctgggcgccctgaggaggctcctgctgcggccccgggcgcctgtgcggctcctgagcgcggagctgggaccgcgcctccctccgctactggacgacacacgggactcaatccgcgcctcggccgtcgggctccttgggactctggtgcgccggggccggggcgggctccggctggggctccgcggccccctgcggaagctggtgctgcagagtctcgtgccgctgctgctgcgcctgcatgaccccagcagggacgctgctgagagctcagagtggaccctggcccgctgtgaccacgccttttgctggggcctgctggaggagttggtcaccgtggcccactatgacagccccgaggccctgagccacctctgctgccgcctggttcagcgatacccaggccacgtgcccaacttcctgagccagacccagggctacctgcggagtccacaggaccccctgcgccgggcagccgccgtgcttataggcttccttgtccaccacgccagccccggctgtgtcaaccaggacctgctggactccctgttccaggacctagggcgactgcagagcgaccccaagccggctgtggccgcggcagcgcacgtgtccgctcagcaggtggcgatgctggcccgtgcccggggctgcccccgcgggccccgccttctccgcatcgccccgcgccccgcccggcccccaccagtcttcgccgacagccccttccagcgccggagcgtcgcgggccgctggggctgctccggaccccgccgagcctgaggctcggggctggggcccgagggccagggtccgactcgggcaccccacgcgcatagcagcctgtccccgccctgacggaggggctccctgggcctggtgctggacgccaatgccctcccccaccccccacccccgtgacccctcttcaggcacccaccaccctgatggtgacagagggggacagccagcacccatctgtccccgtcagggctcttgttctcacagccccctggagcatgccccatgccccaaccttgggcctggctcctggcccagatggcacctggcctcttgagtctgctgggggaccccaaagttggtggtcccatagcctgccctcctgggtctccacctcatgcctggacaggacgctgtggcctgtccgggccttggccagccctgcagctgcacccccgatcctcatccctcaccccattccctgccagcatcctaaggctcctggcgggcatcctctctgctcaaaattattgacctgtctcccggccacacctgctgtgccctctcagccaggccatcatcaccccctgttcattatgtcaggcctcatgggagcctggccttctccagaagctggccccggcgtcctcccaagctggaccacgtaggccccagatcacacctgggggtccagatgtaggggtcctgtgtgcacgcccaatcagaccgagcacttgtgacactaccccaacacctctcccagggctgaatgaggaacgcgccactggacacatgaggaagaggctgctctgggagctactgatgctgtgacctcacctctctggctttgggcggcaggtccctgcacctaggatgcctgcctggaaatgtccttgcattcgtggcctccttcacagcctcctcctcagagaagcctctgcgagtgcacagggagtgtgtgcagccttgtgaagggctgggaccacttgcccagactggggcccctcaggcacaggcgtggggtcctactgacctgtctccccagctcccacacagaaagcatctaaaataaacacacgtggatggaaagcgtt

SEQ ID NO: 150537 - DNA, 1789 bp, Homo sapiens
  Payload ID: 9734
  Gene Symbol: MROH6
  Gene Name: maestro heat-like repeat family member 6
  ENST ID: ENST00000534459
  CDS Start-End: 700-852
aggcttcccaaccaggtccagctccaggccctgttccctgtccccagatcacaccgagtcagcagccttccctagacccgccgcttcctcgctccgcgctggccgccccctcccacccttgcagcccctctctgtctccgcctgccctgactgcgccctcccacgcagacacgggactcaatccgcgcctcggccgtcgggctccttgggactctggtgcgccggggccggggcgggctccggctggggctccgcggccccctgcggaagctggtgctgcagagtctcgtgccgctgctgctgcgcctgcatgaccccagcagggacgctgctgagagctcagagtggaccctggcccgctgtgaccacgccttttgctggggcctgctggaggagttggtcaccgtggcccactatgacagccccgaggccctgagccacctctgctgccgcctggttcagcgatacccaggccacgtgcccaacttcctgagccagacccagggctacctgcggagtccacaggaccccctgcgccgggcagccgccgtgcttataggcttccttgtccaccacgccagccccggctgtgtcaaccaggacctgctggactccctgttccaggacctagggcgactgcagagcgaccccaagccggctgtggccgcggcagcgcacgtgtccgctcagcaggtggcgatgctggcccgtgcccggggctgcccccgcgggccccgccttctccgcatcgccccgcgccccgcccggcccccaccagtcttcgccgacagccccttccagcgccggagcgtcgcgggccgctggggctgctccggaccccgccgagcctgaggctcggggctggggcccgagggccagggtccgactcgggcaccccacgcgcatagcagcctgtccccgccctgacggaggggctccctgggcctggtgctggacgccaatgccctcccccaccccccacccccgtgacccctcttcaggcacccaccaccctgatggtgacagagggggacagccagcacccatctgtccccgtcagggctcttgttctcacagccccctggagcatgccccatgccccaaccttgggcctggctcctggcccagatggcacctggcctcttgagtctgctgggggaccccaaagttggtggtcccatagcctgccctcctgggtctccacctcatgcctggacaggacgctgtggcctgtccgggccttggccagccctgcagctgcacccccgatcctcatccctcaccccattccctgccagcatcctaaggctcctggcgggcatcctctctgctcaaaattattgacctgtctcccggccacacctgctgtgccctctcagccaggccatcatcaccccctgttcattatgtcaggcctcatgggagcctggccttctccagaagctggccccggcgtcctcccaagctggaccacgtaggccccagatcacacctgggggtccagatgtaggggtcctgtgtgcacgcccaatcagaccgagcacttgtgacactaccccaacacctctcccagggctgaatgaggaacgcgccactggacacatgaggaagaggctgctctgggagctactgatgctgtgacctcacctctctggctttgggcggcaggtccctgcacctaggatgcctgcctggaaatgtccttgcattcgtggcctccttcacagcctcctcctcagagaagcctctgcgagtgcacagggagtgtgtgcagccttgtgaagggctg

SEQ ID NO: 150538 - DNA, 1921 bp, Homo sapiens
  Payload ID: 9734
  Gene Symbol: MROH6
  Gene Name: maestro heat-like repeat family member 6
  ENST ID: ENST00000533679
  CDS Start-End: 722-874
gtgcgctggttgggcctgctgggcctgggccacctcgcgctgaatcgcaggaaggtgtgagagaaggggaggggtggagaggggcttggcccggtcgcggcgaggtctgcaagaggctgaccccgagtcccagcaggtgcggcacgtgagcacgctgctgccggcgctcctgggcgcactgggcgaaggcgacgcgcggctcgtgggtgcagcgctgggcgccctgaggaggctcctgctgcggccccgggcgcctgtgcggctcctgagcgcggagctgggaccgcgcctccctccgctactggacgacacacgggactcaatccgcgcctcggccgtcgggctccttgggactctggtgcgccggggccggggcgggctccggctggggctccgcggccccctgcggaagctggtgctgcagagtctcgtgccgctgctgctgcgcctgcatgaccccagcagggacgctgctgaggttcagcgatacccaggccacgtgcccaacttcctgagccagacccagggctacctgcggagtccacaggaccccctgcgccgggcagccgccgtgcttataggcttccttgtccaccacgccagccccggctgtgtcaaccaggacctgctggactccctgttccaggacctagggcgactgcagagcgaccccaagccggctgtggccgcggcagcgcacgtgtccgctcagcaggtggcgatgctggcccgtgcccggggctgcccccgcgggccccgccttctccgcatcgccccgcgccccgcccggcccccaccagtcttcgccgacagccccttccagcgccggagcgtcgcgggccgctggggctgctccggaccccgccgagcctgaggctcggggctggggcccgagggccagggtccgactcgggcaccccacgcgcatagcagcctgtccccgccctgacggaggggctccctgggcctggtgctggacgccaatgccctcccccaccccccacccccgtgacccctcttcaggcacccaccaccctgatggtgacagagggggacagccagcacccatctgtccccgtcagggctcttgttctcacagccccctggagcatgccccatgccccaaccttgggcctggctcctggcccagatggcacctggcctcttgagtctgctgggggaccccaaagttggtggtcccatagcctgccctcctgggtctccacctcatgcctggacaggacgctgtggcctgtccgggccttggccagccctgcagctgcacccccgatcctcatccctcaccccattccctgccagcatcctaaggctcctggcgggcatcctctctgctcaaaattattgacctgtctcccggccacacctgctgtgccctctcagccaggccatcatcaccccctgttcattatgtcaggcctcatgggagcctggccttctccagaagctggccccggcgtcctcccaagctggaccacgtaggccccagatcacacctgggggtccagatgtaggggtcctgtgtgcacgcccaatcagaccgagcacttgtgacactaccccaacacctctcccagggctgaatgaggaacgcgccactggacacatgaggaagaggctgctctgggagctactgatgctgtgacctcacctctctggctttgggcggcaggtccctgcacctaggatgcctgcctggaaatgtccttgcattcgtggcctccttcacagcctcctcctcagagaagcctctgcgagtgcacagggagtgtgtgcagccttgtgaagggctgggaccacttgcccagactggggcccctcaggcacaggcgtggggtcctactgacctgtctccccagctcccacacagaaagcatctaaaataaacacacgtggatggaaa

SEQ ID NO: 150539 - DNA, 1794 bp, Homo sapiens
  Payload ID: 9734
  Gene Symbol: MROH6
  Gene Name: maestro heat-like repeat family member 6
  ENST ID: ENST00000524906
  CDS Start-End: 601-753
ttccctgtccccagatcacaccgagtcagcagccttccctagacccgccgcttcctcgctccgcgctggccgccccctcccacccttgcagcccctctctgtctccgcctgccctgactgcgccctcccacgcagacacgggactcaatccgcgcctcggccgtcgggctccttgggactctggtgcgccggggccggggcgggctccggctggggctccgcggccccctgcggaagctggtgctgcagagtctcgtgccgctgctgctgcgcctgcatgaccccagcagggacgctgctgagagctcagagtggaccctggcccgctgtgaccacgccttttgctggggcctgctggaggagttggtcaccgtggcccactatgacagccccgaggccctgagccacctctgctgccgcctggttcagcgatacccaggccacgtgcccaacttcctgagccagacccagggctacctgcggagtccacaggaccccctgcgccgggcagccgccgtgcttatagacctagggcgactgcagagcgaccccaagccggctgtggccgcggcagcgcacgtgtccgctcagcaggtggcgatgctggcccgtgcccggggctgcccccgcgggccccgccttctccgcatcgccccgcgccccgcccggcccccaccagtcttcgccgacagccccttccagcgccggagcgtcgcgggccgctggggctgctccggaccccgccgagcctgaggctcggggctggggcccgagggccagggtccgactcgggcaccccacgcgcatagcagcctgtccccgccctgacggaggggctccctgggcctggtgctggacgccaatgccctcccccaccccccacccccgtgacccctcttcaggcacccaccaccctgatggtgacagagggggacagccagcacccatctgtccccgtcagggctcttgttctcacagccccctggagcatgccccatgccccaaccttgggcctggctcctggcccagatggcacctggcctcttgagtctgctgggggaccccaaagttggtggtcccatagcctgccctcctgggtctccacctcatgcctggacaggacgctgtggcctgtccgggccttggccagccctgcagctgcacccccgatcctcatccctcaccccattccctgccagcatcctaaggctcctggcgggcatcctctctgctcaaaattattgacctgtctcccggccacacctgctgtgccctctcagccaggccatcatcaccccctgttcattatgtcaggcctcatgggagcctggccttctccagaagctggccccggcgtcctcccaagctggaccacgtaggccccagatcacacctgggggtccagatgtaggggtcctgtgtgcacgcccaatcagaccgagcacttgtgacactaccccaacacctctcccagggctgaatgaggaacgcgccactggacacatgaggaagaggctgctctgggagctactgatgctgtgacctcacctctctggctttgggcggcaggtccctgcacctaggatgcctgcctggaaatgtccttgcattcgtggcctccttcacagcctcctcctcagagaagcctctgcgagtgcacagggagtgtgtgcagccttgtgaagggctgggaccacttgcccagactggggcccctcaggcacaggcgtggggtcctactgacctgtctccccagctcccacacagaaagcatctaaaataaacacacgtgga

SEQ ID NO: 150540 - DNA, 572 bp, Homo sapiens
  Payload ID: 9734
  Gene Symbol: MROH6
  Gene Name: maestro heat-like repeat family member 6
  ENST ID: ENST00000532862
  CDS Start-End: 553-572
gccctgttccctgtccccagatcacaccgagtcagcagccttccctagacccgccgcttcctcgctccgcgctggccgccccctcccacccttgcagcccctctctgtctccgcctgccctgactgcgccctcccacgcagacacgggactcaatccgcgcctcggccgtcgggctccttgggactctggtgcgccggggccggggcgggctccggctggggctccgcggccccctgcggaagctggtgctgcagagtctcgtgccgctgctgctgcgcctgcatgaccccagcagggacgctgctgaggttcagcgatacccaggccacgtgcccaacttcctgagccagacccagggctacctgcggagtccacaggaccccctgcgccgggcagccgccgtgcttataggcttccttgtccaccacgccagccccggctgtgtcaaccaggacctgctggactccctgttccaggacctagggcgactgcagagcgaccccaagccggctgtggccgcggcagcgcacgtgtccgctcagcaggtggcgatgctggcccgtgcccgggg

SEQ ID NO: 150541 - DNA, 1680 bp, Homo sapiens
  Payload ID: 9734
  Gene Symbol: MROH6
  Gene Name: maestro heat-like repeat family member 6
  ENST ID: ENST00000529971
  CDS Start-End: 35-1680
ggagcagcggcaggtgctgcaggcaagggccgccatggctgggggtgtgtggggccggagccgggcccgggaggctcccgtgggggctctaaccctgacagcactgactgaaggaatccgggccaggcaggggcagccccagggacccccttccgcaggccctcagcccaagtcctgggaggtcaaacctgaggctgagccacagacccaggcactcaccgccccctctgaggcagagcctggacgtggggccaccgtccctgaagctggcagcgagccctgctccctcaacagtgccctggaaccagcccctgaggggccccaccaggttccccagagttcctgggaggagggagttcttgccgacctcgcgttgtacacggctgcctgcctggaggaggctggctttgcagggacccaggcgacagtgctcaccctgtcctcagccctggaggcccggggcgagcggttggaggaccaggtgcatgctctggtgcgtgggctgctggcgcaggtgcccagcctagcggaggggaggccctggagggcggccctgcgagtgctgagcgcactggccctggagcatgcgcgggacgtggtgtgtgcgctgctaccccgctctctgcccgccgatcgggtagcagccgagctctggcgcagcctaagccgtaaccagcgtgtaaatgggcaggtgctggtgcaactgctgtgggcgctgaagggtgcttcggggccggagccccaggcactggcggccacacgtgctcttggggagatgctggctgtttcgggctgcgtgggagccacgaggggcttctacccacatctgctgcttgcgctggtcacacagctgcacaagctggcccgcagcccgtgctcccccgacatgcccaagatttgggttctgtcccaccgagggccaccacatagccatgccagctcccactgcccacctgctcactgtccccaccaccagctgtgctgtggaggccttgaaggcgctgctcaccggggatggaggccgcatggtggtcacgtgcatggagcaggcaggaggctggaggaggctggtgggagcccacacccacctggagggcgtcctgctgctggccagtgctatggtggcacatgccgaccaccacctgcgaggcctcttcgcagacttgctccctcggcttcgcagcgcggacgacccgcagcgtctcacggctatggccttcttcacagggctgttgcagagccggcccaccgcacggctcctgcgggaggaggtcatcctggagcgactcctcacctggcagggagaccccgaacccactgtgcgctggttgggcctgctgggcctgggccacctcgcgctgaatcgcaggaaggtgcggcacgtgagcacgctgctgccggcgctcctgggcgcactgggcgaaggcgacgcgcggctcgtgggtgcagcgctgggcgccctgaggaggctcctgctgcggccccgggcgcctgtgcggctcctgagcgcggagctgggaccgcgcctccctccgctactggacgacacacgggactcaatccgcgcctcggccgtcgggctccttgggactctggtgcgccggggccggggcgggctccggctggggctccgcggccccctgcggaagctggtgctgcagagtctcgtgccgctgctgc

SEQ ID NO: 150542 - DNA, 3469 bp, Homo sapiens; identical to SEQ ID NO: 150536
  Payload ID: 9734
  Gene Symbol: MROH6
  Gene Name: maestro heat-like repeat family member 6
  Uniprot ID: A6NGR9
  ENST ID: ENST00000618551
  CDS Start-End: 258-2417

SEQ ID NO: 150543 - DNA, 1680 bp, Homo sapiens; identical to SEQ ID NO: 150541
  Payload ID: 9734
  Gene Symbol: MROH6
  Gene Name: maestro heat-like repeat family member 6
  ENST ID: ENST00000633027
  CDS Start-End: 35-1680

SEQ ID NO: 150544 - DNA, 3459 bp, Homo sapiens
  Payload ID: 9735
  Gene Symbol: MROH7
  Gene Name: maestro heat-like repeat family member 7
  ENST ID: ENST00000339553
  CDS Start-End: 325-3459
actggcctgggctggggaagcctaggtaagctgaggggcagctctgggaaagtcctaggggtgggggcagtctccacagcctcccacaagggagttaccaccttcccgcacttctgggtacaagtctcctgctctggctgtattccacagttagaacttcatatctttggcttagagctggattttctgttaccatgtggatgctccaggtgaaggggcccgctcctgcttaaaaacaccatgcatgcagactgctgctgggaatgtgacagttggctgttggagagaagcgggcactggcattgagagacctccagactggacatggccctgagtccaggggctaacctggtcttccatgaagacccaaagatgacaccaagtcccccctcctgtggggccccgggattagggtctggtaccatccctcagccccacccagacatggctcaggtgcctatgttgaatctgctcccaagtcctggcttggctctcgttccagatcttaatgattctttgagtccagtctcaggggaggcctcaggcctggtgtctgaaaacacccccagacctgatgacagcagagctatcgctccagcctccctccagatcaccagttcttgttctggtgaagccctggacctggattccaaggatgtctcaaggcctgactcacaggggcgcctctgtccagcctcaaaccccattctgagccctagctctactgaggcccctcgtctgagctctgggaaccaccctcagtcaaattctgaagatgccttcaagtgcctctcaagtaagattttcaagttgggtcagagaaactccaacccttctaggcatgaattaaacccatttataaggcaccattccagagaaggtctggttctgggccactgcatctctaggccaagctcaaaagcactccttattccaacctcaaactcttctctggaccttgactccaatccattgctcaacatgggctcaagaaacacctccaagctgaacctgaatgtagctccagattctcatgggaccctaatcccagacacaaatgagaccatcactttggcttcacataatatctctgagtctgtttcaaaaggagcctttagtaccacctggagcacaagttcaaaggaaaccatgaatgtggcttccagcggccactccagatctgatttgagcgtgaccatcactcaagcctcgtatgtgaccctgattcctggctccagctatggtatcagcctgcactccagcacccatgagcccaactccaccatctctccaccctcatgcatgactctaatcctgggttccaatgagactctgagcctggactccagcctcctgttcagcgacacctccaccttgacgctgagcagtcagcaggatgatgccaaggacaacagcatccacactgtgcccctggaggagaatctggagagttggagtgagatggccagcattaaggtgggccagttcccgctgggattccccatctccaaccccgcaggcaaggacgccgtgaccttgcaaggcatccctgagggagcctttgatgaagtgacctcatgcctggtgaaggtgccagagaagacagaaggtggcaacaacatggctctggttgagaatgtcaccacccttcagaagagccaggatctgctggaggcagaaggagaaaagaagaccatgataaagaagattatgaggcagatccaggaggagccactggattctctctcaagctccgtccgcaagcaggccatggagatcctgacccagctgagccacacccagcccaccctgggcatgcgggagaggtcggagctggtgaacgtgtgtgtgcacagcgtgttctccctgccctccgtgcaggcgatgcaggagaaggacgaggccaaggctgagaccatccaggctctttaccatcagaccctggaggccctgcagacactgctcaaagccctctttatcgaggaccccactcctgctgggctgaagagcatcttggaggccctggggccttggatgaactctgggaaggcccatgagcgagcacgggctgtgaacaccaatgtctctgtgttgaaccacatgcttctaactctgcctttctttatgcccttggggttcccggcgctggggcttctgctggggagactcatccttcacattggggatcctgatgaggagattggctgtgaggctctggacggcatcatcatcctctacactattctggagctccaaaaacgagccagagataaggaagagaccaacaaaaaggagctatatgagagcaacaagcatttcctggggccctacaaccctgtgagcccgtgccagaacattctgcgggtgatcgaggaatttggagacttcctggggccccagcagataaaggacctgctgctggccgccctggaagggctgaaaggcagctcagaggctccagggaaggactccagggagatgatgcagctggcctcggaggtcatgctcagctcggtgctggagtggtaccgccacagggcgctggaggtgatcccagaaatcatgcaaggcatctacatgcagctgagccacatccaggagcctcgggcccgccaggtggccctgctgcccgtctccctcctggctagctccttcatgaccgaggttgtggtggccctgctcatgtgccccctcccactgaacagcaatggagcagagatgtggaggcagctgatactgtgtaagcccagctgtgatgtccgagacctcctggatctgctcctgggcagcctgaaggagaagcccgtcaccaaggagggccgggcttccatcgtgcccctggcggcagccagcggcctgtgcgagctcctgtccgtcaacagctgcatgggccgtgtgaggcgcatctaccctcagctgctcctggccctgctcattcaggtccattaccacatcggcctcaacctgcctggctgcgtggctcctcccaaggacaccaagaagggtgcacagccctctcccttcgtacctgtgcgctgggtggtgaaagtggtgaaaaccctgctactgaggatgggctgctcttatgagaccacgtttctggaggaccagggtggctgggagctcatggagcaggtggagagccaccaccgcggagtggccttgctggcaagggccatggtgcagtactcctgccaggagctgtgccgcatcctctacctgctcatcccgctcctggagcgaggcgacgagaagcacaggatcacggccaccgccttcttcgtggagcaaccctgcgaagaaggaattgtgatactcatgcttaggatctcatgggaaaggcaacaacaagcagtcacaggggctcggagctggagagtgacacactcagctttgccacatggtgctgatggacatcagacggagacttccagcaatctgttggttttgcaagtctga

SEQ ID NO: 150545 - DNA, 3413 bp, Homo sapiens
  Payload ID: 9735
  Gene Symbol: MROH7
  Gene Name: maestro heat-like repeat family member 7
  Uniprot ID: Q68CQ1
  ENST ID: ENST00000395690
  CDS Start-End: 257-3349
agtctccacagcctcccacaagggagttaccaccttcccgcacttctgggtacaagtctcctgctctggctgtattccacagttagaacttcatatctttggcttagagctggattttctgttaccatgtggatgctccaggtgaaggggcccgctcctgcttaaaaacaccatgcatgcagactgctgctgggaatgtgacagttggctgttggagagaagcgggcactggcattgagagacctccagactggacatggccctgagtccaggggctaacctggtcttccatgaagacccaaagatgacaccaagtcccccctcctgtggggccccgggattagggtctggtaccatccctcagccccacccagacatggctcaggtgcctatgttgaatctgctcccaagtcctggcttggctctcgttccagatcttaatgattctttgagtccagtctcaggggaggcctcaggcctggtgtctgaaaacacccccagacctgatgacagcagagctatcgctccagcctccctccagatcaccagttcttgttctggtgaagccctggacctggattccaaggatgtctcaaggcctgactcacaggggcgcctctgtccagcctcaaaccccattctgagccctagctctactgaggcccctcgtctgagctctgggaaccaccctcagtcaaattctgaagatgccttcaagtgcctctcaagtaagattttcaagttgggtcagagaaactccaacccttctaggcatgaattaaacccatttataaggcaccattccagagaaggtctggttctgggccactgcatctctaggccaagctcaaaagcactccttattccaacctcaaactcttctctggaccttgactccaatccattgctcaacatgggctcaagaaacacctccaagctgaacctgaatgtagctccagattctcatgggaccctaatcccagacacaaatgagaccatcactttggcttcacataatatctctgagtctgtttcaaaaggagcctttagtaccacctggagcacaagttcaaaggaaaccatgaatgtggcttccagcggccactccagatctgatttgagcgtgaccatcactcaagcctcgtatgtgaccctgattcctggctccagctatggtatcagcctgcactccagcacccatgagcccaactccaccatctctccaccctcatgcatgactctaatcctgggttccaatgagactctgagcctggactccagcctcctgttcagcgacacctccaccttgacgctgagcagtcagcaggatgatgccaaggacaacagcatccacactgtgcccctggaggagaatctggagagttggagtgagatggccagcattaaggtgggccagttcccgctgggattccccatctccaaccccgcaggcaaggacgccgtgaccttgcaaggcatccctgagggagcctttgatgaagtgacctcatgcctggtgaaggtgccagagaagacagaaggtggcaacaacatggctctggttgagaatgtcaccacccttcagaagagccaggatctgctggaggcagaaggagaaaagaagaccatgataaagaagattatgaggcagatccaggaggagccactggattctctctcaagctccgtccgcaagcaggccatggagatcctgacccagctgagccacacccagcccaccctgggcatgcgggagaggtcggagctggtgaacgtgtgtgtgcacagcgtgttctccctgccctccgtgcaggcgatgcaggagaaggacgaggccaaggctgagaccatccaggctctttaccatcagaccctggaggccctgcagacactgctcaaagccctctttatcgaggaccccactcctgctgggctgaagagcatcttggaggccctggggccttggatgaactctgggaaggcccatgagcgagcacgggctgtgaacaccaatgtctctgtgttgaaccacatgcttctaactctgcctttctttatgcccttggggttcccggcgctggggcttctgctggggagactcatccttcacattggggatcctgatgaggagattggctgtgaggctctggacggcatcatcatcctctacactattctggagctccaaaaacgagccagagataaggaagagaccaacaaaaaggagctatatgagagcaacaagcatttcctggggccctacaaccctgtgagcccgtgccagaacattctgcgggtgatcgaggaatttggagacttcctggggccccagcagataaaggacctgctgctggccgccctggaagggctgaaaggcagctcagaggctccagggaaggactccagggagatgatgcagctggcctcggaggtcatgctcagctcggtgctggagtggtaccgccacagggcgctggaggtgatcccagaaatcatgcaaggcatctacatgcagctgagccacatccaggagcctcgggcccgccaggtggccctgctgcccgtctccctcctggctagctccttcatgaccgaggttgtggtggccctgctcatgtgccccctcccactgaacagcaatggagcagagatgtggaggcagctgatactgtgtaagcccagctgtgatgtccgagacctcctggatctgctcctgggcagcctgaaggagaagcccgtcaccaaggagggccgggcttccatcgtgcccctggcggcagccagcggcctgtgcgagctcctgtccgtcaacagctgcatgggccgtgtgaggcgcatctaccctcagctgctcctggccctgctcattcaggtccattaccacatcggcctcaacctgcctggctgcgtggctcctcccaaggacaccaagaagggtgcacagccctctcccttcgtacctgtgcgctgggtggtgaaagtggtgaaaaccctgctactgaggatgggctgctcttatgagaccacgtttctggaggaccagggtggctgggagctcatggagcaggtggagagccaccaccgcggagtggccttgctggcaagggccatggtgcagtactcctgccaggagctgtgccgcatcctctacctgctcatcccgctcctggagcgaggcgacgagaagcacaggatcacggccaccgccttcttcgtggagcaaccctgcgaagaaggaattgtgatactcatgcttaggccacaggatctcatgggaaaggcaacaacaagcagtcacaggggctcggagctggagagtgacacactcagctttgccacatggtgctgatggacatcagacggagacttccagcaatctgttggttttgcaagtctgaagctccgggcagagc

SEQ ID NO: 150546 - DNA, 2977 bp, Homo sapiens
  Payload ID: 9735
  Gene Symbol: MROH7
  Gene Name: maestro heat-like repeat family member 7
  ENST ID: ENST00000409996
  CDS Start-End: 227-2902
ctaggggtgggggcagtctccacagcctcccacaagggagttaccaccttcccgcacttctgggtacaagtctcctgctctggctgtattccacagttagaacttcatatctttggcttagagctggattttctgttaccatgtggatgctccaggtgaaggagcctttgatgaagtgacctcatgcctggtgaaggtgccagagaagacagaaggtggcaacaacatggctctggttgagaatgtcaccacccttcagaagagccaggatctgctggaggcagaaggagaaaagaagaccatgataaagaagattatgaggcagatccaggaggagccactggattctctctcaagctccgtccgcaagcaggccatggagatcctgacccagctgagccacacccagcccaccctgggcatgcgggagaggtcggagctggtgaacgtgtgtgtgcacagcgtgttctccctgccctccgtgcaggcgatgcaggagaaggacgaggccaaggctgagaccatccaggctctttaccatcagaccctggaggccctgcagacactgctcaaagccctctttatcgaggaccccactcctgctgggctgaagagcatcttggaggccctggggccttggatgaactctgggaaggcccatgagcgagcacgggctgtgaacaccaatgtctctgtgttgaaccacatgcttctaactctgcctttctttatgcccttggggttcccggcgctggggcttctgctggggagactcatccttcacattggggatcctgatgaggagattggctgtgaggctctggacggcatcatcatcctctacactattctggagctccaaaaacgagccagagataaggaagagaccaacaaaaaggagctatatgagagcaacaagcatttcctggggccctacaaccctgtgagcccgtgccagaacattctgcgggtgatcgaggaatttggagacttcctggggccccagcagataaaggacctgctgctggccgccctggaagggctgaaaggcagctcagaggctccagggaaggactccagggagatgatgcagctggcctcggaggtcatgctcagctcggtgctggagtggtaccgccacagggcgctggaggtgatcccagaaatcatgcaaggcatctacatgcagctgagccacatccaggagcctcgggcccgccaggtggccctgctgcccgtctccctcctggctagctccttcatgaccgaggttgtggtggccctgctcatgtgccccctcccactgaacagcaatggagcagagatgtggaggcagctgatactgtgtaagcccagctgtgatgtccgagacctcctggatctgctcctgggcagcctgaaggagaagcccgtcaccaaggagggccgggcttccatcgtgcccctggcggcagccagcggcctgtgcgagctcctgtccgtcaacagctgcatgggccgtgtgaggcgcatctaccctcagctgctcctggccctgctcattcaggtccattaccacatcggcctcaacctgcctggctgcgtggctcctcccaaggacaccaagaagggtgcacagccctctcccttcgtacctgtgcgctgggtggtgaaagtggtgaaaaccctgctactgaggatgggctgctcttatgagaccacgtttctggaggaccagggtggctgggagctcatggagcaggtggagagccaccaccgcggagtggccttgctggcaagggccatggtgcagtactcctgccaggagctgtgccgcatcctctacctgctcatcccgctcctggagcgaggcgacgagaagcacaggatcacggccaccgccttcttcgtggagctcctccagatggagcaggtgcgccggatccccgaggaatactctctggggcggatggcagaaggcctgagccaccacgaccccatcatgaaggtgctgtccattcgaggcctggtcatcctggcccgcaggtctgagaagaccgccaaggtgaaggccctcctgccctccatggtgaagggcctgaagaacatggatgggatgctggtggtggaagcggtccacaacctcaaggctgtcttcaaggggcgggaccagaagctgatggacagtgcggtctatgtggagatgctgcagatcctgctgccgcacttcagcgacgcacgagaggtcgtgcgctcctcctgcatcaacctgtatgggaaggtggtccagaagcttcgggcaccacgcactcaggccatggaggagcagctggtcagcaccttggtgcccctactgctgaccatgcaggagggcaactccaaggtaagccagaagtgtgtgaagaccctgttacgctgttcttacttcatggcttgggagttgccaaaaagagcttatagccggaagccctgggacaaccaacagcagacagtggccaaaatttgcaagtgccttgtgaacacccaccgagacagcgccttcatattcctcagccagagcctggagtatgccaagaactcacgggcctccctccggaagtgctcagtcatgttcatagggtccctggtcccctgcatggagagcataatgacagaagatcgtctgaatgaagtgaaagctgctctggataacttgagacatgacccagaagcatcagtgtgcatctacgcagcccaggtccaggaccacatcctggccagctgctggcagaactcctggctgccgcacgggaactcatgggtgtgttactcagccaccacccaccgctggagccccagctgtgagaacctgcccacttcccaccagcggcgctcctggatcatgcaggcactgggctcctggaagatgtccttgaagaagtgacgtccctgagccccaaaccctcctcagggtggttgagttccagccatgctccctataaatgtcatgtggcttacc

SEQ ID NO: 150547 - DNA, 4174 bp, Homo sapiens
  Payload ID: 9735
  Gene Symbol: MROH7
  Gene Name: maestro heat-like repeat family member 7
  Uniprot ID: Q68CQ1
  ENST ID: ENST00000422659
  CDS Start-End: 114-1997
ccaggggcccgctcctgcttaaaaacaccatgcatgcagactgctgctgggaatgtgacagttggctgttggagagaagcgggcactggcattgagagacctccagactggacatggccctgagtccaggggctaacctggtcttccatgaagacccaaagatgacaccaagtcccccctcctgtggggccccgggattagggtctggtaccatccctcagccccacccagacatggctcaggtgcctatgttgaatctgctcccaagtcctggcttggctctcgttccagatcttaatgattctttgagtccagtctcaggggaggcctcaggcctggtgtctgaaaacacccccagacctgatgacagcagagctatcgctccagcctccctccagatcaccagttcttgttctggtgaagccctggacctggattccaaggatgtctcaaggcctgactcacaggggcgcctctgtccagcctcaaaccccattctgagccctagctctactgaggcccctcgtctgagctctgggaaccaccctcagtcaaattctgaagatgccttcaagtgcctctcaagtaagattttcaagttgggtcagagaaactccaacccttctaggcatgaattaaacccatttataaggcaccattccagagaaggtctggttctgggccactgcatctctaggccaagctcaaaagcactccttattccaacctcaaactcttctctggaccttgactccaatccattgctcaacatgggctcaagaaacacctccaagctgaacctgaatgtagctccagattctcatgggaccctaatcccagacacaaatgagaccatcactttggcttcacataatatctctgagtctgtttcaaaaggagcctttagtaccacctggagcacaagttcaaaggaaaccatgaatgtggcttccagcggccactccagatctgatttgagcgtgaccatcactcaagcctcgtatgtgaccctgattcctggctccagctatggtatcagcctgcactccagcacccatgagcccaactccaccatctctccaccctcatgcatgactctaatcctgggttccaatgagactctgagcctggactccagcctcctgttcagcgacacctccaccttgacgctgagcagtcagcaggatgatgccaaggacaacagcatccacactgtgcccctggaggagaatctggagagttggagtgagatggccagcattaaggtgggccagttcccgctgggattccccatctccaaccccgcaggcaaggacgccgtgaccttgcaaggcatccctgagggagcctttgatgaagtgacctcatgcctggtgaaggtgccagagaagacagaaggtggcaacaacatggctctggttgagaatgtcaccacccttcagaagagccaggatctgctggaggcagaaggagaaaagaagaccatgataaagaagattatgaggcagatccaggaggagccactggattctctctcaagctccgtccgcaagcaggccatggagatcctgacccagctgagccacacccagcccaccctgggcatgcgggagaggtcggagctggtgaacgtgtgtgtgcacagcgtgttctccctgccctccgtgcaggcgatgcaggagaaggacgaggccaaggctgagaccatccaggctctttaccatcagaccctggaggccctgcagacactgctcaaagccctctttatcgaggaccccactcctgctgggctgaagagcatcttggaggccctggggccttggatgaactctgggaaggcccatgagcgagcacgggctgtgaacaccaatgtctctgtgttgaaccacatgcttctaactctgcctttctttattgcaatacaaacagatgcccttggggttcccggcgctggggcttctgctggggagactcatccttcacattggggatcctgatgaggagattggctgtgaggctctggacggcatcatcatcctctacactattctggagctccaaaaacgagccagagataaggaagagaccaacaaaaaggagctatatgagagcaacaagcatttcctggggccctacaaccctgtgagcccgtgccagaacattctgcgggtgatcgaggaatttggagacttcctggggccccagcagataaaggacctgctgctggccgccctggaagggctgaaaggcagctcagaggctccagggaaggactccagggagatgatgcagctggcctcggaggtcatgctcagctcggtgctggagtggtaccgccacagggcgctggaggtgatcccagaaatcatgcaaggcatctacatgcagctgagccacatccaggagcctcgggcccgccaggtggccctgctgcccgtctccctcctggctagctccttcatgaccgaggttgtggtggccctgctcatgtgccccctcccactgaacagcaatggagcagagatgtggaggcagctgatactgtgtaagcccagctgtgatgtccgagacctcctggatctgctcctgggcagcctgaaggagaagcccgtcaccaaggagggccgggcttccatcgtgcccctggcggcagccagcggcctgtgcgagctcctgtccgtcaacagctgcatgggccgtgtgaggcgcatctaccctcagctgctcctggccctgctcattcaggtccattaccacatcggcctcaacctgcctggctgcgtggctcctcccaaggacaccaagaagggtgcacagccctctcccttcgtacctgtgcgctgggtggtgaaagtggtgaaaaccctgctactgaggatgggctgctcttatgagaccacgtttctggaggaccagggtggctgggagctcatggagcaggtggagagccaccaccgcggagtggccttgctggcaagggccatggtgcagtactcctgccaggagctgtgccgcatcctctacctgctcatcccgctcctggagcgaggcgacgagaagcacaggatcacggccaccgccttcttcgtggagctcctccagatggagcaggtgcgccggatccccgaggaatactctctggggcggatggcagaaggcctgagccaccacgaccccatcatgaaggtgctgtccattcgaggcctggtcatcctggcccgcaggtctgagaagaccgccaaggtgaaggccctcctgccctccatggtgaagggcctgaagaacatggatgggatgctggtggtggaagcggtccacaacctcaaggctgtcttcaaggggcgggaccagaagctgatggacagtgcggtctatgtggagatgctgcagatcctgctgccgcacttcagcgacgcacgagaggtcgtgcgctcctcctgcatcaacctgtatgggaaggtggtccagaagcttcgggcaccacgcactcaggccatggaggagcagctggtcagcaccttggtgcccctactgctgaccatgcaggagggcaactccaaggtaagccagaagtgtgtgaagaccctgttacgctgttcttacttcatggcttgggagttgccaaaaagagcttatagccggaagccctgggacaaccaacagcagacagtggccaaaatttgcaagtgccttgtgaacacccaccgagacagcgccttcatattcctcagccagagcctggagtatgccaagaactcacgggcctccctccggaagtgctcagtcatgttcatagggtccctggtcccctgcatggagagcataatgacagaagatcgtctgaatgaagtgaaagctgctctggataacttgagacatgacccagaagcatcagtgtgcatctacgcagcccaggtccaggaccacatcctggccagctgctggcagaactcctggctgccgcacgggaactcatgggtgtgttactcagccaccacccaccgctggagccccagctgtgagaacctgcccacttcccaccagcggcgctcctggatcatgcaggcactgggctcctggaagatgtccttgaagaagtgacgtccctgagccccaaaccctcctcagggtggttgagttccagccatgctccctataaatgtcatgtggctta

SEQ ID NO: 150548 - DNA, 4542 bp, Homo sapiens
  Payload ID: 9735
  Gene Symbol: MROH7
  Gene Name: maestro heat-like repeat family member 7
  Uniprot ID: Q68CQ1
  ENST ID: ENST00000413188
  CDS Start-End: 822-2705
tagaaattggcagagaacaaggcagatgcagtttctgcatcagtggagctcattggctagtggggaagccagataccgtgagccaagagacgggaaggaacaaggtggcctgagaactttcaggtggcccccacctgtctaggggacctggaaggctcttagcatttgagctgaaacctgaaagggtgaagcagcagtcattagctggggaaggggagtggagatggatgcccagcctgtggaagacccagacctaactgggagagcctgcctctttggaggaagtcaaaagaactctgcaagggtggaacggaaaaggaaagggacatatggaggggcaaaaagggtgaaaaggggactggggccagatacagagggccttttgggtctgctaacaactggaggactctatcctaaagataacaggaagccatggaggggtttaggcaaggggatggcttagagatggtgttggctgcccagaaggccagtggggtgagtgaccttcctctctttgaccttcacttccttatgtataaatattaaacttactctctctctctctctctctctctgtgtgtgtgtgtttgtgtgtgtgtgtgtgtagtgcggagcttgttaacagacgtgcatgcctggcctgtggactgtgcagtaagtgttgaaaaaggcactcttccctgacttgatttctttctgcatctcctcccaggggcccgctcctgcttaaaaacaccatgcatgcagactgctgctgggaatgtgacagttggctgttggagagaagcgggcactggcattgagagacctccagactggacatggccctgagtccaggggctaacctggtcttccatgaagacccaaagatgacaccaagtcccccctcctgtggggccccgggattagggtctggtaccatccctcagccccacccagacatggctcaggtgcctatgttgaatctgctcccaagtcctggcttggctctcgttccagatcttaatgattctttgagtccagtctcaggggaggcctcaggcctggtgtctgaaaacacccccagacctgatgacagcagagctatcgctccagcctccctccagatcaccagttcttgttctggtgaagccctggacctggattccaaggatgtctcaaggcctgactcacaggggcgcctctgtccagcctcaaaccccattctgagccctagctctactgaggcccctcgtctgagctctgggaaccaccctcagtcaaattctgaagatgccttcaagtgcctctcaagtaagattttcaagttgggtcagagaaactccaacccttctaggcatgaattaaacccatttataaggcaccattccagagaaggtctggttctgggccactgcatctctaggccaagctcaaaagcactccttattccaacctcaaactcttctctggaccttgactccaatccattgctcaacatgggctcaagaaacacctccaagctgaacctgaatgtagctccagattctcatgggaccctaatcccagacacaaatgagaccatcactttggcttcacataatatctctgagtctgtttcaaaaggagcctttagtaccacctggagcacaagttcaaaggaaaccatgaatgtggcttccagcggccactccagatctgatttgagcgtgaccatcactcaagcctcgtatgtgaccctgattcctggctccagctatggtatcagcctgcactccagcacccatgagcccaactccaccatctctccaccctcatgcatgactctaatcctgggttccaatgagactctgagcctggactccagcctcctgttcagcgacacctccaccttgacgctgagcagtcagcaggatgatgccaaggacaacagcatccacactgtgcccctggaggagaatctggagagttggagtgagatggccagcattaaggtgggccagttcccgctgggattccccatctccaaccccgcaggcaaggacgccgtgaccttgcaaggcatccctgagggagcctttgatgaagtgacctcatgcctggtgaaggtgccagagaagacagaaggtggcaacaacatggctctggttgagaatgtcaccacccttcagaagagccaggatctgctggaggcagaaggagaaaagaagaccatgataaagaagattatgaggcagatccaggaggagccactggattctctctcaagctccgtccgcaagcaggccatggagatcctgacccagctgagccacacccagcccaccctgggcatgcgggagaggtcggagctggtgaacgtgtgtgtgcacagcgtgttctccctgccctccgtgcaggcgatgcaggagaaggacgaggccaaggctgagaccatccaggctctttaccatcagaccctggaggccctgcagacactgctcaaagccctctttatcgaggaccccactcctgctgggctgaagagcatcttggaggccctggggccttggatgaactctgggaaggcccatgagcgagcacgggctgtgaacaccaatgtctctgtgttgaaccacatgcttctaactctgcctttctttattgcaatacaaacagatgcccttggggttcccggcgctggggcttctgctggggagactcatccttcacattggggatcctgatgaggagattggctgtgaggctctggacggcatcatcatcctctacactattctggagctccaaaaacgagccagagataaggaagagaccaacaaaaaggagctatatgagagcaacaagcatttcctggggccctacaaccctgtgagcccgtgccagaacattctgcgggtgatcgaggaatttggagacttcctggggccccagcagataaaggacctgctgctggccgccctggaagggctgaaaggcagctcagaggctccagggaaggactccagggagatgatgcagctggcctcggaggtcatgctcagctcggtgctggagtggtaccgccacagggcgctggaggtgcaatggagcagagatgtggaggcagctgatactgtgtaagcccagctgtgatgtccgagacctcctggatctgctcctgggcagcctgaaggagaagcccgtcaccaaggagggccgggcttccatcgtgcccctggcgctgggtggtgaaagtggtgaaaaccctgctactgaggatgggctgctcttatgagaccacgtttctggaggaccagggtggctgggagctcatggagcaggtggagagccaccaccgcggagtggccttgctggcaagggccatggtgcagtactcctgccaggagctgtgccgcatcctctacctgctcatcccgctcctggagcgaggcgacgagaagcacaggatcacggccaccgccttcttcgtggagctcctccagatggagcaggtgcgccggatccccgaggaatactctctggggcggatggcagaaggcctgagccaccacgaccccatcatgaaggtgctgtccattcgaggcctggtcatcctggcccgcaggtctgagaagaccgccaaggtgaaggccctcctgccctccatggtgaagggcctgaagaacatggatgggatgctggtggtggaagcggtccacaacctcaaggctgtcttcaaggggcgggaccagaagctgatggacagtgcggtctatgtggagatgctgcagatcctgctgccgcacttcagcgacgcacgagaggtcgtgcgctcctcctgcatcaacctgtatgggaaggtggtccagaagcttcgggcaccacgcactcaggccatggaggagcagctggtcagcaccttggtgcccctactgctgaccatgcaggagggcaactccaaggtaagccagaagtgtgtgaagaccctgttacgctgttcttacttcatggcttgggagttgccaaaaagagcttatagccggaagccctgggacaaccaacagcagacagtggccaaaatttgcaagtgccttgtgaacacccaccgagacagcgccttcatattcctcagccagagcctggagtatgccaagaactcacgggcctccctccggaagtgctcagtcatgttcatagggtccctggtcccctgcatggagagcataatgacagaagatcgtctgaatgaagtgaaagctgctctggataacttgagacatgacccagaagcatcagtgtgcatctacgcagcccaggtccaggaccacatcctggccagctgctggcagaactcctggctgccgcacgggaactcatgggtgtgttactcagccaccacccaccgctggagccccagctgtgagaacctgcccacttcccaccagcggcgctcctggatcatgcaggcactgggctcctggaagatgtccttgaagaagtgacgtccctgagccccaaaccctcctcagggtggttgagttccagccatgctccctataaatgtcatgtggcttacctctc

SEQ ID NO: 150549 - DNA, 4329 bp, Homo sapiens
  Payload ID: 9735
  Gene Symbol: MROH7
  Gene Name: maestro heat-like repeat family member 7
  Uniprot ID: Q68CQ1
  ENST ID: ENST00000421030
  CDS Start-End: 286-4257
agctctgggaaagtcctaggggtgggggcagtctccacagcctcccacaagggagttaccaccttcccgcacttctgggtacaagtctcctgctctggctgtattccacagttagaacttcatatctttggcttagagctggattttctgttaccatgtggatgctccaggtgaaggggcccgctcctgcttaaaaacaccatgcatgcagactgctgctgggaatgtgacagttggctgttggagagaagcgggcactggcattgagagacctccagactggacatggccctgagtccaggggctaacctggtcttccatgaagacccaaagatgacaccaagtcccccctcctgtggggccccgggattagggtctggtaccatccctcagccccacccagacatggctcaggtgcctatgttgaatctgctcccaagtcctggcttggctctcgttccagatcttaatgattctttgagtccagtctcaggggaggcctcaggcctggtgtctgaaaacacccccagacctgatgacagcagagctatcgctccagcctccctccagatcaccagttcttgttctggtgaagccctggacctggattccaaggatgtctcaaggcctgactcacaggggcgcctctgtccagcctcaaaccccattctgagccctagctctactgaggcccctcgtctgagctctgggaaccaccctcagtcaaattctgaagatgccttcaagtgcctctcaagtaagattttcaagttgggtcagagaaactccaacccttctaggcatgaattaaacccatttataaggcaccattccagagaaggtctggttctgggccactgcatctctaggccaagctcaaaagcactccttattccaacctcaaactcttctctggaccttgactccaatccattgctcaacatgggctcaagaaacacctccaagctgaacctgaatgtagctccagattctcatgggaccctaatcccagacacaaatgagaccatcactttggcttcacataatatctctgagtctgtttcaaaaggagcctttagtaccacctggagcacaagttcaaaggaaaccatgaatgtggcttccagcggccactccagatctgatttgagcgtgaccatcactcaagcctcgtatgtgaccctgattcctggctccagctatggtatcagcctgcactccagcacccatgagcccaactccaccatctctccaccctcatgcatgactctaatcctgggttccaatgagactctgagcctggactccagcctcctgttcagcgacacctccaccttgacgctgagcagtcagcaggatgatgccaaggacaacagcatccacactgtgcccctggaggagaatctggagagttggagtgagatggccagcattaaggtgggccagttcccgctgggattccccatctccaaccccgcaggcaaggacgccgtgaccttgcaaggcatccctgagggagcctttgatgaagtgacctcatgcctggtgaaggtgccagagaagacagaaggtggcaacaacatggctctggttgagaatgtcaccacccttcagaagagccaggatctgctggaggcagaaggagaaaagaagaccatgataaagaagattatgaggcagatccaggaggagccactggattctctctcaagctccgtccgcaagcaggccatggagatcctgacccagctgagccacacccagcccaccctgggcatgcgggagaggtcggagctggtgaacgtgtgtgtgcacagcgtgttctccctgccctccgtgcaggcgatgcaggagaaggacgaggccaaggctgagaccatccaggctctttaccatcagaccctggaggccctgcagacactgctcaaagccctctttatcgaggaccccactcctgctgggctgaagagcatcttggaggccctggggccttggatgaactctgggaaggcccatgagcgagcacgggctgtgaacaccaatgtctctgtgttgaaccacatgcttctaactctgcctttctttatgcccttggggttcccggcgctggggcttctgctggggagactcatccttcacattggggatcctgatgaggagattggctgtgaggctctggacggcatcatcatcctctacactattctggagctccaaaaacgagccagagataaggaagagaccaacaaaaaggagctatatgagagcaacaagcatttcctggggccctacaaccctgtgagcccgtgccagaacattctgcgggtgatcgaggaatttggagacttcctggggccccagcagataaaggacctgctgctggccgccctggaagggctgaaaggcagctcagaggctccagggaaggactccagggagatgatgcagctggcctcggaggtcatgctcagctcggtgctggagtggtaccgccacagggcgctggaggtgatcccagaaatcatgcaaggcatctacatgcagctgagccacatccaggagcctcgggcccgccaggtggccctgctgcccgtctccctcctggctagctccttcatgaccgaggttgtggtggccctgctcatgtgccccctcccactgaacagcaatggagcagagatgtggaggcagctgatactgtgtaagcccagctgtgatgtccgagacctcctggatctgctcctgggcagcctgaaggagaagcccgtcaccaaggagggccgggcttccatcgtgcccctggcggcagccagcggcctgtgcgagctcctgtccgtcaacagctgcatgggccgtgtgaggcgcatctaccctcagctgctcctggccctgctcattcaggtccattaccacatcggcctcaacctgcctggctgcgtggctcctcccaaggacaccaagaagggtgcacagccctctcccttcgtacctgtgcgctgggtggtgaaagtggtgaaaaccctgctactgaggatgggctgctcttatgagaccacgtttctggaggaccagggtggctgggagctcatggagcaggtggagagccaccaccgcggagtggccttgctggcaagggccatggtgcagtactcctgccaggagctgtgccgcatcctctacctgctcatcccgctcctggagcgaggcgacgagaagcacaggatcacggccaccgccttcttcgtggagctcctccagatggagcaggtgcgccggatccccgaggaatactctctggggcggatggcagaaggcctgagccaccacgaccccatcatgaaggtgctgtccattcgaggcctggtcatcctggcccgcaggtctgagaagaccgccaaggtgaaggccctcctgccctccatggtgaagggcctgaagaacatggatgggatgctggtggtggaagcggtccacaacctcaaggctgtcttcaaggggcgggaccagaagctgatggacagtgcggtctatgtggagatgctgcagatcctgctgccgcacttcagcgacgcacgagaggtcgtgcgctcctcctgcatcaacctgtatgggaaggtggtccagaagcttcgggcaccacgcactcaggccatggaggagcagctggtcagcaccttggtgcccctactgctgaccatgcaggagggcaactccaaggtaagccagaagtgtgtgaagaccctgttacgctgttcttacttcatggcttgggagttgccaaaaagagcttatagccggaagccctgggacaaccaacagcagacagtggccaaaatttgcaagtgccttgtgaacacccaccgagacagcgccttcatattcctcagccagagcctggagtatgccaagaactcacgggcctccctccggaagtgctcagtcatgttcatagggtccctggtcccctgcatggagagcataatgacagaagatcgtctgaatgaagtgaaagctgctctggataacttgagacatgacccagaagcatcagtgtgcatctacgcagcccaggtccaggaccacatcctggccagctgctggcagaactcctggctgccgcacgggaactcatgggtgtgttactcagccaccacccaccgctggagccccagctgtgagaacctgcccacttcccaccagcggcgctcctggatcatgcaggcactgggctcctggaagatgtccttgaagaagtgacgtccctgagccccaaaccctcctcagggtggttgagttccagccatgctccctataaatgtcatgtggctt

SEQ ID NO: 150550 - DNA, 2658 bp, Homo sapiens
  Payload ID: 9735
  Gene Symbol: MROH7
  Gene Name: maestro heat-like repeat family member 7
  ENST ID: ENST00000440217
  CDS Start-End: 137-349
gttcccgctgggattccccatctccaaccccgcaggcaaggacgccgtgaccttgcaaggcatccctgagggagcctttgatgaagtgacctcatgcctggtgaaggtgccagagaagacagaaggtggcaacaacatggctctggttgagaatgtcaccacccttcagaagagccaggatctgctggaggcagaaggagaaaagaagaccatgataaagaagattatgccacacccagcccaccctgggcatgcgggagaggtcggagctggtgaacgtgtgtgtgcacagcgtgttctccctgccctccgtgcaggcgatgcaggagaaggacgaggccaaggctgagaccatccaggctctttaccatcagaccctggaggccctgcagacactgctcaaagccctctttatcgaggaccccactcctgctgggctgaagagcatcttggaggccctggggccttggatgaactctgggaaggcccatgagcgagcacgggctgtgaacaccaatgtctctgtgttgaaccacatgcttctaactctgcctttctttatgcccttggggttcccggcgctggggcttctgctggggagactcatccttcacattggggatcctgatgaggagattggctgtgaggctctggacggcatcatcatcctctacactattctggagctccaaaaacgagccagagataaggaagagaccaacaaaaaggagctatatgagagcaacaagcatttcctggggccctacaaccctgtgagcccgtgccagaacattctgcgggtgatcgaggaatttggagacttcctggggccccagcagataaaggacctgctgctggccgccctggaagggctgaaaggcagctcagaggctccagggaaggactccagggagatgatgcagctggcctcggaggtcatgctcagctcggtgctggagtggtaccgccacagggcgctggaggtgatcccagaaatcatgcaaggcatctacatgcagctgagccacatccaggagcctcgggcccgccaggtggccctgctgcccgtctccctcctggctagctccttcatgaccgaggttgtggtggccctgctcatgtgccccctcccactgaacaggcagccagcggcctgtgcgagctcctgtccgtcaacagctgcatgggccgtgtgaggcgcatctaccctcagctgctcctggccctgctcattcaggtccattaccacatcggcctcaacctgcctggctgcgtggctcctcccaaggacaccaagaagggtgcacagccctctcccttcgtacctgtgcgctgggtggtgaaagtggtgaaaaccctgctactgaggatgggctgctcttatgagaccacgtttctggaggaccagggtggctgggagctcatggagcaggtggagagccaccaccgcggagtggccttgctggcaagggccatggtgcagtactcctgccaggagctgtgccgcatcctctacctgctcatcccgctcctggagcgaggcgacgagaagcacaggatcacggccaccgccttcttcgtggagatggagcaggtgcgccggatccccgaggaatactctctggggcggatggcagaaggcctgagccaccacgaccccatcatgaaggtgctgtccattcgaggcctggtcatcctggcccgcaggtctgagaagaccgccaaggtgaaggccctcctgccctccatggtgaagggcctgaagaacatggatgggatgctggtggtggaagcggtccacaacctcaaggctgtcttcaaggggcgggaccagaagctgatggacagtgcggtctatgtggagatgctgcagatcctgctgccgcacttcagcgacgcacgagaggtcgtgcgctcctcctgcatcaacctgtatgggaaggtggtccagaagcttcgggcaccacgcactcaggccatggaggagcagctggtcagcaccttggtgcccctactgctgaccatgcaggagggcaactccaaggtaagccagaagtgtgtgaagaccctgttacgctgttcttacttcatggcttgggagttgccaaaaagagcttatagccggaagccctgggacaaccaacagcagacagtggccaaaatttgcaagtgccttgtgaacacccaccgagacagcgccttcatattcctcagccagagcctggagtatgccaagaactcacgggcctccctccggaagtgctcagtcatgttcatagggtccctggtcccctgcatggagagcataatgacagaagatcgtctgaatgaagtgaaagctgctctggataacttgagacatgacccagaagcatcagtgtgcatctacgcagcccaggtccaggaccacatcctggccagctgctggcagaactcctggctgccgcacgggaactcatgggtgtgttactcagccaccacccaccgctggagccccagctgtgagaacctgcccacttcccaccagcggcgctcctggatcatgcaggcactgggctcctggaagatgtccttgaagaagtgacgtccctgagccccaaaccctcctcagggtggttgagttccagccatgctccctataaatgtcatgtggcttac

SEQ ID NO: 150551 - DNA, 4148 bp, Homo sapiens
  Payload ID: 9735
  Gene Symbol: MROH7
  Gene Name: maestro heat-like repeat family member 7
  ENST ID: ENST00000440047
  CDS Start-End: 278-2542
gaaagtcctaggggtgggggcagtctccacagcctcccacaagggagttaccaccttcccgcacttctgggtacaagtctcctgctctggctgtattccacagttagaacttcatatctttggcttagagctggattttctgttaccatgtggatgctccaggtgaaggggcccgctcctgcttaaaaacaccatgcatgcagactgctgctgggaatgtgacagttggctgttggagagaagcgggcactggcattgagagacctccagactggacatggccctgagtccaggggctaacctggtcttccatgaagacccaaagatgacaccaagtcccccctcctgtggggccccgggattagggtctggtaccatccctcagccccacccagacatggctcaggtgcctatgttgaatctgctcccaagtcctggcttggctctcgttccagatcttaatgattctttgagtccagtctcaggggaggcctcaggcctggtgtctgaaaacacccccagacctgatgacagcagagctatcgctccagcctccctccagatcaccagttcttgttctggtgaagccctggacctggattccaaggatgtctcaaggcctgactcacaggggcgcctctgtccagcctcaaaccccattctgagccctagctctactgaggcccctcgtctgagctctgggaaccaccctcagtcaaattctgaagatgccttcaagtgcctctcaagtaagattttcaagttgggtcagagaaactccaacccttctaggcatgaattaaacccatttataaggcaccattccagagaaggtctggttctgggccactgcatctctaggccaagctcaaaagcactccttattccaacctcaaactcttctctggaccttgactccaatccattgctcaacatgggctcaagaaacacctccaagctgaacctgaatgtagctccagattctcatgggaccctaatcccagacacaaatgagaccatcactttggcttcacataatatctctgagtctgtttcaaaaggagcctttagtaccacctggagcacaagttcaaaggaaaccatgaatgtggcttccagcggccactccagatctgatttgagcgtgaccatcactcaagcctcgtatgtgaccctgattcctggctccagctatggtatcagcctgcactccagcacccatgagcccaactccaccatctctccaccctcatgcatgactctaatcctgggttccaatgagactctgagcctggactccagcctcctgttcagcgacacctccaccttgacgctgagcagtcagcaggatgatgccaaggacaacagcatccacactgtgcccctggaggagaatctggagagttggagtgagatggccagcattaaggtgggccagttcccgctgggattccccatctccaaccccgcaggcaaggacgccgtgaccttgcaaggcatccctgagggagcctttgatgaagtgacctcatgcctggtgaaggtgccagagaagacagaaggtggcaacaacatggctctggttgagaatgtcaccacccttcagaagagccaggatctgctggaggcagaaggagaaaagaagaccatgataaagaagattatgaggcagatccaggaggagccactggattctctctcaagctccgtccgcaagcaggccatggagatcctgacccagctgagccacacccagcccaccctgggcatgcgggagaggtcggagctggtgaacgtgtgtgtgcacagcgtgttctccctgccctccgtgcaggcgatgcaggagaaggacgaggccaaggctgagaccatccaggctctttaccatcagaccctggaggccctgcagacactgctcaaagccctctttatcgaggaccccactcctgctgggctgaagagcatcttggaggccctggggccttggatgaactctgggaaggcccatgagcgagcacgggctgtgaacaccaatgtctctgtgttgaaccacatgcttctaactctgcctttctttatgcccttggggttcccggcgctggggcttctgctggggagactcatccttcacattggggatcctgatgaggagattggctgtgaggctctggacggcatcatcatcctctacactattctggagctccaaaaacgagccagagataaggaagagaccaacaaaaaggagctatatgagagcaacaagcatttcctggggccctacaaccctgtgagcccgtgccagaacattctgcgggtgatcgaggaatttggagacttcctggggccccagcagataaaggacctgctgctggccgccctggaagggctgaaaggcagctcagaggctccagggaaggactccagggagatgatgcagctggcctcggaggtcatgctcagctcggtgctggagtggtaccgccacagggcgctggaggtgcaatggagcagagatgtggaggcagctgatactgtgtaagcccagctgtgatgtccgagacctcctggatctgctcctgggcagcctgaaggagaagcccgtcaccaaggagggccgggcttccatcgtgcccctggcggcagccagcggcctgtgcgagctcctgtccgtcaacagctgcatgggccgtgtgaggcgcatctaccctcagctgctcctggccctgctcattcaggtccattaccacatcggcctcaacctgcctggctgcgtggctcctcccaaggacaccaagaagggtgcacagccctctcccttcgtacctgtgcgctgggtggtgaaagtggtgaaaaccctgctactgaggatgggctgctcttatgagaccacgtttctggaggaccagggtggctgggagctcatggagcaggtggagagccaccaccgcggagtggccttgctggcaagggccatggtgcagtactcctgccaggagctgtgccgcatcctctacctgctcatcccgctcctggagcgaggcgacgagaagcacaggatcacggccaccgccttcttcgtggagctcctccagatggagcaggtgcgccggatccccgaggaatactctctggggcggatggcagaaggcctgagccaccacgaccccatcatgaaggtgctgtccattcgaggcctggtcatcctggcccgcaggtctgagaagaccgccaaggtgaaggccctcctgccctccatggtgaagggcctgaagaacatggatgggatgctggtggtggaagcggtccacaacctcaaggctgtcttcaaggggcgggaccagaagctgatggacagtgcggtctatgtggagatgctgcagatcctgctgccgcacttcagcgacgcacgagaggtcgtgcgctcctcctgcatcaacctgtatgggaaggtggtccagaagcttcgggcaccacgcactcaggccatggaggagcagctggtcagcaccttggtgcccctactgctgaccatgcaggagggcaactccaaggtaagccagaagtgtgtgaagaccctgttacgctgttcttacttcatggcttgggagttgccaaaaagagcttatagccggaagccctgggacaaccaacagcagacagtggccaaaatttgcaagtgccttgtgaacacccaccgagacagcgccttcatattcctcagccagagcctggagtatgccaagaactcacgggcctccctccggaagtgctcagtcatgttcatagggtccctggtcccctgcatggagagcataatgacagaagatcgtctgaatgaagtgaaagctgctctggataacttgagacatgacccagaagcatcagtgtgcatctacgcagcccaggtccaggaccacatcctggccagctgctggcagaactcctggctgccgcacgggaactcatgggtgtgttactcagccaccacccaccgctggagccccagctgtgagaacctgcccacttcccaccagcggcgctcctggatcatgcaggcactgggctcctggaagatgtccttgaagaagtgacgtccctgagccccaaaccctcctcagggtggttgagttccagccatgctccct

SEQ ID NO: 150552 - DNA, 3362 bp, Homo sapiens
  Payload ID: 9735
  Gene Symbol: MROH7
  Gene Name: maestro heat-like repeat family member 7
  Uniprot ID: Q68CQ1
  ENST ID: ENST00000438846
  CDS Start-End: 37-1920
agcgggcactggcattgagagacctccagactggacatggccctgagtccaggggctaacctggtcttccatgaagacccaaagatgacaccaagtcccccctcctgtggggccccgggattagggtctggtaccatccctcagccccacccagacatggctcaggtgcctatgttgaatctgctcccaagtcctggcttggctctcgttccagatcttaatgattctttgagtccagtctcaggggaggcctcaggcctggtgtctgaaaacacccccagacctgatgacagcagagctatcgctccagcctccctccagatcaccagttcttgttctggtgaagccctggacctggattccaaggatgtctcaaggcctgactcacaggggcgcctctgtccagcctcaaaccccattctgagccctagctctactgaggcccctcgtctgagctctgggaaccaccctcagtcaaattctgaagatgccttcaagtgcctctcaagtaagattttcaagttgggtcagagaaactccaacccttctaggcatgaattaaacccatttataaggcaccattccagagaaggtctggttctgggccactgcatctctaggccaagctcaaaagcactccttattccaacctcaaactcttctctggaccttgactccaatccattgctcaacatgggctcaagaaacacctccaagctgaacctgaatgtagctccagattctcatgggaccctaatcccagacacaaatgagaccatcactttggcttcacataatatctctgagtctgtttcaaaaggagcctttagtaccacctggagcacaagttcaaaggaaaccatgaatgtggcttccagcggccactccagatctgatttgagcgtgaccatcactcaagcctcgtatgtgaccctgattcctggctccagctatggtatcagcctgcactccagcacccatgagcccaactccaccatctctccaccctcatgcatgactctaatcctgggttccaatgagactctgagcctggactccagcctcctgttcagcgacacctccaccttgacgctgagcagtcagcaggatgatgccaaggacaacagcatccacactgtgcccctggaggagaatctggagagttggagtgagatggccagcattaaggtgggccagttcccgctgggattccccatctccaaccccgcaggcaaggacgccgtgaccttgcaaggcatccctgagggagcctttgatgaagtgacctcatgcctggtgaaggtgccagagaagacagaaggtggcaacaacatggctctggttgagaatgtcaccacccttcagaagagccaggatctgctggaggcagaaggagaaaagaagaccatgataaagaagattatgaggcagatccaggaggagccactggattctctctcaagctccgtccgcaagcaggccatggagatcctgacccagctgagccacacccagcccaccctgggcatgcgggagaggtcggagctggtgaacgtgtgtgtgcacagcgtgttctccctgccctccgtgcaggcgatgcaggagaaggacgaggccaaggctgagaccatccaggctctttaccatcagaccctggaggccctgcagacactgctcaaagccctctttatcgaggaccccactcctgctgggctgaagagcatcttggaggccctggggccttggatgaactctgggaaggcccatgagcgagcacgggctgtgaacaccaatgtctctgtgttgaaccacatgcttctaactctgcctttctttattgcaatacaaacagatgcccttggggttcccggcgctggggcttctgctggggagactcatccttcacattggggatcctgatgaggagattggctgtgaggctctggacggcatcatcatcctctacactattctggagctccaaaaacgagccagagataaggaagagaccaacaaaaaggagctatatgagagcaacaagcatttcctggggccctacaaccctgtgagcccgtgccagaacattctgcgggtgatcgaggaatttggagacttcctggggccccagcagataaaggacctgctgctggccgccctggaagggctgaaaggcagctcagaggctccagggaaggactccagggagatgatgcagctggcctcggaggtcatgctcagctcggtgctggagtggtaccgccacagggcgctggaggtgatcccagaaatcatgcaaggcatctacatgcagctgagccacatccaggagcctcgggcccgccaggtggccctgctgcccgtctccctcctggctagctccttcatgaccgaggttgtggtggccctgctcatgtgccccctcccactgaacagcaatggagcagagatgtggaggcagctgatactgtgtaagcccagctgtgatgtccgagacctcctggatctgctcctgggcagcctgaaggagaagcccgtcaccaaggagggccgggcttccatcgtgcccctggcggcagccagcggcctgtgcgagctcctgtccgtcaacagctgcatgggccgtgtgaggcgcatctaccctcagctgctcctggccctgctcattcaggtccattaccacatcggcctcaacctgcctggctgcgtggctcctcccaaggacaccaagaagggtgcacagccctctcccttcgtacctgtgcgctgggtggtgaaagtggtgaaaaccctgctactgaggatgggctgctcttatgagaccacgtttctggaggaccagggtggctgggagctcatggagcaggtggagagccaccaccgcggagtggccttgctggcaagggccatggtgcagtactcctgccaggagctgtgccgcatcctctacctgctcatcccgctcctggagcgaggcgacgagaagcacaggatcacggccaccgccttcttcgtggagactcccctagtgcccagggaaccaccaacctttgctgggcacctctgtgtgtcaggcacgagacatataaatgtgaatttgactctaccctgccctcaaggaatttttggtgtggcagaggacacagaggacaccccagttataacagggggtgataccacaaccctgcgaagaaggaattgtgatactcatgcttaggatctcatgggaaaggcaacaacaagcagtcacaggggctcggagctggagagtgacacactcagctttgccacatggtgctgatggacatcagacggagacttccagcaatctgttggttttgcaagtctgaagctccgggcagagc

SEQ ID NO: 150553 - DNA, 3425 bp, Homo sapiens
  Payload ID: 9736
  Gene Symbol: MROH8
  Gene Name: maestro heat-like repeat family member 8
  ENST ID: ENST00000343811
  CDS Start-End: 1-3209
aggtcgcgggcactcccaccagctcgcagccctccttcggaccctcgatccgagagcgccccagccagagcttgtgcccatgcccctgtcccgcaggggaaggggatcccgcctggccggctctcgagcggcgactagtaacctcccgcgggcgacagccctctccccaaagccacgcgcaactcctcacccggcggcgccattcctccgagcaggtcccgccggagtccgagccgcgggctgacttccgctcgggaaagtggctccaagagcccgccacaggggacgccagggactcgcggcaggctctgcgggccaggatgagttctaagcacaggatctgtagtcaggaagaagtagtgatcccctgtgcctatgacagtgattcagaaagtgtggatttggagctgagcaacttagagattattaaaaaaggctcaagtagcattgaactgacagacttggacatccctgacatccctggactccattgtgagcccctgtcacatagccccagacacctgacccaacaggacccgctcagtgaggccattgttgagaaactgatccagtccatccagaaggttttcaatggtgagctaaagggtgaacttgaaaagctgaaattcctaggagatctgtcttctctcagccaagctttaccttatgatgaaaccgcaaaatcattcattcacagccacatagcagacattgtgcataccttaaatgtactggtacaagaggaacgcccgcattctctgtccagttccatgcgccaggaggtctttgtcaccatcgctgatctcagttaccaagatgtccatttgctgttgggctctgaagatcgagctgagttgttcagtcttaccatcaagagtataatcactctgccctctgtaaggacccttacccagatacaggaaatcatgcccaatgggacctgcaacacagagtgtctttacaggcagacgtttcaggcattctctgagatgctccagagtttggtggtaaaagacccacatttggaaaatcttgacaccattattaagcacttggtcccctggttacagtcagtcaaagaccatgagcgggaacgggccacggccagcatggctcaagttctgaagtgcctatccaaacatctcaacttgaagcttccactgcgattccaaagacttggacacctagtggctctgatggcactgctctgtggggacccacaggaaaaggtggctgaggaggctgcagagggcattcactccctgctgcatatcaccctgaggctgaagtatatcactcatgacaagaaagatcagcaaaacttgaaaagagcattgacaaaatgtcgagaattcctggagctccacagctctgccgctaaatgcttctacaactgtcccttcagaattgcccaggtctttgaaggttttcttgattcaaatgagctctgccagtttataatgactacatttgataccctgaaaaccctgaaacatccctgcatccagcgatcagcaggagaattactgctaactttggcaaaaaatacagagtcccaatttgagaaggtgccagaaattatgggagttatctgtgcccagttatccataatcagccagcctagagtccgccaacaaatcataaataccgtgagtttatttatatccagacccaagtacacagatatagtgctcagcttccttctgtgtcatccagtgccgtataacaggcacctggctgaggtgtggagaatgctgtcggtggagcttcccagcacgacctggattctgtggaggctcctgaggaagctgcagaaatgccataatgagcctgcacaggagaagatggcatatgtggctgtggctgcaacagatgccctttatgaggtgtttttgggaaacaggcttcgagcagctacgttccgactctttcctcagcttctcatgacactgcttatccagattcatcacagcatcggcctcaccatgtctgatgtcgacatcccaagtggcctgtacacagaacaggaagtgccttcagaggtcacccctttgtgctttgccatgcaggctacaaagactctcctcctcagaacatgctgcttgcaggaattcaacatcatggaaaagaataaaggatgggctctcctgggaggaaaagatggccatcttcagggactatttctccttgccaacgcattgctggaaagaaatcagctccttgcacagaaggtcatgtacttattagtccctcttcttaaccgagggaatgataaacataaactcacatctgcaggcttttttgtggagcttctccggagtccagtggccaagagactgcccagcatatactctgttgcccgctttaaagactggctacaagatggaaatcatctctttagaattctcggcctgaggggactgtacaatcttgttggacaccaggagatgagagaagacatcaagagcctgttgccatacattgtagacagcttgcgtgaaaccgatgagaagatcgttctgtcagccatccagatactcctgcaacttgttagaacaatggatttcactaccctggctgccatgatgaggaccctgttctccttatttggtgatgtgagatctgatgttcatcgtttctccgtgactctctttggagccgccataaagtctgtaaaaaacccagataagaagagtatagagaaccaagtcctggacagcttggtcccactacttctgtattctcaggatgaaaatgatgcagtagctgaggagagcaggcaagtcctaactatatgtgcccagttcctgaagtggaagctgccccaagaagtgtactccaaagatccctggcacatcaaacctactgaagcaggaacaatctgcagattctttgaaaaaaagtgcaaggggaaaattaacatcctagaacaaacactgatgtactccaagaacccaaaacttcccatcagaagatcagcagtcttgtttgtaggccttttatcgaagtacatggatcacaatgagctcaggaggatgggtactgactggatagaggacgatctgagagacctgctgtgtgaccctgagccctcgctgtgcatcatcgcttcccagactctgttactagtccagatggcgagggccgaaccaaaacctaagcagagagtgaactggttgcagaagctcatgggcaggtcctctgcctagaaacacaaggcaagcaacatcagagacagaatcttgctatgttgtgcggcaagctagtcttgaactcatggcctcaagtcatcctcctgtgtcagcctcccaaagtgctgggattacaagcatgcaccacggcacccagcagaattccagtcttgagaaacaggtcaaggacagcttcaaaagagattctaaataaatgttaatgttacaatgtta

SEQ ID NO: 150554 - DNA, 2088 bp, Homo sapiens
  Payload ID: 9736
  Gene Symbol: MROH8
  Gene Name: maestro heat-like repeat family member 8
  ENST ID: ENST00000400440
  CDS Start-End: 1-1889
accaaccccgccaggtcgcgggcactcccaccagctcgcagccctccttcggaccctcgatccgagagcgccccagccagagcttgtgcccatgcccctgtcccgcaggggaaggggatcccgcctggccggctctcgagcggcgactagtaacctcccgcgggcgacagccctctccccaaagccacgcgcaactcctcacccggcggcgccattcctccgagcaggtcccgccggagtccgagccgcgggctgacttccgctcgggaaagtggctccaagagcccgccacaggggacgccagggactcgcggcaggctctgcgggccaggatgagttctaagcacaggatctgtagtcaggaagaagtagtgatcccctgtgcctatgacagtgattcagaaagtgtggatttggagctgagcaacttagagattattaaaaaaggctcaagtagcattgaactgacagacttggacatccctgacatccctggactccattgtgagcccctgtcacatagccccagacacctgacccaacaggacccgctcagtgaggccattgttgagaaactgatccagtccatccagaaggttttcaatggtgagctaaagggtgaacttgaaaagctgaaattcctaggagatctgtcttctctcagccaagctttaccttatgatgaaaccgcaaaatcattcattcacagccacatagcagacattgtgcataccttaaatgtactggtacaagaggaacgcccgcattctctgtccagttccatgcgccaggaggtctttgtcaccatcgctgatctcagttaccaagatgtccatttgctgttgggctctgaagatcgagctgagttgttcagtcttaccatcaagagtataatcactctgccctctgtaaggacccttacccagatacaggaaatcatgcccaatgggacctgcaacacagagtgtctttacaggcagacgtttcaggcattctctgagatgctccagagtttggtggtaaaagacccacatttggaaaatcttgacaccattattaagcacttggtcccctggttacagtcagtcaaagaccatgagcgggaacgggccacggccagcatggctcaagttctgaagtgcctatccaaacatctcaacttgaagcttccactgcgattccaaagacttggacacctagtggctctgatggcactgctctgtggggacccacaggaaaaggtggctgaggaggctgcagagggcattcactccctgctgcatatcaccctgaggctgaagtatatcactcatgacaagaaagatcagcaaaacttgaaaagagcattgacaaaatgtcgagaattcctggagctccacagctctgccgctaaatgcttctacaactgtcccttcagaattgcccaggtctttgaaggttttcttgattcaaatgagctctgccagtttataatgactacatttgataccctgaaaaccctgaaacatccctgcatccagcgatcagcaggagaattactgctaactttggcaaaaaatacagagtcccaatttgagaaggtgccagaaattatgggagttatctgtgcccagttatccataatcagccagcctagagtccgccaacaaatcataaataccgtgagtttatttatatccagacccaagtacacagatatagtgctcagcttccttctgtgtcatccagtgccgtataacaggcacctggctgaggtgtggagaatgctgtcggtggagcttcccagcacgacctggattctgtggaggctcctgaggaagctgcagaaatgccataatgagcctgcacaggagaagatggcatatgtggctgtggctgtaagcccttgagctttgcccctctaatgtcagcccctcccaggatgactgaccccacaccccagtggagagtgttccttttggtccctctcaaagcctgcatctgtcatccatttataagtctacagtgtttctgccaagggattgacatggagggagctggggagagtgaaggagtcagaatgccttaatacaaactcgtccaacctgc

SEQ ID NO: 150555 - DNA, 3345 bp, Homo sapiens
  Payload ID: 9736
  Gene Symbol: MROH8
  Gene Name: maestro heat-like repeat family member 8
  ENST ID: ENST00000400441
  CDS Start-End: 1-2841
atgcccctgtcccgcaggggaaggggatcccgcctggccggctctcgagcggcgactagtaacctcccgcgggcgacagccctctccccaaagcacgcgcaactcctcacccggcggcgccattcctccgagcaggtcccgccggagtccgagccgcgggctgacttccgctcgggaaagtggctccaagagcccgccacaggggacgccagggactcgcggcaggctctgcgggccaggatgagttctaagcacaggatctgtagtcaggaagaagtagtgatcccctgtgcctatgacagtgattcagaaagtgtggatttggagctgagcaacttagagattattaaaaaaggctcaagtagcattgaactgacagacttggacatccctgacatccctggactccattgtgagcccctgtcacatagccccagacacctgacccaacaggacccgctcagtgaggccattgttgagaaactgatccagtccatccagaaggttttcaatggtgagctaaagggtgaacttgaaaagctgaaattcctaggagatctgtcttctctcagccaagctttaccttatgatgaaaccgcaaaatcattcattcacagccacatagcagacattgtgcataccttaaatgtactggtacaagaggaacgcccgcattctctgtccagttccatgcgccaggaggtctttgtcaccatcgctgatctcagttaccaagatgtccatttgctgttgggctctgaagatcgagctgagttgttcagtcttaccatcaagagtataatcactctgccctctgtaaggacccttacccagatacaggaaatcatgcccaatgggacctgcaacacagagtgtctttacaggcagacgtttcaggcattctctgagatgctccagagtttggtggtaaaagacccacatttggaaaatcttgacaccattattaagcacttggtcccctggttacagtcagtcaaagaccatgagcgggaacgggccacggccagcatggctcaagttctgaagtgcctatccaaacatctcaacttgaagcttccactgcgattccaaagacttggacacctagtggctctgatggcactgctctgtggggacccacaggaaaaggtggctgaggaggctgcagagggcattcactccctgctgcatatcaccctgaggctgaagtatatcactcatgacaagaaagatcagcaaaacttgaaaagagcattgacaaaatgtcgagaattcctggagctccacagctctgccgctaaatgcttctacaactgtcccttcagaattgcccaggtctttgaaggttttcttgattcaaatgagctctgccagtttataatgactacatttgataccctgaaaaccctgaaacatccctgcatccagcgatcagcaggagaattactgctaactttggcaaaaaatacagagtcccaatttgagaaggtgccagaaattatgggagttatctgtgcccagttatccataatcagccagcctagagtccgccaacaaatcataaataccgtgagtttatttatatccagacccaagtacacagatatagtgctcagcttccttctgtgtcatccagtgccgtataacaggcacctggctgaggtgtggagaatgctgtcggtggagcttcccagcacgacctggattctgtggaggctcctgaggaagctgcagaaatgccataatgagcctgcacaggagaagatggcatatgtggctgtggctgcaacagatgccctttatgaggtgtttttgggaaacaggcttcgagcagctacgttccgactctttcctcagcttctcatgacactgcttatccagattcatcacagcatcggcctcaccatgtctgatgtcgacatcccaagtggcctgtacacagaacaggaagtgccttcagaggtcacccctttgtgctttgccatgcaggctacaaagactctcctcctcagaacatgctgcttgcaggaattcaacatcatggaaaagaataaaggatgggctctcctgggaggaaaagatggccatcttcagggactatttctccttgccaacgcattgctggaaagaaatcagctccttgcacagaaggtcatgtacttattagtccctcttcttaaccgagggaatgataaacataaactcacatctgcaggcttttttgtggagcttctccggagtccagtggccaagagactgcccagcatatactctgttgcccgctttaaagactggctacaagatggaaatcatctctttagaattctcggcctgaggggactgtacaatcttgttggacaccaggagatgagagaagacatcaagagcctgttgccatacattgtagacagcttgcgtgaaaccgatgagaagatcgttctgtcagccatccagatactcctgcaacttgttagaacaatggatttcactaccctggctgccatgatgaggaccctgttctccttatttggtgatgtgagatctgatgttcatcgtttctccgtgactctctttggagccgccataaagtctgtaaaaaacccagataagaagagtatagagaaccaagtcctggacagcttggtcccactacttctgtattctcaggatgaaaatgatgcagtagctgaggagagcaggcaagtcctaactatatgtgcccagttcctgaagtggaagctgccccaagaagtgtactccaaagatccctggcacatcaaacctactgaagcaggaacaatctgcagattctttggaaaaaaagtgcaaggggaaaattaacatcctagaacaaacactgatgtactccaagaacccaaaacttcccatcagaagatcagcagtcttgtttgtaggccttttatcgaagtacatggatcacaatgagctcaggaggatgggtactgactggatagaggacgatctgagagacctgctgtgtgaccctgagccctcgctgtgcatcatcgcttcccagactctgttactagtccagatggcgagggccgaaccaaaacctaagcagagagtgaactggttgcagaagctcatgggcaggtcctctgcctagaaacacaaggcaagcaacatcagagacagaatcttgctatgttgtgcggcaagctagtcttgaactcatggcctcaagtcatcctcctgtgtcagcctcccaaagtgctgggattacaagcatgcaccacggcacccagcagaattccagtcttgagaaacaggtcaaggacagcttcaaaagagattctaaataaatgttaatgttacaatgtt

SEQ ID NO: 150556 - DNA, 531 bp, Homo sapiens
  Payload ID: 9736
  Gene Symbol: MROH8
  Gene Name: maestro heat-like repeat family member 8
  ENST ID: ENST00000434295
  CDS Start-End: 428-531
ccggagtccgagccgcgggctgacttccgctcgggaaagtggctccaagagcccgccacaggggacgccagggactcgcggcaggctctgcgggccaggatgagttctaagcacagacttggacatccctgacatccctggactccattgtgagcccctgtcacatagccccagacacctgacccaacaggacccgctcagtgaggccattgttgagaaactgatccagtccatccagaaggttttcaatggtgagctaaagggtgaacttgaaaagctgaaattcctaggagatctgtcttctctcagccaagctttaccttatgatgaaaccgcaaaatcattcattcacagccacatagcagacattgtgcataccttaaatgtactggtacaagaggaacgcccgcattctctgtccagttccatgcgccaggaggtctttgtcaccatcgctgatctcagttaccaagatgtccatttgctgttgggctctgaagatcgagctgagttgttcagtcttaccatcaa

SEQ ID NO: 150557 - DNA, 675 bp, Homo sapiens
  Payload ID: 9736
  Gene Symbol: MROH8
  Gene Name: maestro heat-like repeat family member 8
  ENST ID: ENST00000422138
  CDS Start-End: 602-675
gctgcccggcccattttaaaggaacaggaagggtctcgtcgggaggggatagcttagaagggatttttttttcctctttagaaaattgtggcagtttctggccgggcgcagtggctcacgcctgtaatcccagaactttgggaggccgaggcgggcggattacctgaggatctgtagtcaggaagaagtagtgatcccctgtgcctatgacagtgattcagaaagtgtggatttggagctgagcaacttagagattattaaaaaaggctcaagtagcattgaactgacagacttggacatccctgacatccctggactccattgtgagcccctgtcacatagccccagacacctgacccaacaggacccgctcagtgaggccattgttgagaaactgatccagtccatccagaaggttttcaatggtgagctaaagggtgaacttgaaaagctgaaattcctaggagatctgtcttctctcagccaagctttaccttatgatgaaaccgcaaaatcattcattcacagccacatagcagacattgtgcataccttaaatgtactggtacaagaggaacgcccgcattctctgtccagttccatgcgccaggaggtctttgtcaccatcgctgatctcagttaccaagatgtccatttgctgttgggctctgaaga

SEQ ID NO: 150558 - DNA, 2000 bp, Homo sapiens
  Payload ID: 9736
  Gene Symbol: MROH8
  Gene Name: maestro heat-like repeat family member 8
  Uniprot ID: Q9H579
  ENST ID: ENST00000421643
  CDS Start-End: 1-1801
gcacccctcccccaggcaccaaccccgccaggtcgcgggcactcccaccagctcgcagccctccttcggaccctcgatccgagagcgccccagccagagcttgtgcccatgcccctgtcccgcaggggaaggggatcccgcctggccggctctcgagcggcgactagtaacctcccgcgggcgacagccctctccccaaagccacgcgcaactcctcacccggcggcgccattcctccgagcaggtcccgccggagtccgagccgcgggctgacttccgctcgggaaagtggctccaagagcccgccacaggggacgccagggactcgcggcaggctctgcgggccaggatgagttctaagcacaggatctgtagtcaggaagaagtagtgatcccctgtgcctatgacagtgattcagaaagtgtggatttggagctgagcaacttagagattattaaaaaaggctcaagtagcattgaactgacagacttggacatccctgacatccctggactccattgtgagcccctgtcacatagccccagacacctgacccaacaggacccgctcagtgaggccattgttgagaaactgatccagtccatccagaaggttttcaatggtgagctaaagggtgaacttgaaaagctgaaattcctaggagatctgtcttctctcagccaagctttaccttatgatgaaaccgcaaaatcattcattcacagccacatagcagacattgtgcataccttaaatgtactggtacaagaggaacgcccgcattctctgtccagttccatgcgccaggaggtctttgtcaccatcgctgatctcagttaccaagatgtccatttgctgttgggctctgaagatcgagctgagttgttcagtcttaccatcaagagtataatcactctgccctctgtaaggacccttacccagatacaggaaatcatgcccaatgggacctgcaacacagagtgtctttacaggcagacgtttcaggcattctctgagatgctccagagtttggtggtaaaagacccacatttggaaaatcttgacaccattattaagcttccactgcgattccaaagacttggacacctagtggctctgatggcactgctctgtggggacccacaggaaaaggtggctgaggaggctgcagagggcattcactccctgctgcatatcaccctgaggctgaagtatatcactcatgacaagaaagatcagcaaaacttgaaaagagcattgacaaaatgtcgagaattcctggagctccacagctctgccgctaaatgcttctacaactgtcccttcagaattgcccaggtctttgaaggttttcttgattcaaatgagctctgccagtttataatgactacatttgataccctgaaaaccctgaaacatccctgcatccagcgatcagcaggagaattactgctaactttggcaaaaaatacagagtcccaatttgagaaggtgccagaaattatgggagttatctgtgcccagttatccataatcagccagcctagagtccgccaacaaatcataaataccgtgagtttatttatatccagacccaagtacacagatatagtgctcagcttccttctgtgtcatccagtgccgtataacaggcacctggctgaggtgtggagaatgctgtcggtggagcttcccagcacgacctggattctgtggaggctcctgaggaagctgcagaaatgccataatgagcctgcacaggagaagatggcatatgtggctgtggctgtaagcccttgagctttgcccctctaatgtcagcccctcccaggatgactgaccccacaccccagtggagagtgttccttttggtccctctcaaagcctgcatctgtcatccatttataagtctacagtgtttctgccaagggattgacatggagggagctggggagagtgaaggagtcagaatgccttaatacaaactcgtccaacctgc

SEQ ID NO: 150559 - DNA, 2227 bp, Homo sapiens
  Payload ID: 9736
  Gene Symbol: MROH8
  Gene Name: maestro heat-like repeat family member 8
  ENST ID: ENST00000417458
  CDS Start-End: 1-2011
ctgcaacacagagtgtctttacaggcagacgtttcaggcattctctgagatgctccagagtttggtggtaaaagacccacatttggaaaatcttgacaccattattaagcttccactgcgattccaaagacttggacacctagtggctctgatggcactgctctgtggggacccacaggaaaaggtggctgaggaggctgcagagggcattcactccctgctgcatatcaccctgaggctgaagtatatcactcatgacaagaaagatcagcaaaacttgaaaagagcattgacaaaatgtcgagaattcctggagctccacagctctgccgctaaatgcttctacaactgtcccttcagaattgcccaggtgccagaaattatgggagttatctgtgcccagttatccataatcagccagcctagagtccgccaacaaatcataaataccgtgagtttatttatatccagacccaagtacacagatatagtgctcagcttccttctgtgtcatccagtgccgtataacaggcacctggctgaggtgtggagaatgctgtcggtggagcttcccagcacgacctggattctgtggaggctcctgaggaagctgcagaaatgccataatgagcctgcacaggagaagatggcatatgtggctgtggctgcaacagatgccctttatgaggtgtttttgggaaacaggcttcgagcagctacgttccgactctttcctcagcttctcatgacactgcttatccagattcatcacagcatcggcctcaccatgtctgatgtcgacatcccaagtggcctgtacacagaacaggaagtgccttcagaggtcacccctttgtgctttgccatgcaggctacaaagactctcctcctcagaacatgctgcttgcaggaattcaacatcatggaaaagaataaaggatgggctctcctgggaggaaaagatggccatcttcagggactatttctccttgccaacgcattgctggaaagaaatcagctccttgcacagaaggtcatgtacttattagtccctcttcttaaccgagggaatgataaacataaactcacatctgcaggcttttttgtggagcttctccggagtccagtggccaagagactgcccagcatatactctgttgcccgctttaaagactggctacaagatggaaatcatctctttagaattctcggcctgaggggactgtacaatcttgttggacaccaggagatgagagaagacatcaagagcctgttgccatacattgtagacagcttgcgtgaaaccgatgagaagatcgttctgtcagccatccagatactcctgcaacttgttagaacaatggatttcactaccctggctgccatgatgaggaccctgttctccttatttggtgatgtgagatctgatgttcatcgtttctccgtgactctctttggagccgccataaagtctgtaaaaaacccagataagaagagtatagagaaccaagtcctggacagcttggtcccactacttctgtattctcaggatgaaaatgatgcagtagctgaggagagcaggcaagtcctaactatatgtgcccagttcctgaagtggaagctgccccaagaagtgtactccaaagatccctggcacatcaaacctactgaagcaggaacaatctgcagattctttgaaaaaaagtgcaaggggaaaattaacatcctagaacaaacactgatgtactccaagaacccaaaacttcccatcagaagatcagcagtcttgtttgtaggccttttatcgaagtacatggatcacaatgagctcaggaggatgggtactgactggatagaggacgatctgagagacctgctgtgtgaccctgagccctcgctgtgcatcatcgcttcccagactctgttactagtccagatggcgagggccgaaccaaaacctaagcagagagtgaactggttgcagaagctcatgggcaggtcctctgcctagaaacacaaggcaagcaacatcagagacagaatcttgctatgttgtgcggcaagctagtcttgaactcatggcctcaagtcatcctcctgtgtcagcctcccaaagtgctgggattacaagcatgcaccacggcacccagcagaattccagtcttgagaaacaggtcaaggacagcttcaaaagagattctaaataaatgttaatgttacaatgtta

SEQ ID NO: 150560 - DNA, 2227 bp, Homo sapiens
  Payload ID: 9737
  Gene Symbol: MROH9
  Gene Name: maestro heat-like repeat family member 9
  Uniprot ID: Q5TGP6
  ENST ID: ENST00000367758
  CDS Start-End: 100-1821
aatatactagagtttctcttcactactttgtctcaccgtgattacagagaagttacaaatatcattactagtagaagactttaatacacctctgtcagcatgttgacaaggaatccaaaaacaaagagtagtctccagattctgcaagacagtgtgaaatggcaccacatggcacataaagttaacagcctattggatgcatactcaggcctgttaagtaatgaatccatgatcctggctgtgaactccagctttgtggatcccttactgcagtttgaatctcagttgaagataatagagtcatcctttggaatgctagttgtcatgccaagtcttgacaaagtaaaagaaatggggagcagttatgagtacattgaggacatggagaatttataccacaatattttaaatatatatgagaacattcttacgagcttggtgtctaaagacctctacaaactacagatcttaaaggaaatgctcgtgtggatgagtaaagatagctcatatctgcaagagagaataatggtgatcatcaacaaggtgttaagatttacagtcacaaaagtcagaaaatacataagtgttgatgctccatgtttgggtctcctggcagcagagctgtctcttttgtgttcccatgaagatccctcgattgtaaaacaagcatcattgggaatgtgtcacctcctctacattgcacggtgtcagaacgatattggaacaaataagcctacaaacggtaaaagtcatagcctccagtttccttcttctgatgtagaatttctacccaaggagtttcaacaagacgaaagtaaaatagctcagagagtagggcaaaccttactgcctcccttgctgactgactttgtgcagagtctcctgatgaaactctcttcacctgatgataaaatcgcatctgatgcagcatccatactgatatttactctggaatttcatgccgagaaggtcaccatggtgtctaagatcgtggatgctatttacaggcaactgtgtgataacaattgtatgaaggatgttatgttgcaggttatcactttgttgacatgcacttcacccaagaaggtcatctttcaacttatggactacccagttccagcagacgacactctgatacagatgtggaaggcggcatgttctcaggcgagcgtggcccctcacgtgctgaagacaatcttattgatactgaaaggaaagcctggggaaatggaggacaccgtaacggaagggaaacgtttctctcttgatattaccaacttgatgcctttggcggcatgccaggccctgtgcacctttctgcctcttggttcctacaggaaagcggtggcccagtatttcccccagctcttgacgactcttatgttccaagtcttctacaacagtgagctgaaaccgatactcaaggacagggctttgtatgcccaggatgccctgagagttctgctgaattgttctggactgcaacaggtggatattactctaatgaaggagaatttctgggaccagttatctgaagatctgtgttactatcatggagtctgctttattgctaaaactctcagtgaatataactttccacagtttccggagaccctgagttatctctataagctctcagtagaaggtcctagaaggtcagaagacactgtcatcgtattaatattcctcactgaagtgagttttgtagactgtgaacagctgtgttctcatttccttttcttacccaaatttaaatcaaaattccagtttctcgtatctctccctctgaatgttggttcttaccaagacttaagatcatgaaagatatctgaagtcggatggggagaggtgtggagttagatctgggttatggaagagttgtcccttcagctttccccagcagttggtttttctctgtttctaggggtgtgaatttgtacaaaaactaattattttttaggaccagtttatatatttctgcatgattgttaaagtatattgagggataattgggtttaataaagatggtagttaacatctgggatctaggcagtacttctgaccatctagagggagaaaggaactggctgagtaactgggtaaaatgaagatgtggaaccatattactttgtatatcaatattgtgccatgtattgtaatactataatggaatcaagcaaattgacaaacttttgtttacaaaaaataaaggctttataacctgaaa

SEQ ID NO: 150561 - DNA, 3165 bp, Homo sapiens
  Payload ID: 9737
  Gene Symbol: MROH9
  Gene Name: maestro heat-like repeat family member 9
  Uniprot ID: Q5TGP6
  ENST ID: ENST00000367759
  CDS Start-End: 155-2740
aaagaatttgcttggttgataactacctagagtattttacctttggctaagaggtaatatactagagtttctcttcactactttgtctcaccgtgattacagagaagttacaaatatcattactagtagaagactttaatacacctctgtcagcatgttgacaaggaatccaaaaacaaagagtagtctccagattctgcaagacagtgtgaaatggcaccacatggcacataaagttaacagcctattggatgcatactcaggcctgttaagtaatgaatccatgatcctggctgtgaactccagctttgtggatcccttactgcagtttgaatctcagttgaagataatagagtcatcctttggaatgctagttgtcatgccaagtcttgacaaagtaaaagaaatggggagcagttatgagtacattgaggacatggagaatttataccacaatattttaaatatatatgagaacattcttacgagcttggtgtctaaagacctctacaaactacagatcttaaaggaaatgctcgtgtggatgagtaaagatagctcatatctgcaagagagaataatggtgatcatcaacaaggtgttaagatttacagtcacaaaagtcagaaaatacataagtgttgatgctccatgtttgggtctcctggcagcagagctgtctcttttgtgttcccatgaagatccctcgattgtaaaacaagcatcattgggaatgtgtcacctcctctacattgcacggtgtcagaacgatattggaacaaataagcctacaaacggtaaaagtcatagcctccagtttccttcttctgatgtagaatttctacccaaggagtttcaacaagacgaaagtaaaatagctcagagagtagggcaaaccttactgcctcccttgctgactgactttgtgcagagtctcctgatgaaactctcttcacctgatgataaaatcgcatctgatgcagcatccatactgatatttactctggaatttcatgccgagaaggtcaccatggtgtctaagatcgtggatgctatttacaggcaactgtgtgataacaattgtatgaaggatgttatgttgcaggttatcactttgttgacatgcacttcacccaagaaggtcatctttcaacttatggactacccagttccagcagacgacactctgatacagatgtggaaggcggcatgttctcaggcgagcgtggcccctcacgtgctgaagacaatcttattgatactgaaaggaaagcctggggaaatggaggacaccgtaacggaagggaaacgtttctctcttgatattaccaacttgatgcctttggcggcatgccaggccctgtgcacctttctgcctcttggttcctacaggaaagcggtggcccagtatttcccccagctcttgacgactcttatgttccaagtcttctacaacagtgagctgaaaccgatactcaaggacagggctttgtatgcccaggatgccctgagagttctgctgaattgttctggactgcaacaggtggatattactctaatgaaggagaatttctgggaccagttatctgaagatctgtgttactatcatggagtctgctttattgctaaaactctcagtgaatataactttccacagtttccggagaccctgagttatctctataagctctcagtagaaggtcctagaaggtcagaagacactgtcatcgtattaatattcctcactgaacttctgaataacttcttcaaggaccctttaccagaagaatttttggtcctcttcataaactggatcaatgattccaatcctgtagttagcagactgatccttcatagaattgtccacatgtcaccaattatcaataagacagaaaatgtcagcagtatattaatagccatcctggatgccttcctttccaaagacgataatgttgtacttcaggccttgctcacccttagaaggcttttaaacgaactggacaaagtgacctactctttgggtaccagaattggttccagctactgtactctgatggatcatattaatggaggcattcgaagtatggcaattcgacactttggtcaattagttagggatatgagacagtacacatggatggtgaatgatgtggttctagaaggcttggtgcccctaatcctatttttggaggatgatgataaaagagtagctgaagcatgtaaatatacattaaaaatctgtacctcacaattaaagtggtcaacatcacgtttgctcaaagatgaaaattacagttttgagatggtggtgctcaatatctgtaacaatcttattatttctcataggaactacattacagatttgacatctgataccttacgattcctgtggagccccagaacatatcttaagagggcatcggttattttgataggatatttggcaaaatcaggtggtcatttactgcttagagatgaaatcgaagtcatgcttgatgttattgaacgactgctccgagatgaagaccctatgatcaaacagttggctgaaataacctatgatatttttaagaaaaaagcccataaactgacctctgcacctcttaaacaaaacttccaaaaattgcttaaattattctacatcaaaaaattgaagcctctttacaattataactcacccaatggccagatagacagtcctacagacagtaaagatgtcaagaatgataaggccttatagaagagaatgatgatgacattcatcattcataaacaatgggaagtccaacaatgtcttggagctgaccttagaagaagaatgatttttctttccctcctgacaacttgagtctgtttgtagatgcttttctgaaaaattctggaagcttttactgttacttcttaattctctattcaaatatagaaatctgagagaactagtgcctctgtatgtctgacagtgatcagaagccctatttcatcaaaaccactaagacaattgaaaataacataagcaaagtgtttgatgagaagctctgggaacttgattcagtccggaagctctactgagcaccttctaagtgccagatactgtgttaggcagtggggacatttggatgatatagacaaggttcctgatctcaggatgggcacagtctagtgaca

SEQ ID NO: 150562 - DNA, 687 bp, Homo sapiens
  Payload ID: 9737
  Gene Symbol: MROH9
  Gene Name: maestro heat-like repeat family member 9
  ENST ID: ENST00000426136
  CDS Start-End: 1-562
gatgcctttggcggcatgccaggccctgtgcacctttctgcctcttggttcctacaggaaagcggtggcccagtatttcccccagctcttgacgactcttatgttccaagtcttctacaacagtgagctgaaaccgatactcaaggacagggctttgtatgcccaggatgccctgagagttctgctgaattgttctggactgcaacaggtggatattactctaatgaaggagaatttctgggaccagttatctgaagatctgtgttactatcatggagtctgctttattgctaaaactctcagtgaatataactttccacagtttccggagaccctgagttatctctataagctctcagtagaaggtcctagaaggtcagaagacactgtcatcgtattaatattcctcactgaacttctgaataacttcttcaaggaccctttaccagaagaatttttggtcctcttcataaactggatcaatgattccaatcctgtagttagcagactgatccttcatagaattgtccacatgtcaccaattatcaataaggtcgactgaatttaagcacgttccattttctgtaattctacactccaaagtatcttgcaaaatgctgacagtgcaaatgttctataaatcattacttttataatacatccaataataaatcgttgtttatctaa

SEQ ID NO: 150563 - DNA, 1677 bp, Homo sapiens
  Payload ID: 9738
  Gene Symbol: MAF1
  Gene Name: MAF1 homolog, negative regulator of RNA polymerase III
  Uniprot ID: Q9H063
  ENST ID: ENST00000322428
  CDS Start-End: 405-1175
gttgtccggccgggggaggcggaggtcgctcgctcgctcgctcggctcgctgactcgccggagcgctctgtggcggtcggcggcaggtcggtcgcgagagcgggctctgtggaagggggcgaggctatgtcgcggtggcagcccggatgggccggcagggccgggagtaacgggacgtcgccgcggagcttcttcccccggatacagtgcggcccgagcggaggccgcggcgccgccctccgatcttgaagagcccgcgctgcgcggagcccgcccccgcctgcgcaccggcaccgacgcggagcgacccagcccagccagacccggcccggcgcggcctgatctaacccagccaggcaggcaatactagcccctctggagcacggagctccttccccaaagacatgaagctattggagaactcgagctttgaagccatcaactcacagctgactgtggagactggagatgcccacatcattggcaggattgagagctactcatgtaagatggcaggagacgacaaacacatgttcaagcagttctgccaggagggccagccccacgtgctggaggcactttctccaccccagacttcaggactgagccccagcagactcagcaaaagccaaggcggtgaggaggagggccccctcagtgacaagtgcagccgcaagaccctcttctacctgattgccacgctcaatgagtccttcaggcctgactatgacttcagcacagcccgcagccatgagttcagccgggagcccagccttagctgggtggtgaatgcagtcaactgcagtctgttctcagctgtgcgggaggacttcaaggatctgaaaccacagctgtggaacgcggtggacgaggagatctgcctggctgaatgtgacatctacagctataacccagacttggactcagatcccttcggggaggatggtagcctctggtccttcaactacttcttctacaacaagcggctcaagcgaatcgtcttctttagctgccgttccatcagtggctccacctacacaccctcagaggcaggcaacgagctggacatggagctgggggaggaggaggtggaggaagaaagcagaagcgggggcagtggggccgaggagaccagcaccatggaggaggacagggtcccagtgatctgtatttgatgaggaggagccgaggccccagcttcatccagcttcaaccaatgcctggacctgtccacctgagaggcccctggggcctccccagctgctggccagaccctggcgctgccacagtcctggcactgcccaaggccatacctgcctagccctttggctccatcctgtggatgcccactcacccctcagactcctgctgcccatgctgtggccggacttgtcagcagggggcctggtgggaggagcgactgccctgcccaaatgaactgccacagcagggacagctggaccgcagagtttatttttgtatttctactgggcctgcacactccagcccaaagggtctgtggccggaggccccacgagcaggccccagcagtcaccggctctggtcttgggccggccccggtgcccacctgtacccccacctcgcccatttggccgcgtgcactgagtgtcactttgctgcagctcgtttctttccaataaaagtttctgtgactta

SEQ ID NO: 150564 - DNA, 737 bp, Homo sapiens
  Payload ID: 9738
  Gene Symbol: MAF1
  Gene Name: MAF1 homolog, negative regulator of RNA polymerase III
  ENST ID: ENST00000527572
  CDS Start-End: 528-737
gacgtggcccaggcgggcgctgcctggtgactgcagcgccccagcggggccgagggaccgccctcctaggcgtctggagaaactaggcaatttttccgggtagagtggaggaacctgtagttttcctctccccgggccagaaagtagccaaaacgaaagagcgcccgcccaggtgaccgcagggcccggagtcccaggtgtcctggttcctaaccgggatgcagcctcttaccttggctgaggagcccagccagcctgagggagactgcaggagtcacgtcccgttgcggactcaagagttacccccatggtggctggagctcttttggagtgggcgtggagatggggaatgggaatgttgagcaacaatctcagccagcagccccagggtgagcagggtccccggtggtctagtctagtcccagaactcgcgtgttctgcagggggtatggctgacctggagcctggacttaccaccctcaggcaatactagcccctctggagcacggagctccttccccaaagacatgaagctattggagaactcgagctttgaagccatcaactcacagctgactgtggagactggagatgcccacatcattggcaggattgagagctactcatgtaagatggcaggagacgacaaacacatgttcaagcagttctgccaggagggccagccccacgtgctggaggcactttctccaccccagacttcaggactgagccccagc

SEQ ID NO: 150565 - DNA, 1754 bp, Homo sapiens
  Payload ID: 9738
  Gene Symbol: MAF1
  Gene Name: MAF1 homolog, negative regulator of RNA polymerase III
  ENST ID: ENST00000534585
  CDS Start-End: 392-1252
gggaggcggaggtcgctcgctcgctcgctcggctcgctgactcgccggagcgctctgtggcggtcggcggcaggtcggtcgcgagagcgggctctgtggaagggggcgaggctatgtcgcggtggcagcccggatgggccggcagggccgggagtaacgggacgtcgccgcggagcttcttcccccggatacagtgcggcccgagcggaggccgcggcgccgccctccgatcttgaagagcccgcgctgcgcggagcccgcccccgcctgcgcaccggcaccgacgcggagcgacccagcccagccagacccggcccggcgcggcctgatctaacccagccaggcaggcaatactagcccctctggagcacggagctccttccccaaagacatgaagctattggagaactcgagctttgaagccatcaactcacagctgactgtggagactggagatgcccacatcattggcaggattgagagctactcatgtaagatggcaggagacgacaaacacatgttcaagcagttctgccaggagggccagccccacgtgctggaggcactttctccaccccagacttcaggactgagccccagcagactcagcaaaagccaaggcggtgaggaggagggccccctcagtgacaagtgcagccgcaagaccctcttctacctgattgccacgctcaatgagtccttcaggcctgactatgacttcagcacagcccgcagccatgagttcagccgggagcccagccttagctgggtggtgaatgcagtcaactgcagtctgttctcagctgtgcgggaggacttcaaggatctgaaaccacagctgtggaacgcggtggacgaggagatctgcctggctgaatgtgacatctacaggtgggccggcatccctgcagatggcctccaggcctccaggtttgtggggcacttggcgcctcacaccacctgtcaccctatactccccagctataacccagacttggactcagatcccttcggggaggatggtagcctctggtccttcaactacttcttctacaacaagcggctcaagcgaatcgtcttctttagctgccgttccatcagtggctccacctacacaccctcagaggcaggcaacgagctggacatggagctgggggaggaggaggtggaggaagaaagcagaagcgggggcagtggggccgaggagaccagcaccatggaggaggacagggtcccagtgatctgtatttgatgaggaggagccgaggccccagcttcatccagcttcaaccaatgcctggacctgtccacctgagaggcccctggggcctccccagctgctggccagaccctggcgctgccacagtcctggcactgcccaaggccatacctgcctagccctttggctccatcctgtggatgcccactcacccctcagactcctgctgcccatgctgtggccggacttgtcagcagggggcctggtgggaggagcgactgccctgcccaaatgaactgccacagcagggacagctggaccgcagagtttatttttgtatttctactgggcctgcacactccagcccaaagggtctgtggccggaggccccacgagcaggccccagcagtcaccggctctggtcttgggccggccccggtgcccacctgtacccccacctcgcccatttggccgcgtgcactgagtgtcactttgctgcagctcgtttctttccaataaaagtttctgtgactta

SEQ ID NO: 150566 - DNA, 868 bp, Homo sapiens
  Payload ID: 9738
  Gene Symbol: MAF1
  Gene Name: MAF1 homolog, negative regulator of RNA polymerase III
  ENST ID: ENST00000527058
  CDS Start-End: 112-868
tggaggaacctgtagttttcctctccccgggccagaaagtagccaaaacgaaagagcgcccgcccaggcaatactagcccctctggagcacggagctccttccccaaagacatgaagctattggagaactcgagctttgaagccatcaactcacagctgactgtggagactggagatgcccacatcattggcaggattgagagctactcatgtaagatggcaggagacgacaaacacatgttcaagcagttctgccaggagggccagccccacgtgctggaggcactttctccaccccagacttcaggactgagccccagcagactcagcaaaagccaaggcggtgaggaggagggccccctcagtgacaagtgcagccgcaagaccctcttctacctgattgccacgctcaatgagtccttcaggcctgactatgacttcagcacagcccgcagccatgagttcagccgggagcccagccttagctgggtggtgaatgcagtcaactgcagtctgttctcagctgtgcgggaggacttcaaggatctgaaaccacagctgtggaacgcggtggacgaggagatctgcctggctgaatgtgacatctacaggtgggccggcatccctgcagatggcctccaggcctccaggtttgtggggcacttggcgcctcacaccacctgtcaccctatactccccagctataacccagacttggactcagatcccttcggggaggatggtagcctctggtccttcaactacttcttctacaacaagcggctcaagcgaatcgtcttctttagctgccgttccatcagtggctccacctacacaccctcagaggcaggcaacgagctggacatgg

SEQ ID NO: 150567 - DNA, 632 bp, Homo sapiens
  Payload ID: 9738
  Gene Symbol: MAF1
  Gene Name: MAF1 homolog, negative regulator of RNA polymerase III
  ENST ID: ENST00000534811
  CDS Start-End: 1-495
ctctggtccttcaactacttcttctacaacaagcggctcaagcgaatcgtcttctttagctgccgttccatcagtggctccacctacacaccctcagaggcaggcaacgagctggacatggagctgggggaggaggaggtggaggaagaaagcagaagcgggggcagtggggccgaggagaccagcaccatggaggaggacaggtgtgtgatgggggccatgacccgggtccttgaagcctggagtgggtacaacagggtgggggcctcctctacttggtctaagtggtggctcctgaaggcccactgtgtgccaacctccgcccagggtcccagtgatctgtatttgatgaggaggagccgaggccccagcttcatccagcttcaaccaatgcctggacctgtccacctgagaggcccctggggcctccccagctgctggccagaccctggcgctgccacagtcctggcactgcccaaggccatacctgcctagccctttggctccatcctgtggatgcccactcacccctcagactcctgctgcccatgctgtggccggacttgtcagcagggggcctggtgggaggagcgactgccctgcccaaatgaactgccacagcagggacagct

SEQ ID NO: 150568 - DNA, 1098 bp, Homo sapiens
  Payload ID: 9738
  Gene Symbol: MAF1
  Gene Name: MAF1 homolog, negative regulator of RNA polymerase III
  Uniprot ID: Q9H063
  ENST ID: ENST00000532522
  CDS Start-End: 220-990
cccgacgtggcccaggcgggcgctgcctggtgactgcagcgccccagcggggccgagggaccgccctcctaggcgtctggagaaactaggcaatttttccgggtagagtggaggaacctgtagttttcctctccccgggccagaaagtagccaaaacgaaagagcgcccgcccaggcaatactagcccctctggagcacggagctccttccccaaagacatgaagctattggagaactcgagctttgaagccatcaactcacagctgactgtggagactggagatgcccacatcattggcaggattgagagctactcatgtaagatggcaggagacgacaaacacatgttcaagcagttctgccaggagggccagccccacgtgctggaggcactttctccaccccagacttcaggactgagccccagcagactcagcaaaagccaaggcggtgaggaggagggccccctcagtgacaagtgcagccgcaagaccctcttctacctgattgccacgctcaatgagtccttcaggcctgactatgacttcagcacagcccgcagccatgagttcagccgggagcccagccttagctgggtggtgaatgcagtcaactgcagtctgttctcagctgtgcgggaggacttcaaggatctgaaaccacagctgtggaacgcggtggacgaggagatctgcctggctgaatgtgacatctacagctataacccagacttggactcagatcccttcggggaggatggtagcctctggtccttcaactacttcttctacaacaagcggctcaagcgaatcgtcttctttagctgccgttccatcagtggctccacctacacaccctcagaggcaggcaacgagctggacatggagctgggggaggaggaggtggaggaagaaagcagaagcgggggcagtggggccgaggagaccagcaccatggaggaggacagggtcccagtgatctgtatttgatgaggaggagccgaggccccagcttcatccagcttcaaccaatgcctggacctgtccacctgagaggcccctggggcctccccagctgctggccagaccctggcgctg

SEQ ID NO: 150569 - DNA, 2179 bp, Homo sapiens
  Payload ID: 9739
  Gene Symbol:
  Gene Name: MaFF-interacting protein [Source:UniProtKB/Swiss-Prot
  Acc:Q8WZ33]
  Uniprot ID: Q8WZ33
  ENST ID: ENST00000613230
  CDS Start-End: 1748-2122
gcagccctggggcttggttctatgtccctgtggctatgtttccagtgtcctctgggtgtttccaagagcaacaagaaacgaataaatctctgccccgcagcgcctccaccccagagacccggaccaagttcacacaggacaatctgtgccacgcccagcgcgagcgcctggactcggccaacctgtgggtgctggtggactgcatccttcgcgacacctccgaggacctgggactccagtgtgacgccgtgaacctggccttcgggcgccgctgtgaggaactggaggacgcgcggcacaagctgcagcaccacctgcacaaggtggggcaccctgaaccccgaagacggctccggcgcctgcccaccactctgccccctctcatcacctggcctgggccctcaacacctttctcctctgtcccacttatcccgagggaccccagaagcaagtgtcacctctccgtaaacctatgtaaaaccaggtgacactgggtatgatcgcagtgtgttgcaacccccatgactgagaaggaggagctgtggggaggatggaggcaggagctggtctggggagcattgactgcctgggaggtccccaagagtcctggcctggcaggcagggctctgactctagggcctcagcatggcctttaccacctctgagtccccagtccttgagcaggatttgggtcctggtgaccaccaaggatgggggttcttggaccagagctaagagacaacaggctgcctgactctccagagcccgctgggggccccgtgcacattgttcccctcacccacgcctccccagggccactggtcaggaccaccctctggacacagccccaggagctgggtaggaccagactggtctctacattccatatgcccgggcatgggggcacaggcccaaggggcactgtcctgtctgcagatgctgcgggaaatcacagatcaggaacacaacgtggtggcactgaaggaggccatcaaggacaaggaggaacctctgcacatagcccagacccggctgtagctgctctcacaccggcccaacatgcagctgtgccgcgatgcagcccagttcaggtactgcctgggcctctgaggcagtcccaggtgcccccgtccacctcctcgctgcgaccctctccaataaacactccaatctccacacacacatcccccacaggtgctgagaggggagggagactctgcggccacacacaacatgcaagcacgccttaaacacacagatatagacatgacactgggcaggtcatgggtcgggggcctccccgtgccagggacctgtgcccacgtggtctcaccccaccctgtgctacctcatcttcccgggaggaagctccttcagacaaggtgagctcctggaggccacggggccagagaggccagagagggccattccctgctgccctgagggtgctgtccccacctctggtggaaagtatgacctacgcctgggctacaggcatagatgggccgtccttttgtttcccttgttaacggatgcctggtggccccttctgagcctaagtacctttcttccttccctgcccctcagttccttcaaggaactgggtgcctccttccgtcaaatatcaggaatggaaagaactgagcctggtcggctgaggccagtcctgtcctgtcagggtcgagattgcacgcgggtcactcattcccactcaggtccgcgctccctgggaggaccctcgtaatttatgctctgccctagagccgctttcctggtaggatcctttcatggcgtcttcccaggacctcctgccagctcccattgggagttttgggtcccctccaccccagtaggtgcatacttctgccctccccagccccagctcacaccccccaacacccccaagctggtgagtgaggtggaggagctgtacaagtccatcacagcgctgcgggagaagcttctacaagcggagcagtccctgcgcaacctcaaggacatccacatgagcctggagaaggacgtcaccgccatgaccaacagtgtcttcatcgaccgccagaagtgcatggcccatcgtacttgctaccccaccattctgcagctggctggctaccagtgagcagcggcacggtgcttccccccaatcccccaaataaacagtgcgttagctttctgc

SEQ ID NO: 150570 - DNA, 553 bp, Homo sapiens
  Payload ID: 9740
  Gene Symbol: MAGIX
  Gene Name: MAGI family member, X-linked
  ENST ID: ENST00000454342
  CDS Start-End: 124-553
aagattacttgaggggatggtgcgtaaatggtgggccagtttgtatatgagctgcaggggcaagacaagtagatgaggctagaatgttaactcagggaacaggtcctaggtagtttccatggcatgtcccccaacagccctctccactgcttttatctcccagctgttagcgtgctggactctgcggacatagaggtcacagacagtcgcctgcctcatgccactattgtggatcaccggccccaggtcggggacctcgtgctccacatcaacggagagtcaacgcagggcctcacccatgcccaggccgtggagcggatccgagctggaggcccccagctccacctggttattcgtcggcctctggagacccaccctggcaagcctcgaggggtgggagagccccgaaaaggagttgatcgcagcccagatcctggagggccggaggtaacggggtctcgcagcagcagcacttccctagttcagcaccctccatcccggacgacgctcaagaagacccggggcagcccggagcctagtccagaggcggccg

SEQ ID NO: 150571 - DNA, 1238 bp, Homo sapiens
  Payload ID: 9740
  Gene Symbol: MAGIX
  Gene Name: MAGI family member, X-linked
  ENST ID: ENST00000595224
  CDS Start-End: 1-1005
atggagccgcgcacaggggacgccgcggaccctagggggagcagaggaggccgcggcccctccccgctcgcgggccctagcgcccggcagctcctggcgcggttggacgcgcgccccctggcggcgcgagctgcggtcgacgtggcagcgctggtacgcagggcgggcgccacattgcgcctgcgccggaaggaggctgttagcgtgctggactctgcggacatagaggtcacagacagtcgcctgcctcatgccactattgtggatcaccggccccagcaccgttggttagagacatgtaacgcacctccccaattgatccagggtaaggcacgtagtgctccgaagccatcccaggcctctggtcatttctctgtggagctggttcgcggttacgcaggctttggcctcaccttaggtgggggccgggatgtagctggggacactccgctggccgtgcgcgggctgctgaaggatggcccagcacagcgctgtggtcgtttggaggtcggggacctcgtgctccacatcaacggagagtcaacgcagggcctcacccatgcccaggccgtggagcggatccgagctggaggcccccagctccacctggttattcgtcggcctctggagacccaccctggcaagcctcgaggggtgggagagccccgaaaaggagttgtcccgtcatggccagatcgcagcccagatcctggagggccggaggtaacggggtctcgcagcagcagcacttccctagttcagcaccctccatcccggacgacgctcaagaagacccggggcagcccggagcctagtccagaggcggccgccgatggccccacggtttctcctcctgagcgccgcgctgaggatcccaacgaccagatcccgggttccccggggccctggctagtgcccagcgaggaacggctctcgcgggccctaggggtccggggggcagcgcagctcgctcaggagatggcagccggaaggcggagacactgagcctacctctgacagcgcggggctcactagttaccgcccaacctggatccggcgcgtgtggccgctgggcacttggcacctccccaagagcttccacttggtttggtccccccacccgctgctcagtggctctgaccacactcccctcgcagcgtcagtggtacgacccttccagccggctagcctgcgcttctggttctgggagggggaggtaataaaatggttcgatccgg

SEQ ID NO: 150572 - DNA, 1057 bp, Homo sapiens
  Payload ID: 9740
  Gene Symbol: MAGIX
  Gene Name: MAGI family member, X-linked
  ENST ID: ENST00000615626
  CDS Start-End: 48-824
aaaattcgtagctggcagccctgcgtccacccggcggactactggccatggagccgcgcacaggggacgccgcggaccctagggggagcagaggaggccgcggcccctccccgctcgcgggccctagcgcccggcagctcctggcgcggttggacgcgcgccccctggcggcgcgagctgcggtcgacgtggcagcgctggtacgcagggcgggcgccacattgcgcctgcgccggaaggaggctgttagcgtgctggactctgcggacatagaggtcacagacagtcgcctgcctcatgccactattgtggatcaccggccccaggtcggggacctcgtgctccacatcaacggagagtcaacgcagggcctcacccatgcccaggccgtggagcggatccgagctggaggcccccagctccacctggttattcgtcggcctctggagacccaccctggcaagcctcgaggggtgggagagccccgaaaaggagttgtcccgtcatggccagatcgcagcccagatcctggagggccggaggtaacggggtctcgcagcagcagcacttccctagttcagcaccctccatcccggacgacgctcaagaagacccggggcagcccggagcctagtccagaggcggccgccgatggccccacggtttctcctcctgagcgccgcgctgaggatcccaacgaccagatcccgggttccccggggccctggctagtgcccagcgaggaacggctctcgcgggccctaggggtccggggggcagcgcagctcgctcaggagatggcagccggaaggcggagacactgagcctacctctgacagcgcggggctcactagttaccgcccaacctggatccggcgcgtgtggccgctgggcacttggcacctccccaagagcttccacttggtttggtccccccacccgctgctcagtggctctgaccacactcccctcgcagcgtcagtggtacgacccttccagccggctagcctgcgcttctggttctgggagggggaggtaataaaatggttcgatccgg

SEQ ID NO: 150573 - DNA, 780 bp, Homo sapiens
  Payload ID: 9740
  Gene Symbol: MAGIX
  Gene Name: MAGI family member, X-linked
  ENST ID: ENST00000614322
  CDS Start-End: 271-393
cgcctgcagcagagtgaggccaagcactcctcctggctcctacagccaggcctccttgctggccgccaggccgcggcccctccccgctcgcgggccctagcgcccggcagctcctggcgcggttggacgcgcgccccctggcggcgcgagctgcggtcgacgtggcagcgctggtacgcagggcgggcgccacattgcgcctgcgccggaaggaggctgttagcgtgctggactctgcggacatagaggtcacagacagtcgcctgcctcatgccactattgtggatcaccggccccagggtaaggcacgtagtgctccgaagccatcccaggcctctggtcatttctctgtggagctggttcgcggttacgcaggctttggcctcaccttaggtgggggccgggatgtagctggggacactccgctggccgtgcgcgggctgctgaaggatggcccagcacagcgctgtggtcgtttggaggtcggggacctcgtgctccacatcaacggagagtcaacgcagggcctcacccatgcccaggccgtggagcggatccgagctggaggcccccagctccacctggttattcgtcggcctctggagacccaccctggcaagcctcgaggggtgggagagccccgaaaaggagttgatcgcagcccagatcctggagggccggaggtaacggggtctcgcagcagcagcacttccctagttcagcaccctccatcccggacgacgctcaagaagacccggggcagcccggagcctagtccag

SEQ ID NO: 150574 - DNA, 3295 bp, Homo sapiens
  Payload ID: 9740
  Gene Symbol: MAGIX
  Gene Name: MAGI family member, X-linked
  ENST ID: ENST00000616266
  CDS Start-End: 384-1211
attttacatttccaccggaggtataggagttccatttcctccatatcttcagcaacagttggtattgtcaggcttttaaattctaactaggacctttagttaacagagtgcggcgcctgcagcagagtgaggccaagcactcctcctggctcctacagccaggcctccttgctggccgccaggccgcggcccctccccgctcgcgggccctagcgcccggcagctcctggcgcggttggacgcgcgccccctggcggcgcgagctgcggtcgacgtggcagcgctggtacgcagggcgggcgccacattgcgcctgcgccggaaggaggctgttagcgtgctggactctgcggacatagaggtcacagacagtcgcctgcctcatgccactattgtggatcaccggccccaggtaccatctcatccttctatcggaggcctcctgcctcagggcaaactatgtacacctgtgtcctttattccagcaccgttggttagagacatgtaacgcacctccccaattgatccagggtaaggcacgtagtgctccgaagccatcccaggcctctggtcatttctctgtggagctggttcgcggttacgcaggctttggcctcaccttaggtgggggccgggatgtagctggggacactccgctggccgtgcgcgggctgctgaaggatggcccagcacagcgctgtggtcgtttggaggtcggggacctcgtgctccacatcaacggagagtcaacgcagggcctcacccatgcccaggccgtggagcggatccgagctggaggcccccagctccacctggttattcgtcggcctctggagacccaccctggcaagcctcgaggggtgggagagccccgaaaaggagttgtcccgtcatggccagatcgcagcccagatcctggagggccggaggtaacggggtctcgcagcagcagcacttccctagttcagcaccctccatcccggacgacgctcaagaagacccggggcagcccggagcctagtccagaggcggccgccgatggccccacggtttctcctcctgagcgccgcgctgaggatcccaacgaccagatcccgggttccccggggccctggctagtgcccagcgaggaacggctctcgcgggccctaggggtccggggggcagcgcagctcgctcaggagatggcagccggaaggcggagacactgagcctacctctgacagcgcggggctcactagttaccgcccaacctggatccggcgcgtgtggccgctgggcacttggcacctccccaagagcttccacttggtttggtccccccacccgctgctcagtggctctgaccacactcccctcgcagcgtcagtggtacgacccttccagccggctagcctgcgcttctggttctgggagggggaggtaataaaatggttcgatccggtcttgacttgccaggcgctcgaggcggggtggggctgcccgggccactctgtaaaggagcaggtgggtcgatcctgcttgagtaatcgctgacgagcttcgtgctgctgctttcctgcttgcacatgttatctttgcttctgccggtcctcagtctggcgtgctttctttttctcttcgccgtctcctgctcctctccttattcattaatttcacctttttggaggtgtacagggtctcacacataaattattgtgcatggcatggagaatgcagaggtgagcctgtcgtggcaggactgcaccagtgtatccacagtcctgtctcggaatcatacagaccctcagctgacgtcgggatagcaaggctagaagcctagaagcagggcagcttccttcgccagaggcctgcggtctcccacttccggcctagtctgccagcttttgctggcacgtaggctaccactctccgggcaccggctggggtcctggagccccctttggggcggagtggggaaggtgtgagtcagcgcccctggacgggccgggctaaaaaaggctgttagaacctttgggccgtgcccccattttccgtacatggtgaagaactgcagccgggcttgtgtgcacacgccacacactgggcgttcccggcacgggagaggcccagagtttccttcaccctgggaacagagccctacagccagggcttatatggccagcgggactccaaccggggtagccgcgaggaaggcgctggcagaggacagaaatgtccagtcacctccgctgtcaccacatcctgagcactcggccccatccccccacaggagggaagctgtggtctgacggaatgggcaactttcgcccctgtggggaggggacggggaaggaagaaagaatttaaaggaccggaatgcgagagtccaggtggccttggagaggaaagaggaacggtgaagacaagctgcgagagctgggagctggagggtgaagaggtgaacacttgagtggttagagctgtagatagacattgtggggaagtgtgccagggtggcttccagctacccctgacttagagcctggtggaggtgtggttcttcagaagtcagcaaagggctcaagagccccagtctataaatacagtcacacccaggagactaataatagtaaccccagccaccatgtacttagttttatccctgctactggctttattgcaatatttattttcatctacaatagttgcacatctactcaactatccgaatatgtccatttcgcagaggaggaaagtgaggcccagggagtgcagatagctacagagaggagggtcaaagcacgatttaatcaaggcctgattcccaagtctgtcctctcaatttcacctgcattgacaagtattaattgaaccccaactgtatatgttgcactgtgctaggtactgtggagatgctggaggaacaagacataaaatttctttgtgtagctgatgtatgtaatgagagtagacagatgtcagacaaaaaagacgagaaaatgaataaataaaaaaccaggccaggcgtggtggctcacgcctgtaatcccagcactttgggaggccgaggctggtggatcacgaggtcaagagttcaagagcagcctggccaagatggtgaaaccccgtctctactgaaaatacaaaaattagccaggtgtggtagcaggtgcctgtaatcacagctactcgggaggctgaggcagagaattgcttgaacccaggaggtggaggttgcagcgagccaagatcgcaccactgcactccagcctgggtgacagagcgagaatcagtctcaaaaaaaaaaaaaaaa

SEQ ID NO: 150575 - DNA, 1757 bp, Homo sapiens
  Payload ID: 9740
  Gene Symbol: MAGIX
  Gene Name: MAGI family member, X-linked
  ENST ID: ENST00000615915
  CDS Start-End: 736-1524
gagtgactggcgcagggcctccgctgggggagggttcggagaggagttgggttcagtgggacaggcctggggggtcagcagctactgccctgtcttgggtggggccaaggggcgcgacttggggcggggatcggagggtgcttcgagtgggaggagccttggggttattctagcatattccttgagggttattgcagtcggcgagggctagattagatgagagtgcggaactggacccccgttctggcggcggtcctttttgaggaggcagggcctggagagtgcttggggggcgggcacgcagcgaaggggcaggcctgaaatgtgagtcacgggggtggagcctatagtcccatgggggcggggcttgagatgtcaggaatgggatgagggttagaggctaattagagggcgtgctatggaaggttcaggagccaaattttggagtagcattctccagggtgggccgaatggtgttgtttgagggatgtgttctgcgtgttattagagggagataggaaggcctggaagattattcacatggctgagcccaggattgtttattaagaaggtggggtcagaacagttaatttgtttgggctgagaacctttaagattacttgaggggatggtgcgtaaatggtgggccagtttgtatatgagctgcaggggcaagacaagtagatgaggctagaatgttaactcagggaacaggtcctaggtagtttccatggcatgtcccccaacagccctctccactgcttttatctcccagctgttagcgtgctggactctgcggacatagaggtcacagacagtcgcctgcctcatgccactattgtggatcaccggccccagggtaaggcacgtagtgctccgaagccatcccaggcctctggtcatttctctgtggagctggttcgcggttacgcaggctttggcctcaccttaggtgggggccgggatgtagctggggacactccgctggccgtgcgcgggctgctgaaggatggcccagcacagcgctgtggtcgtttggaggtcggggacctcgtgctccacatcaacggagagtcaacgcagggcctcacccatgcccaggccgtggagcggatccgagctggaggcccccagctccacctggttattcgtcggcctctggagacccaccctggcaagcctcgaggggtgggagagccccgaaaaggagttgatcgcagcccagatcctggagggccggaggtaacggggtctcgcagcagcagcacttccctagttcagcaccctccatcccggacgacgctcaagaagacccggggcagcccggagcctagtccagaggcggccgccgatggccccacggtttctcctcctgagcgccgcgctgaggatcccaacgaccagatcccgggttccccggggccctggctagtgcccagcgaggaacggctctcgcgggccctaggggtccggggggcagcgcagctcgctcaggagatggcagccggaaggcggagacactgagcctacctctgacagcgcggggctcactagttaccgcccaacctggatccggcgcgtgtggccgctgggcacttggcacctccccaagagcttccacttggtttggtccccccacccgctgctcagtggctctgaccacactcccctcgcagcgtcagtggtacgacccttccagccggctagcctgcgcttctggttctgggagggggaggtaataaaatggttcgatccgg

SEQ ID NO: 150576 - DNA, 778 bp, Homo sapiens
  Payload ID: 9740
  Gene Symbol: MAGIX
  Gene Name: MAGI family member, X-linked
  ENST ID: ENST00000614074
  CDS Start-End: 17-778
cggcggactactggccatggagccgcgcacaggggacgccgcggaccctagggggagcagaggaggccgcggcccctccccgctcgcgggccctagcgcccggcagctcctggcgcggttggacgcgcgccccctggcggcgcgagctgcggtcgacgtggcagcgctggtacgcagggcgggcgccacattgcgcctgcgccggaaggaggctgttagcgtgctggactctgcggacatagaggtcacagacagtcgcctgcctcatgccactattgtggatcaccggccccaggtcggggacctcgtgctccacatcaacggagagtcaacgcagggcctcacccatgcccaggccgtggagcggatccgagctggaggcccccagctccacctggttattcgtcggcctctggagacccaccctggcaagcctcgaggggtgggagagccccgaaaaggagttgatcgcagcccagatcctggagggccggaggtaacggggtctcgcagcagcagcacttccctagttcagcaccctccatcccggacgacgctcaagaagacccggggcagcccggagcctagtccagaggcggccgccgatggccccacggtttctcctcctgagcgccgcgctgaggatcccaacgaccagatcccgggttccccggggccctggctagtgcccagcgaggaacggctctcgcgggccctaggggtccggggggcagcgcagctcgctcaggagatggcagccggaaggcggagacactga

SEQ ID NO: 150577 - DNA, 4047 bp, Homo sapiens
  Payload ID: 9741
  Gene Symbol: MAGT1
  Gene Name: magnesium transporter 1
  ENST ID: ENST00000358075
  CDS Start-End: 88-1191
agaaatcaaccttcttttagcgggcgtgtagcgccagcgcgctgtgacgtaatgtgaggggtctcccggcagggctgagctggaccaatgaggaaaggcaaggggccgatttgcctgttctcacgccccaccctcagacctagccggagcaaagtttcacttatagaagggagaggagcgaacatggcagcgcgttggcggttttggtgtgtctctgtgaccatggtggtggcgctgctcatcgtttgcgacgttccctcagcctctgcccaaagaaagaaggagatggtgttatctgaaaaggttagtcagctgatggaatggactaacaaaagacctgtaataagaatgaatggagacaagttccgtcgccttgtgaaagccccaccgagaaattactccgttatcgtcatgttcactgctctccaactgcatagacagtgtgtcgtttgcaagcaagctgatgaagaattccagatcctggcaaactcctggcgatactccagtgcattcaccaacaggatattttttgccatggtggattttgatgaaggctctgatgtatttcagatgctaaacatgaattcagctccaactttcatcaactttcctgcaaaagggaaacccaaacggggtgatacatatgagttacaggtgcggggtttttcagctgagcagattgcccggtggatcgccgacagaactgatgtcaatattagagtgattagacccccaaattatgctggtccccttatgttgggattgcttttggctgttattggtggacttgtgtatcttcgaagaagtaatatggaatttctctttaataaaactggatgggcttttgcagctttgtgttttgtgcttgctatgacatctggtcaaatgtggaaccatataagaggaccaccatatgcccataagaatccccacacgggacatgtgaattatatccatggaagcagtcaagcccagtttgtagctgaaacacacattgttcttctgtttaatggtggagttaccttaggaatggtgcttttatgtgaagctgctacctctgacatggatattggaaagcgaaagataatgtgtgtggctggtattggacttgttgtattattcttcagttggatgctctctatttttagatctaaatatcatggctacccatacagctttctgatgagttaaaaaggtcccagagatatatagacactggagtactggaaattgaaaaacgaaaatcgtgtgtgtttgaaaagaagaatgcaacttgtatattttgtattacctctttttttcaagtgatttaaatagttaatcatttaaccaaagaagatgtgtagtgccttaacaagcaatcctctgtcaaaatctgaggtatttgaaaataattatcctcttaaccttctcttcccagtgaactttatggaacatttaatttagtacaattaagtatattataaaaattgtaaaactactactttgttttagttagaacaaagctcaaaactactttagttaacttggtcatctgattttatattgccttatccaaagatggggaaagtaagtcctgaccaggtgttcccacatatgcctgttacagataactacattaggaattcattcttagcttcttcatctttgtgtggatgtgtatactttacgcatctttccttttgagtagagaaattatgtgtgtcatgtggtcttctgaaaatggaacaccattcttcagagcacacgtctagccctcagcaagacagttgtttctcctcctccttgcatatttcctactgaaatacagtgctgtctatgattgtttttgttttgttgtttttttgagacggtctcgctgtgtcacacaggctggagtgcagtggcgtgagctcggctgactgcaaactctgcctcccaggtttaagcgattctcctgtcacagcttcccaagtagctgggatttacaggtgtgcaccgccatgccaggctaatttttgtgtttttagtagagacagggtttcgccaagttgtccaggctggtcttgaactcctgggctcaagtgatccgcccgcctcagtctcccaaagtgcgaggatgacatgtgtgagctaccacaccagcaatgtctatgcttctcgatagctgtgaacatgaaaagacatctattgggagtccgaggcaggtggattgcttgaggccaggagttagagaccagcctggccaacaaggcaaaaccccgtctctactaaaaatatgaaaattagctgggcttggtggctcatgcctataatcctagctacttgggaggctgaggcacgagacttgcttaatacctgggaggcggagattgcagtgagccgagatcacgctactgcgctccagcctgagtgatagagtgagactctgtctcaaaaaaaagtatctctaaatacaggattataatttctgcttgagtatggtgttaactaccttgtatttagaaagatttcagattcattccatctccttagttttcttttaaggtgacccatctgtgataaaaatatagcttagtgctaaaatcagtgtaacttatacatggcctaaaatgtttctacaaattagagtttgtcacttattccatttgtacctaagagaaaaataggctcagttagaaaaggactccctggccaggcgcagtgacttacgcctgtaatctcagcactttgggaggccaaggcaggcagatcacgaggtcaggagttcgagaccatcctggccaacatggtgaaaccccgtctctactaaaaatataaaaattagctgggtgtggtggcaggagcctgtaatcccagctacacaggaggctgaggcacgagaatcacttgaactcaggagatggaggtttcagtgagccaagatcacaccactgcactccagcctggcaacagagcgagactccatctcaaaaaaaaaaaaaaaagtaagaaagaaaaggactcccttagaatgggaaagaaaaatcataaaatattgagctgatgcctgtatatagaaattaagcgtttctcgaaagctgttctatgttttgctgttattttagtctttattctcttcctttaggtggagaaacaaagtaccaatttgaagggattttttttattttgtcttttggtttctgtcagtagaaataaccatatgtgctaaccaaatttctgtgaagaatgttttcatggttatcattatatctaactataacctcccccatagttatgaagagtaacctgaaatgccactattgtggaaataggataattgtaattgtgaaaaaataattttaaggaaatcttacaagtattacattaaaaagatactatgactgccacctgccatttaccttctaataaccctgccatgtggtttgcagaaagagatggatatagtagcctcagaagaaatattttatgtgggttttttgtttttcgttactagatttcatggatgaggggatatggttgaccttttactttttaatggagcagccagtttttgttaattactcacttgtaaattgtgagattctgaattccttacctgctattcttgtacttgtctcaggccaaatctatgctgtggttcttatgagacttgtatgaagatgccctgatttgtacagattgaccacgggaatactactgccatgtaatctgtatagttccagataatttgtcatgaacattgacagaatgacaattttttgtatttgctttttctccctttaagagcacattcttctgtaaggagaaaggcagcattctggctaaaatgtgtagaaggtaatttactacacttataaaatagtgtgacttttgtgaaaattttgaattagctttcatatgaagtgccttaagtagactcttcatttacttttctggtaatggtttaaatatcatttgttatgcatttttaagatacagttcagaatgacacattgtagtggcaaagataaccaaatgtctggctgtttgctttttgaccatatcaataaacttttacaatctaaa

SEQ ID NO: 150578 - DNA, 962 bp, Homo sapiens
  Payload ID: 9741
  Gene Symbol: MAGT1
  Gene Name: magnesium transporter 1
  Uniprot ID: Q9H0U3
  ENST ID: ENST00000373336
  CDS Start-End: 31-435
gtttcacttatagaagggagaggagcgaacatggcagcgcgttggcggttttggtgtgtctctgtgaccatggtggtggcgctgctcatcgtttgcgacgttccctcagcctctgcccaaagaaagaaggagatggtgttatctgaaaaggttagtcagctgatggaatggactaacaaaagacctgtaataagaatgaatggagacaagttccgtcgccttgtgaaagccccaccgagaaattactccgttatcgtcatgttcactgctctccaactgcatagacagtgtgtcgtttgcaagcaagctgatgaagaattccagatcctggcaaactcctggcgatactccagtgcattcaccaacaggatattttttgccatggtggattttgatgaaggctctgatgtatttcagatgtttcaggttttttgagatggagtctcgctctgttgcccagactagagtgcagtggcttgatctcggctcactgcaacctctgcctcctggattcaagtgattcttctgcctcagcctcctgaatagctggaattacaggtgcccaccaccacgcctggctactttttgtattttgagtacagatggggtttcaccgtattggccaggctggtctcaaactcctgacctcagatgatccacccacctcagcctcccaaagtgctgggattacaggcgtgagccaccacacctggtccatttttagcttcagcatctctactagttctttccccttgcatataaatacttaaggacatagattcaattttgtctttgtttataaatgtgtctaattcatatatttgaacatattttactcaattgtatcaaacataaaaggaaaaagctggatataatgccttgctatacatcttcatatgaatgacttcccaatctaaaaatttattatatcccaaattaaactgttttctcttccactttca

SEQ ID NO: 150579 - DNA, 4019 bp, Homo sapiens
  Payload ID: 9741
  Gene Symbol: MAGT1
  Gene Name: magnesium transporter 1
  ENST ID: ENST00000610432
  CDS Start-End: 63-1166
gtgtagcgccagcgcgctgtgacgtaatgtgaggggtctcccggcagggctgagctggaccaatgaggaaaggcaaggggccgatttgcctgttctcacgccccaccctcagacctagccggagcaaagtttcacttatagaagggagaggagcgaacatggcagcgcgttggcggttttggtgtgtctctgtgaccatggtggtggcgctgctcatcgtttgcgacgttccctcagcctctgcccaaagaaagaaggagatggtgttatctgaaaaggttagtcagctgatggaatggactaacaaaagacctgtaataagaatgaatggagacaagttccgtcgccttgtgaaagccccaccgagaaattactccgttatcgtcatgttcactgctctccaactgcatagacagtgtgtcgtttgcaagcaagctgatgaagaattccagatcctggcaaactcctggcgatactccagtgcattcaccaacaggatattttttgccatggtggattttgatgaaggctctgatgtatttcagatgctaaacatgaattcagctccaactttcatcaactttcctgcaaaagggaaacccaaacggggtgatacatatgagttacaggtgcggggtttttcagctgagcagattgcccggtggatcgccgacagaactgatgtcaatattagagtgattagacccccaaattatgctggtccccttatgttgggattgcttttggctgttattggtggacttgtgtatcttcgaagaagtaatatggaatttctctttaataaaactggatgggcttttgcagctttgtgttttgtgcttgctatgacatctggtcaaatgtggaaccatataagaggaccaccatatgcccataagaatccccacacgggacatgtgaattatatccatggaagcagtcaagcccagtttgtagctgaaacacacattgttcttctgtttaatggtggagttaccttaggaatggtgcttttatgtgaagctgctacctctgacatggatattggaaagcgaaagataatgtgtgtggctggtattggacttgttgtattattcttcagttggatgctctctatttttagatctaaatatcatggctacccatacagctttctgatgagttaaaaaggtcccagagatatatagacactggagtactggaaattgaaaaacgaaaatcgtgtgtgtttgaaaagaagaatgcaacttgtatattttgtattacctctttttttcaagtgatttaaatagttaatcatttaaccaaagaagatgtgtagtgccttaacaagcaatcctctgtcaaaatctgaggtatttgaaaataattatcctcttaaccttctcttcccagtgaactttatggaacatttaatttagtacaattaagtatattataaaaattgtaaaactactactttgttttagttagaacaaagctcaaaactactttagttaacttggtcatctgattttatattgccttatccaaagatggggaaagtaagtcctgaccaggtgttcccacatatgcctgttacagataactacattaggaattcattcttagcttcttcatctttgtgtggatgtgtatactttacgcatctttccttttgagtagagaaattatgtgtgtcatgtggtcttctgaaaatggaacaccattcttcagagcacacgtctagccctcagcaagacagttgtttctcctcctccttgcatatttcctactgaaatacagtgctgtctatgattgtttttgttttgttgtttttttgagacggtctcgctgtgtcacacaggctggagtgcagtggcgtgagctcggctgactgcaaactctgcctcccaggtttaagcgattctcctgtcacagcttcccaagtagctgggatttacaggtgtgcaccgccatgccaggctaatttttgtgtttttagtagagacagggtttcgccaagttgtccaggctggtcttgaactcctgggctcaagtgatccgcccgcctcagtctcccaaagtgcgaggatgacatgtgtgagctaccacaccagcaatgtctatgcttctcgatagctgtgaacatgaaaagacatctattgggagtccgaggcaggtggattgcttgaggccaggagttagagaccagcctggccaacaaggcaaaaccccgtctctactaaaaatatgaaaattagctgggcttggtggctcatgcctataatcctagctacttgggaggctgaggcacgagacttgcttaatacctgggaggcggagattgcagtgagccgagatcacgctactgcgctccagcctgagtgatagagtgagactctgtctcaaaaaaaagtatctctaaatacaggattataatttctgcttgagtatggtgttaactaccttgtatttagaaagatttcagattcattccatctccttagttttcttttaaggtgacccatctgtgataaaaatatagcttagtgctaaaatcagtgtaacttatacatggcctaaaatgtttctacaaattagagtttgtcacttattccatttgtacctaagagaaaaataggctcagttagaaaaggactccctggccaggcgcagtgacttacgcctgtaatctcagcactttgggaggccaaggcaggcagatcacgaggtcaggagttcgagaccatcctggccaacatggtgaaaccccgtctctactaaaaatataaaaattagctgggtgtggtggcaggagcctgtaatcccagctacacaggaggctgaggcacgagaatcacttgaactcaggagatggaggtttcagtgagccaagatcacaccactgcactccagcctggcaacagagcgagactccatctcaaaaaaaaaaaaaaaagtaagaaagaaaaggactcccttagaatgggaaagaaaaatcataaaatattgagctgatgcctgtatatagaaattaagcgtttctcgaaagctgttctatgttttgctgttattttagtctttattctcttcctttaggtggagaaacaaagtaccaatttgaagggattttttttattttgtcttttggtttctgtcagtagaaataaccatatgtgctaaccaaatttctgtgaagaatgttttcatggttatcattatatctaactataacctcccccatagttatgaagagtaacctgaaatgccactattgtggaaataggataattgtaattgtgaaaaaataattttaaggaaatcttacaagtattacattaaaaagatactatgactgccacctgccatttaccttctaataaccctgccatgtggtttgcagaaagagatggatatagtagcctcagaagaaatattttatgtgggttttttgtttttcgttactagatttcatggatgaggggatatggttgaccttttactttttaatggagcagccagtttttgttaattactcacttgtaaattgtgagattctgaattccttacctgctattcttgtacttgtctcaggccaaatctatgctgtggttcttatgagacttgtatgaagatgccctgatttgtacagattgaccacgggaatactactgccatgtaatctgtatagttccagataatttgtcatgaacattgacagaatgacaattttttgtatttgctttttctccctttaagagcacattcttctgtaaggagaaaggcagcattctggctaaaatgtgtagaaggtaatttactacacttataaaatagtgtgacttttgtgaaaattttgaattagctttcatatgaagtgccttaagtagactcttcatttacttttctggtaatggtttaaatatcatttgttatgcatttttaagatacagttcagaatgacacattgtagtggcaaagataaccaaatgtctggctgtttgctttttgaccatatcaataaacttttacaatct

SEQ ID NO: 150580 - DNA, 2788 bp, Homo sapiens
  Payload ID: 9741
  Gene Symbol: MAGT1
  Gene Name: magnesium transporter 1
  Uniprot ID: Q9H0U3
  ENST ID: ENST00000618282
  CDS Start-End: 22-1029
atagaagggagaggagcgaacatggcagcgcgttggcggttttggtgtgtctctgtgaccatggtggtggcgctgctcatcgtttgcgacgttccctcagcctctgcccaaagaaagaaggagatggtgttatctgaaaaggttagtcagctgatggaatggactaacaaaagacctgtaataagaatgaatggagacaagttccgtcgccttgtgaaagccccaccgagaaattactccgttatcgtcatgttcactgctctccaactgcatagacagtgtgtcgtttgcaagcaagctgatgaagaattccagatcctggcaaactcctggcgatactccagtgcattcaccaacaggatattttttgccatggtggattttgatgaaggctctgatgtatttcagatgctaaacatgaattcagctccaactttcatcaactttcctgcaaaagggaaacccaaacggggtgatacatatgagttacaggtgcggggtttttcagctgagcagattgcccggtggatcgccgacagaactgatgtcaatattagagtgattagacccccaaattatgctggtccccttatgttgggattgcttttggctgttattggtggacttgtgtatcttcgaagaagtaatatggaatttctctttaataaaactggatgggcttttgcagctttgtgttttgtgcttgctatgacatctggtcaaatgtggaaccatataagaggaccaccatatgcccataagaatccccacacgggacatgtgaattatatccatggaagcagtcaagcccagtttgtagctgaaacacacattgttcttctgtttaatggtggagttaccttaggaatggtgcttttatgtgaagctgctacctctgacatggatattggaaagcgaaagataatgtgtgtggctggtattggacttgttgtattattcttcagttggatgctctctatttttagatctaaatatcatggctacccatacagctttctgatgagttaaaaaggtcccagagatatatagacactggagtactggaaattgaaaaacgaaaatcgtgtgtgtttgaaaagaagaatgcaacttgtatattttgtattacctctttttttcaagtgatttaaatagttaatcatttaaccaaagaagatgtgtagtgccttaacaagcaatcctctgtcaaaatctgaggtatttgaaaataattatcctcttaaccttctcttcccagtgaactttatggaacatttaatttagtacaattaagtatattataaaaattgtaaaactactactttgttttagttagaacaaagctcaaaactactttagttaacttggtcatctgattttatattgccttatccaaagatggggaaagtaagtcctgaccaggtgttcccacatatgcctgttacagataactacattaggaattcattcttagcttcttcatctttgtgtggatgtgtatactttacgcatctttccttttgagtagagaaattatgtgtgtcatgtggtcttctgaaaatggaacaccattcttcagagcacacgtctagccctcagcaagacagttgtttctcctcctccttgcatatttcctactgaaatacagtgctgtctatgattgtttttgttttgttgtttttttgagacggtctcgctgtgtcacacaggctggagtgcagtggcgtgagctcggctgactgcaaactctgcctcccaggtttaagcgattctcctgtcacagcttcccaagtagctgggatttacaggtgtgcaccgccatgccaggctaatttttgtgtttttagtagagacagggtttcgccaagttgtccaggctggtcttgaactcctgggctcaagtgatccgcccgcctcagtctcccaaagtgcgaggatgacatgtgtgagctaccacaccagcaatgtctatgcttctcgatagctgtgaacatgaaaagacatctattgggagtccgaggcaggtggattgcttgaggccaggagttagagaccagcctggccaacaaggcaaaaccccgtctctactaaaaatatgaaaattagctgggcttggtggctcatgcctataatcctagctacttgggaggctgaggcacgagacttgcttaatacctgggaggcggagattgcagtgagccgagatcacgctactgcgctccagcctgagtgatagagtgagactctgtctcaaaaaaaagtatctctaaatacaggattataatttctgcttgagtatggtgttaactaccttgtatttagaaagatttcagattcattccatctccttagttttcttttaaggtgacccatctgtgataaaaatatagcttagtgctaaaatcagtgtaacttatacatggcctaaaatgtttctacaaattagagtttgtcacttattccatttgtacctaagagaaaaataggctcagttagaaaaggactccctggccaggcgcagtgacttacgcctgtaatctcagcactttgggaggccaaggcaggcagatcacgaggtcaggagttcgagaccatcctggccaacatggtgaaaccccgtctctactaaaaatataaaaattagctgggtgtggtggcaggagcctgtaatcccagctacacaggaggctgaggcacgagaatcacttgaactcaggagatggaggtttcagtgagccaagatcacaccactgcactccagcctggcaacagagcgagactccatctc

SEQ ID NO: 150581 - DNA, 730 bp, Homo sapiens
  Payload ID: 9742
  Gene Symbol: MDP1
  Gene Name: magnesium-dependent phosphatase 1
  Uniprot ID: Q86V88
  ENST ID: ENST00000288087
  CDS Start-End: 113-643
cgccatttgtctatggcaggcagggtggctgccttagctgccggaggttccgcactctctaaggccccgggtgaagccccacctctgctgcgcgcagcctgcggtgcgggtcatggcgcggctaccgaagctggcagtctttgatttggattacactctctggcctttctgggtcgacacgcacgtagaccctccgttccataagagcagtgatggaactgtacgagataggcggggccaagacgtccgactgtacccagaggtgcctgaggtcctaaaacgattgcagagccttggggtgcccggtgcggctgcttcaaggacaagtgagatagaaggggccaaccagctactggagctctttgacctcttcaggtactttgttcatcgggaaatctatccaggcagcaagatcacacactttgagaggttgcagcagaagactggaattcctttctcccagatgatcttctttgatgatgagaggcggaatattgtagacgtcagcaaactgggtgttacctgcattcacatccagaatggaatgaatcttcaaactctaagtcaagggttagagacatttgcgaaggcccaaactgggcctttgaggtccagccttgaggagagcccatttgaggcctaaactgaaaggaaatcaagaaggcattttcaggtgcatttgtaatttattaaagttcatctgtgtgtgacagaagagattttacccaca

SEQ ID NO: 150582 - DNA, 582 bp, Homo sapiens
  Payload ID: 9742
  Gene Symbol: MDP1
  Gene Name: magnesium-dependent phosphatase 1
  Uniprot ID: Q86V88
  ENST ID: ENST00000396833
  CDS Start-End: 111-479
ccatttgtctatggcaggcagggtggctgccttagctgccggaggttccgcactctctaaggccccgggtgaagccccacctctgctgcgcgcagcctgcggtgcgggtcatggcgcggctaccgaagctggcagtctttgatttggattacactctctggcctttctgggtcgacacgcacgtagaccctccgttccataagagcagtgatggaactgtacgagataggcggggccaagacgtccgactgtacccagaggtgcctgaggtcctaaaacgattgcagagccttggggtgcccggtgcggctgcttcaaggacaagtgagatagaaggggccaaccagctactggagctctttgacctcttcaggtgttacctgcattcacatccagaatggaatgaatcttcaaactctaagtcaagggttagagacatttgcgaaggcccaaactgggcctttgaggtccagccttgaggagagcccatttgaggcctaaactgaaaggaaatcaagaaggcattttcaggtgcatttgtaatttattaaagttcatctgtgtgtgacagaagagatttta

SEQ ID NO: 150583 - DNA, 2623 bp, Homo sapiens
  Payload ID: 9743
  Gene Symbol: MAGOHB
  Gene Name: mago homolog B, exon junction complex core component
  Uniprot ID: Q96A72
  ENST ID: ENST00000320756
  CDS Start-End: 92-538
gtggtgacgcacttattccgcgcgatgacgtcactgcaaggcgccgggggacacgttggctgcgttttcggcgggcttcccgggtacaaaaatggctgtggctagcgatttctacctgcgctactacgtagggcacaagggcaagtttgggcacgagtttctggagttcgaatttcggccggacggaaagcttagatatgccaacaacagcaattacaaaaatgatgtcatgatcagaaaagaggcttatgtgcacaagagtgtaatggaagaactgaagagaattattgatgacagtgaaattacaaaagaagatgatgctttgtggcctccccctgatagggttggccgacaggagcttgaaattgtaattggagatgagcacatatcttttaccacatcaaaaataggttctcttattgatgtaaatcagtcaaaggatcctgaaggccttcgagtattttactatttggtacaagacttgaaatgtttagttttcagtcttattggattacacttcaagattaaaccaatttaaattgtatgttttcaggctgtttgtatatttaattaagggatgggaggggttatttgtcatttacagtattggggtttttatgaatgtgaagcaaacaaaaaaaatttgtatgtaaactgaaaataagaaaatacattagcaagcttaatggttatccttacttgagtccatatgggttggacagtccccacacacattaaattctgtaaatgaaagccaccttttgttaaaaatttgctctaataaaacataccaaatcctggttgcagagtagttttttgttttttccaggaggctatgtctctaattcactttagagataataagaaattgttctggtagatatatcctgtgacagaagatactttaggtggaactatgtagccagattcccatccatgaaaggcaagtgtagattgtcccttatttccttcatacatgattggatttaattttggggggcttatacaaggtctagtttttttttacagttatgacaaacccctcagggattattcacatttaaatattttcagttataagcagtgaggtcctaaagtgttacaagagtacagtctaccccatgttaggcatatctttgattatgtctttattccttatttcacaatgtatttggtgtgtaggggaggggggagaactaaatgagttttcagctttataaattgttaaacatttagacaaacatatatgtatgtatgaatgtacataaatatttttaactcctattgaccacgagtctcacttcagtttcccagttcctttcaacctctttctgatagatttcctctttcattacttttagtaaccatgttccttgtttccttttattcttccatctgaagccccactcttaaaaagttgcactgttccagtagttataatccacttgccctaggaacaagttagcactgaattttgggtggaataattagtttctgaaggcttgccaggactcctgagcaggtaggctctagagtcgggcagtccaataacttttttgcaataatggaaacgttctatgtgcagtccaatagggtagcaactggccaaatgaggcctactgattacttgaggtgtgccttgtataactgaatttatggtgctatttaaacaatttttttctaacgtgaaaaggataaaacattaaaaactcttgagaactataaagtgaacacctatatgcctacccctacctagattctatacttaacatcttttttactgtaatatctctattataataaatcttggtttttcacttaactggtgtaattggtgccaataaactactttttttgtagtgctatttaattttgattaaatttaggtagccacgtgtctagcggctaccgtttggacagtatagctctagagcatggcttggtaacctgtttgccatggagcactagatggtccttttcactcctcaaaatgcatgcccattgtcttcaggtttgccatggaaagtcaaatgatttccacttcattatgcaagtacgctatcatcttcaggtcttttgtatgtaaaatgtttctgttccagttgtagaccttgatgattgtgcagtatgaaatcgtattgtaattttcttgcatttagatgtcaacctcagaaacaggaacaatcgtcttttgaacttccagtaggcccacagttgttggttgttcctcaaaacaggttgtggctcctgttgaataagatgatccattaaaaactgaacaaggttgaggagaaatagtgcttacgttgaaaaatctttaagtctttgtccccgttctctaacttccttacgttttcgtttatttagctctatccccactatctactagaatttctcatatttaaaccaagatgggagactaggtcattaggaaaatattaccgtctacaattttcttatactttgatctgtcttttatttgattgtaagttgctgatggacagtgatcattagaaactgaattttgtataatactagttttatatgaaactagatttttattgcgctcaggttatgttccttttacctccttccttaataaagagaccacttgaaataatca

SEQ ID NO: 150584 - DNA, 666 bp, Homo sapiens
  Payload ID: 9743
  Gene Symbol: MAGOHB
  Gene Name: mago homolog B, exon junction complex core component
  ENST ID: ENST00000539554
  CDS Start-End: 96-404
actgcaaggcgccgggggacacgttggctgcgttttcggcgggcttcccgggaaagcttagatatgccaacaacagcaattacaaaaatgatgtcatgatcagaaaagaggcttatgtgcacaagagtgtaatggaagaactgaagagaattattgatgacagtgaaattacaaaagaagatgatgctttgtggcctccccctgatagggttggccgacaggagcttgaaattgtaattggagatgagcacatatcttttaccacatcaaaaataggttctcttattgatgtaaatcagtcaaaggatcctgaaggccttcgagtattttactatttggtacaagacttgaaatgtttagttttcagtcttattggattacacttcaagattaaaccaatttaaattgtatgttttcaggctgtttgtatatttaattaagggatgggaggggttatttgtcatttacagtattggggtttttatgaatgtgaagcaaacaaaaaaaatttgtatgtaaactgaaaataagaaaatacattagcaagcttaatggttatccttacttgagtccatatgggttggacagtccccacacacattaaattctgtaaatgaaagccaccttttgttaaaaatttgctctaataaaacataccaaatcctg

SEQ ID NO: 150585 - DNA, 1057 bp, Homo sapiens
  Payload ID: 9743
  Gene Symbol: MAGOHB
  Gene Name: mago homolog B, exon junction complex core component
  ENST ID: ENST00000544850
  CDS Start-End: 63-335
gtcactgcaaggcgccgggggacacgttggctgcgttttcggcgggcttcccgggtacaaaaatggctgtggctagcgatttctacctgcgctactacgtagggcacaagggcaagtttgggcacgagtttctggagttcgaatttcggccggacggaaagcttagatatgccaacaacagcaattacaaaaatgatgtcatgatcagaaaagaggcttatgtgcacaagagtgtaatggaagaactgaagagaattattgatgacagtgaaattacaaaagaagatgatgctttgtggcctccccctgatagggttggccgacagaataaatgatgtttctcaggcttctgaagaactctgaaggcctaatttcactctgtaaaaagaaagtttggtttctgaattgggtcttttcaactcttggagaaattccttcaacaacccctggaaggaagaaacatttaatttcacttttgtatatccctgaggattgtactttgtatcaccttctttgaatagaagaaaatgtggagaaatctaacacatgctgacactctgtaggagtaacttaagtcttctgcttaaagaagcattatttagaaaagcaaaggagcttgaaattgtaattggagatgagcacatatcttttaccacatcaaaaataggttctcttattgatgtaaatcagtcaaaggatcctgaaggccttcgagtattttactatttggtacaagacttgaaatgtttagttttcagtcttattggattacacttcaagattaaaccaatttaaattgtatgttttcaggctgtttgtatatttaattaagggatgggaggggttatttgtcatttacagtattggggtttttatgaatgtgaagcaaacaaaaaaaatttgtatgtaaactgaaaataagaaaatacattagcaagcttaatggttatccttacttgagtccatatgggttggacagtccccacacacattaaattctgtaaatgaaagccaccttttgttaaaaatttgctctaataaaacataccaaatcctg

SEQ ID NO: 150586 - DNA, 576 bp, Homo sapiens
  Payload ID: 9743
  Gene Symbol: MAGOHB
  Gene Name: mago homolog B, exon junction complex core component
  ENST ID: ENST00000546173
  CDS Start-End: 42-287
acacgttggctgcgttttcggcgggcttcccgggtacaaaaatggctgtggctagcgatttctacctgcgctactacgtagggcacaagggcaagtttgggcacgagtttctggagttcgaatttcggccggacggacgcatgaagagtaccaagcaagaggggagaggtaaagttccacaggagggagtcaggaagatcttcttagaggacggcactcttgagatgagtctcgaaatgagagacttggcctttgagagaaaaaaacagacttccagagcagtatgagcagaggatgaggaaagcttagatatgccaacaacagcaattacaaaaatgatgtcatgatcagaaaagaggcttatgtgcacaagagtgtaatggaagaactgaagagaattattgatgacagtgaaattacaaaagaagatgatgctttgtggcctccccctgatagggttggccgacagaataaatgatgtttctcaggcttctgaagaactctgaaggcctaatttcactctgtaaaaagaaagtttggtttctgaattgggtcttttcaactcttggagaaatt

SEQ ID NO: 150587 - DNA, 705 bp, Homo sapiens
  Payload ID: 9743
  Gene Symbol: MAGOHB
  Gene Name: mago homolog B, exon junction complex core component
  ENST ID: ENST00000540074
  CDS Start-End: 96-230
actgcaaggcgccgggggacacgttggctgcgttttcggcgggcttcccgggaaagcttagatatgccaacaacagcaattacaaaaatgatgtcatgatcagaaaagaggcttatgtgcacaagagtgtaatggaagaactgaagagaattattgatgacagtgaaattacaaaagaagatgatgctttgtggcctccccctgatagggttggccgacagaataaatgatgtttctcaggcttctgaagaactctgaaggcctaatttcactctgtaaaaagaaagtttggtttctgaattgggtcttttcaactcttggagaaattccttcaacaacccctggaaggaagaaacatttaatttcacttttgtatatccctgaggattgtactttgtatcaccttctttgaatagaagaaaatgtggagaaatctaacacatgctgacactctgtaggagtaacttaagtcttctgcttaaagaagcattatttagaaaagcaaaggagcttgaaattgtaattggagatgagcacatatcttttaccacatcaaaaataggttctcttattgatgtaaatcagtcaaaggatcctgaaggccttcgagtattttactatttggtacaagacttgaaatgtttagttttcagtcttattggattacacttcaagattaaaccaatttaaattgtatgttttcag

SEQ ID NO: 150588 - DNA, 868 bp, Homo sapiens
  Payload ID: 9743
  Gene Symbol: MAGOHB
  Gene Name: mago homolog B, exon junction complex core component
  ENST ID: ENST00000545236
  CDS Start-End: 78-323
attccgcgcgatgacgtcactgcaaggcgccgggggacacgttggctgcgttttcggcgggcttcccgggtacaaaaatggctgtggctagcgatttctacctgcgctactacgtagggcacaagggcaagtttgggcacgagtttctggagttcgaatttcggccggacggacgcatgaagagtaccaagcaagaggggagaggtaaagttccacaggagggagtcaggaagatcttcttagaggacggcactcttgagatgagtctcgaaatgagagacttggcctttgagagaaaaaaacagacttccagagcagtatgagcagaggatgaggtgaaactgctacccaagtagtgtgcaacagtgtgttttctgacagcgctatccttagagaatgttacattgatcttgcctacctgcaacaagaaagttcatttggatatatattttttgggtttttttgaatgcacgttttgtgctggacaacaagcaaatacaaaattttaaggaaagcttagatatgccaacaacagcaattacaaaaatgatgtcatgatcagaaaagaggcttatgtgcacaagagtgtaatggaagaactgaagagaattattgatgacagtgaaattacaaaagaagatgatgctttgtggcctccccctgatagggttggccgacaggagcttgaaattgtaattggagatgagcacatatcttttaccacatcaaaaataggttctcttattgatgtaaatcagtcaaaggatcctgaaggccttcgagtattttactatttggtacaagacttgaaatgtttagttttcagtcttattggattacacttcaagattaaaccaatttaaattgt

SEQ ID NO: 150589 - DNA, 841 bp, Homo sapiens
  Payload ID: 9743
  Gene Symbol: MAGOHB
  Gene Name: mago homolog B, exon junction complex core component
  ENST ID: ENST00000543929
  CDS Start-End: 69-314
gatgacgtcactgcaaggcgccgggggacacgttggctgcgttttcggcgggcttcccgggtacaaaaatggctgtggctagcgatttctacctgcgctactacgtagggcacaagggcaagtttgggcacgagtttctggagttcgaatttcggccggacggacgcatgaagagtaccaagcaagaggggagaggtaaagttccacaggagggagtcaggaagatcttcttagaggacggcactcttgagatgagtctcgaaatgagagacttggcctttgagagaaaaaaacagacttccagagcagtatgagcagaggatgaggtgaaactgctacccaagtagtgtgcaacagtgtgttttctgacagcgctatccttagagaatgttacattgatcttgcctacctgcaacaagaaagttcatttggatatatattttttgggtttttttgaatgcacgttttgtgctggacaacaagcaaatacaaaattttaaggaaagcttagatatgccaacaacagcaattacaaaaatgatgtcatgatcagaaaagaggcttatgtgcacaagagtgtaatggaagaactgaagagaattattgatgacagtgaaattacaaaagaagatgatgctttgtggcctccccctgatagggttggccgacagaataaatgatgtttctcaggcttctgaagaactctgaaggcctaatttcactctgtaaaaagaaagtttggtttctgaattgggtcttttcaactcttggagaaattccttcaacaacccctggaaggaagaaacatttaatttcacttttgtatatccctgaggattgt

SEQ ID NO: 150590 - DNA, 319 bp, Homo sapiens
  Payload ID: 9743
  Gene Symbol: MAGOHB
  Gene Name: mago homolog B, exon junction complex core component
  ENST ID: ENST00000625272
  CDS Start-End: 74-319
cgcgcgatgacgtcactgcaaggcgccgggggacacgttggctgcgttttcggcgggcttcccgggtacaaaaatggctgtggctagcgatttctacctgcgctactacgtagggcacaagggcaagtttgggcacgagtttctggagttcgaatttcggccggacggacgcatgaagagtaccaagcaagaggggagaggtaaagttccacaggagggagtcaggaagatcttcttagaggacggcactcttgagatgagtctcgaaatgagagacttggcctttgagagaaaaaaacagacttccagagcagtatga

SEQ ID NO: 150591 - DNA, 500 bp, Homo sapiens
  Payload ID: 9744
  Gene Symbol: MAGOH
  Gene Name: mago homolog, exon junction complex core component
  Uniprot ID: P61326
  ENST ID: ENST00000371466
  CDS Start-End: 52-381
ggcagtgcggcttgctcttggaagttcaggctcggttgtcttttgggagccatggagagtgacttttatctgcgttactacgtggggcacaagggcaagttcggccacgagttcctggagtttgagtttcgaccggacgggaagttaagatatgccaacaacagcaattacaagaatgatgtcatgatcagaaaagaggagcttgaaatcgtcattggagatgaacacatttcttttacaacatcaaaaattggttcccttattgatgtcaatcaatccaaggatccagaaggcttacgagtattttattatcttgtccaggacctgaagtgtttggtcttcagtcttattggattacacttcaagattaaaccaatctagactgaatattggtgtggacatggggggtgggtgggagtagaaaattttgtgtatatcagggcagtatttttttatgaactataaatgattgtctttaataaatatgtgataaaatccaa

SEQ ID NO: 150592 - DNA, 756 bp, Homo sapiens
  Payload ID: 9744
  Gene Symbol: MAGOH
  Gene Name: mago homolog, exon junction complex core component
  Uniprot ID: P61326
  ENST ID: ENST00000371470
  CDS Start-End: 163-603
gccacttccgggcgaagaggttagcgagaaggaacccctccacgcagcgacgacgggacctgacgtcacttccgcgcgccgccgcaaacgtcagtgtcgggcgcagacggcggcagtgcggcttgctcttggaagttcaggctcggttgtcttttgggagccatggagagtgacttttatctgcgttactacgtggggcacaagggcaagttcggccacgagttcctggagtttgagtttcgaccggacgggaagttaagatatgccaacaacagcaattacaagaatgatgtcatgatcagaaaagaggcttatgtacataaaagcgtgatggaggaactgaagagaataattgacgacagtgaaattaccaaagaggatgatgcattgtggcctcctcctgaccgagtgggccggcaggagcttgaaatcgtcattggagatgaacacatttcttttacaacatcaaaaattggttcccttattgatgtcaatcaatccaaggatccagaaggcttacgagtattttattatcttgtccaggacctgaagtgtttggtcttcagtcttattggattacacttcaagattaaaccaatctagactgaatattggtgtggacatggggggtgggtgggagtagaaaattttgtgtatatcagggcagtatttttttatgaactataaatgattgtctttaataaatatgtgataaaatccaatttttattattttataaagacctgaacatgtgaa

SEQ ID NO: 150593 - DNA, 3968 bp, Homo sapiens
  Payload ID: 9745
  Gene Symbol: MGRN1
  Gene Name: mahogunin ring finger 1, E3 ubiquitin protein ligase
  Uniprot ID: O60291
  ENST ID: ENST00000262370
  CDS Start-End: 172-1902
ccgccgtggcgtcggtccccgggccgagccgggggtgggggctcgaggcgcctccgcggccgtggacgagcgtccgtgcggcctggtccgggccatgtccgcgtgaggaccccgccgctgtcgccgctcccgttccggccctggcccctctgcccggcagcgccgcgcaccatgggctccattctcagccgccgcatcgcgggggtggaggacatcgacatccaggcgaactcggcctatcgctaccctccgaagtccggaaactactttgcttcgcactttttcatgggaggagagaaattcgacaccccccaccctgaaggttacctctttggagagaacatggatctgaacttcctgggcagccgcccggtccagtttccctacgtcactcctgccccccacgagcccgtgaagacgctgcggagcctggtgaacatccgcaaagactccctgcggctggtgaggtacaaagacgatgccgacagccccaccgaggacggcgacaagccccgggtgctctacagcctggagttcaccttcgacgccgatgcccgcgtggccatcaccatctactgccaggcatcggaggagttcctgaacggcagggcagtatacagccccaagagcccctcgctacagtccgagaccgtccactacaagagaggggtgagccagcagttctccctgccctccttcaagattgacttctcggaatggaaggatgacgagctgaactttgacctggaccggggcgtgtttccagtagtcatccaggctgtggtggacgaaggagatgtggtggaagtgactggccacgcccacgtgctcttggctgcctttgaaaagcacatggacggcagcttctctgtgaagcctttaaagcagaagcaaattgtggaccgggtcagctacctcctgcaggagatctatggcattgagaacaagaacaaccaggagaccaagccctcggacgacgagaacagcgacaacagcaacgagtgtgtggtgtgcctgtccgacctgcgggacacgctgatcctgccctgccgccacctgtgcctctgtacctcctgcgccgacacgctgcgctaccaggccaacaactgccccatctgccggctgcctttccgggccctcctgcagatccgggcggtgcggaagaagccaggagccctgtcccccgtgtccttcagccccgtcctggcccagagcctggagcatgatgagcactcttgtccctttaaaaaatcaaagccgcaccccgcctccctggccagcaagaaacctaaaagggaaacaaactctgacagcgtcccacctggctacgagcccatctcgctgctcgaggcgctcaacggcctccgggctgtctccccggccatcccctcggcccctctttatgaagaaatcacctattcaggcatctcggacggcctgtcccaggccagctgtcccctcgcggctatcgaccacatcctggacagcagccgccagaagggcaggccgcagagcaaggcccccgacagcaccctacggtccccgtcttcccccatccacgaagaggatgaggagaagctctccgaggacgtggacgcccctcccccactgggtggcgcagagctggccctgcgggaaagcagctcccctgagagtttcataacagaagaggttgatgagtcgtcgtcaccacagcaagggacccgagcagcttccattgagaatgtcctgcaggacagcagccccgagcactgtggccgaggcccacctgctgacatctacctgccaggacggcccacctccatggagacggcccacggcctcgccaccaccagccccacctggcctccacttggtggccccagccccgatcccagcgccgccgagctgaccccactctgagagcctggccgagctggcagcatggagccctcggctccccagactttgccgaggggctgctccggaccccgttgtgagccggcctcctgtctgcatgccccctgtggccaccaggctccgaggggccgtggtgactcttgatcaaagagcacagtgaactgtcccttctgagtctcccttttctacagttgatatatttgtaactggtacaagatgaaggacagcagctttccatccctagttcagagcccccgttccccagggtcctgtgggctgagcggctggggctggggctgcccacgtgtggcctccgctggctctgcctgctcctgcaacagtgcggtccctgcccggagaactcaggaggcctgcagaagagaactgattggtggtcgaagcaccatcttcacagatgttcaggggcagtggggggctccaggcacggtcaatgaaggaaacagtgcctgtccacccaccctgcgtgtcactgtggcggcctggctgtcgctgctttttgtcctctgccgtgtttgcgcggcctcagtgccctccctggtgcgtctgcgctggggccctcagtgctcggggccttggggtgcatgggtgccgccctgggcagctagagtgtctcagcccggtgctgggcctggccgaggggcggaggcacagctgcttccagcagccagcattcagtggccttgtcaccaagctccacacctcctcctggtgctggctttggtgacatcacaaggcccctccaggtgcaggggcttctgtttggcaggcccctgccagggaggacctggtggcctcctcattctcttttgccattggaatgtccccttgcagttctcttctctttttttttttttttgagatggagtttcactcttgctgcccaggctggagtgcagtggctcaatctcgggtcactgcaacctccgcctcccgggttcaagtgatcgtcctgccttaggctcctgagtagctggggattacaggtgcctaccagcatgctcggctaatttttttgtatttttagtagagaagggatttcaccatgttggccgggctggtctcaaactcctaaggtcatccacctgcctcggcctcccagagtgctgagattacaggcgtgagcctccgcgcccggcccccttgcagttctctctgatttggtttgttctgtctcaggcttctgtggcaggactggcccagggaggaggaagccagcagcacacctggggaatggggtcccggccgggaggcttggcctctgggcgacctcgtcctgttttttttgtttgtttgtttgtttttttaaaggtaaacctcctgggccgcagatggcaaagggagtgcctgggcctggtgacccagggctggatccacccctgcggagccctgggccaggcaggtgtctgctgctcacctggctctggagggctgccctgcagctgggcctggggacaggtcggctgtggggcagctcagtaccctccctgaggctcacggtggctccgagcatgaggtccgcctcctgggcgagacccagcagtggacagcatggtcctcacacccagctccctgcacacccaggccagccacccctcccgctcgtgcacaggcacgcagatgcgctcacacgtacacacacacaaatgcacgcccacttgcacatgctcacgcacatgttcacacatgcacactcacgctcacacatgctgtcacgcatacacacacgcacatactcctgcacatgttcccatgcatgtgtgtgcactcggaccgagcatctcccacgcacctctaccccaccccaagcacctctctccccccatgcacctctccccaacaacacacacagccccctgcaccgcccgccccccgcccccaccaaggccccagcctctggccatcagtcctggtgccagagctttgcgtgaagttcgggccgcagagtggcccgctgggactcccatgtgctgccgtctgatgtgctcagatgggctcatcgttggttcgtttttactgtatatttatagtaataaaatcatgcagcaata

SEQ ID NO: 150594 - DNA, 6425 bp, Homo sapiens
  Payload ID: 9745
  Gene Symbol: MGRN1
  Gene Name: mahogunin ring finger 1, E3 ubiquitin protein ligase
  Uniprot ID: O60291
  ENST ID: ENST00000399577
  CDS Start-End: 94-1752
cggcctggtccgggccatgtccgcgtgaggaccccgccgctgtcgccgctcccgttccggccctggcccctctgcccggcagcgccgcgcaccatgggctccattctcagccgccgcatcgcgggggtggaggacatcgacatccaggcgaactcggcctatcgctaccctccgaagtccggaaactactttgcttcgcactttttcatgggaggagagaaattcgacaccccccaccctgaaggttacctctttggagagaacatggatctgaacttcctgggcagccgcccggtccagtttccctacgtcactcctgccccccacgagcccgtgaagacgctgcggagcctggtgaacatccgcaaagactccctgcggctggtgaggtacaaagacgatgccgacagccccaccgaggacggcgacaagccccgggtgctctacagcctggagttcaccttcgacgccgatgcccgcgtggccatcaccatctactgccaggcatcggaggagttcctgaacggcagggcagtatacagccccaagagcccctcgctacagtccgagaccgtccactacaagagaggggtgagccagcagttctccctgccctccttcaagattgacttctcggaatggaaggatgacgagctgaactttgacctggaccggggcgtgtttccagtagtcatccaggctgtggtggacgaaggagatgtggtggaagtgactggccacgcccacgtgctcttggctgcctttgaaaagcacatggacggcagcttctctgtgaagcctttaaagcagaagcaaattgtggaccgggtcagctacctcctgcaggagatctatggcattgagaacaagaacaaccaggagaccaagccctcggacgacgagaacagcgacaacagcaacgagtgtgtggtgtgcctgtccgacctgcgggacacgctgatcctgccctgccgccacctgtgcctctgtacctcctgcgccgacacgctgcgctaccaggccaacaactgccccatctgccggctgcctttccgggccctcctgcagatccgggcggtgcggaagaagccaggagccctgtcccccgtgtccttcagccccgtcctggcccagagcctggagcatgatgagcactcttgtccctttaaaaaatcaaagccgcaccccgcctccctggccagcaagaaacctaaaagggaaacaaactctgacagcgtcccacctggctacgagcccatctcgctgctcgaggcgctcaacggcctccgggctgtctccccggccatcccctcggcccctctttatgaagaaatcacctattcaggcatctcggacggcctgtcccaggccagctgtcccctcgcggctatcgaccacatcctggacagcagccgccagaagggcaggccgcagagcaaggcccccgacagcaccctacggtccccgtcttcccccatccacgaagaggatgaggagaagctctccgaggacgtggacgcccctcccccactgggtggcgcagagctggccctgcgggaaagcagctcccctgagagtttcataacagaagaggttgatgagtcgtcgtcaccacagcaagggacccgagcagcttccattgagaatgtcctgcaggacagcagccccgagcactgtggccgaggcccacctgctgacatctacctgccagccctggggcccgactcctgctctgttggtatagacgagtaagccggtacgtgacctcccagacgcgcttcgggggctctgacgcgcgtccttggagagaggagccctcccctgctctctggcgggggttccttctggtttttgggtcttcgtccgcatccgcatcttcccaggggccctggattccgaatccagagctctccagtggctgctgcaccttcccccagaaagtggcctcctggggggtcctgactttcggggccagaggtctctccatctggactaggcggccggtcaggctcttcttccagccttgaggggccctggaacagtcccagcccaggcagggagacagacacagcccaggtgcgccagagccactgtccactgcgggaggcaggagcttgagggatgagggcagcaccgtggagggaaccccagggagacatggggtgagcgtcccaaggggagaggcctgggcctggccttgttccggatggtcccaccatgagttcgcatcggtcctgcagcagacacgttaggacgctcagcaggtccactcccgtgttccggtcgtggctttaacaattcatggggaaagaatgcgccccgattgggagagcccctggatcacgtcttcccaagctcagtccctgtctcttggagggagtccgtcctcgaggggccctctggtgcccaggggagagtatcttgcgtcctgtcctgagggcgtccgctcacacagccacctgctcccccgctccctccttcccttgtcagcatggccaccgtgggcctggcatcaccatgggcctggcacacagtccctcgtgggctgcctttgtgccatgagcccactgctgccgactcacctgtccctcccagtactggaaccttctggaacaccagcactaaaagataggaggccctgtgaggttggcatcccccatcccccccaagaggcgccctctaccagggtggcccaggtgagtgttttacagaaggcggctctgtccaggcagtggttcgcacctataagcccggtactttgggagaccgaggggatagatcacttgagcccaggaattcaagatcagtgtagaaaacatagaccccctctctatgaaaaataaaaaattggcttgggcgtggtagcttgtgcctgtggtcccagctactcaggggtgctgaggtgggaggattgccggagctggggaggtcaaggcccactccagcctgagacgctgtctcaataaaaaaaaatacacacacacccacccacccactccagcctgagaccctgtctcaagaaaaaaaaaatacacacacacacacacacacacacacacacgggggagagagagaaggcagctccaggagtgccaccaaaatgtaggcagacggattggggaccctctgccttcccagagggtcttggcacacaagctgcgtgcagctctggtctgccgaggcccatgcagcctgctgggaggtgcctggccgggggtgcaggctctaagaggccctttccccttgggtggacttgagccgggtcagggagaacttcgcttcttttgactgcgctctgcattcccatgaacctctgtcttcttgagcccagcgagtccctctgttgacccctgtcctgagccattatacccctagattgaaacagtcagcacctttcagacggccccggcctgcgcatcggtggaaggtgccgtgcgaatgtcacgattcaggtcaagcttccggagctggggagtgcaggtgtgatctagaacagggctcacagcctcggaaacctgctctcgccgcggcccccgaagaaaatagacgcccttcaccggagagtggggcctgggccgtgtctgctgggagccatgtgtcagggctggtggctgggtgtcaggcagccctgaggccatgctggccccgtcccaggctctgcaccagcaccattgcccaagccccagggacgccagacccatctggggacagcgcccggcggcgtcgtgcaggccacagtctgggcattggggctctgtgggaggctcctctctttgccttgcagtagccatccgggggctactctgagcacgggcttgttctcacccagggccgctccccacccctgcaccctgggttgaccgagttccaccctaacccagccgtaagaaccttggcaggacagtggctggccacatcccaggaaaccggaaccagggcaagggcaggaggcccagagggcatccaccgcggtgccgtgtcgcgctctgactcggggctgcagatctgctgtgggtgtccggggatctgggatcgtctgtcccaagagggacacagcgtatttggcacagttagggagtccccgggcccttggtgtgctcacatctgagtgaatgctgttgtggccacaggcggcgggagtgggggtgctggatggcccagcccctctggggctccagatcggtaggagcgggtggcgtggcaccaggcatccgagtgtgaccctcctccctctgctcccacctgcaggacggcccacctccatggagacggcccacggcctcgccaccaccagccccacctggcctccacttggtggccccagccccgatcccagcgccgccgagctgaccccactctgagagcctggccgagctggcagcatggagccctcggctccccagactttgccgaggggctgctccggaccccgttgtgagccggcctcctgtctgcatgccccctgtggccaccaggctccgaggggccgtggtgactcttgatcaaagagcacagtgaactgtcccttctgagtctcccttttctacagttgatatatttgtaactggtacaagatgaaggacagcagctttccatccctagttcagagcccccgttccccagggtcctgtgggctgagcggctggggctggggctgcccacgtgtggcctccgctggctctgcctgctcctgcaacagtgcggtccctgcccggagaactcaggaggcctgcagaagagaactgattggtggtcgaagcaccatcttcacagatgttcaggggcagtggggggctccaggcacggtcaatgaaggaaacagtgcctgtccacccaccctgcgtgtcactgtggcggcctggctgtcgctgctttttgtcctctgccgtgtttgcgcggcctcagtgccctccctggtgcgtctgcgctggggccctcagtgctcggggccttggggtgcatgggtgccgccctgggcagctagagtgtctcagcccggtgctgggcctggccgaggggcggaggcacagctgcttccagcagccagcattcagtggccttgtcaccaagctccacacctcctcctggtgctggctttggtgacatcacaaggcccctccaggtgcaggggcttctgtttggcaggcccctgccagggaggacctggtggcctcctcattctcttttgccattggaatgtccccttgcagttctcttctctttttttttttttttgagatggagtttcactcttgctgcccaggctggagtgcagtggctcaatctcgggtcactgcaacctccgcctcccgggttcaagtgatcgtcctgccttaggctcctgagtagctggggattacaggtgcctaccagcatgctcggctaatttttttgtatttttagtagagaagggatttcaccatgttggccgggctggtctcaaactcctaaggtcatccacctgcctcggcctcccagagtgctgagattacaggcgtgagcctccgcgcccggcccccttgcagttctctctgatttggtttgttctgtctcaggcttctgtggcaggactggcccagggaggaggaagccagcagcacacctggggaatggggtcccggccgggaggcttggcctctgggcgacctcgtcctgttttttttgtttgtttgtttgtttttttaaaggtaaacctcctgggccgcagatggcaaagggagtgcctgggcctggtgacccagggctggatccacccctgcggagccctgggccaggcaggtgtctgctgctcacctggctctggagggctgccctgcagctgggcctggggacaggtcggctgtggggcagctcagtaccctccctgaggctcacggtggctccgagcatgaggtccgcctcctgggcgagacccagcagtggacagcatggtcctcacacccagctccctgcacacccaggccagccacccctcccgctcgtgcacaggcacgcagatgcgctcacacgtacacacacacaaatgcacgcccacttgcacatgctcacgcacatgttcacacatgcacactcacgctcacacatgctgtcacgcatacacacacgcacatactcctgcacatgttcccatgcatgtgtgtgcactcggaccgagcatctcccacgcacctctaccccaccccaagcacctctctccccccatgcacctctccccaacaacacacacagccccctgcaccgcccgccccccgcccccaccaaggccccagcctctggccatcagtcctggtgccagagctttgcgtgaagttcgggccgcagagtggcccgctgggactcccatgtgctgccgtctgatgtgctcagatgggctcatcgttggttcgtttttactgtatatttatagtaataaaatcatgcagcaa

SEQ ID NO: 150595 - DNA, 6405 bp, Homo sapiens
  Payload ID: 9745
  Gene Symbol: MGRN1
  Gene Name: mahogunin ring finger 1, E3 ubiquitin protein ligase
  Uniprot ID: O60291
  ENST ID: ENST00000415496
  CDS Start-End: 138-1730
gtgggggctcgaggcgcctccgcggccgtggacgagcgtccgtgcggcctggtccgggccatgtccgcgtgaggaccccgccgctgtcgccgctcccgttccggccctggcccctctgcccggcagcgccgcgcaccatgggctccattctcagccgccgcatcgcgggggtggaggacatcgacatccaggcgaactcggcctatcgctaccctccgaagtccggaaactactttgcttcgcactttttcatgggaggagagaaattcgacaccccccaccctgaaggttacctctttggagagaacatggatctgaacttcctgggcagccgcccggtccagtttccctacgtcactcctgccccccacgagcccgtgaagacgctgcggagcctggtgaacatccgcaaagactccctgcggctggtgaggtacaaagacgatgccgacagccccaccgaggacggcgacaagccccgggtgctctacagcctggagttcaccttcgacgccgatgcccgcgtggccatcaccatctactgccaggcatcggaggagttcctgaacggcagggcagtatacagccccaagagcccctcgctacagtccgagaccgtccactacaagagaggggtgagccagcagttctccctgccctccttcaagattgacttctcggaatggaaggatgacgagctgaactttgacctggaccggggcgtgtttccagtagtcatccaggctgtggtggacgaaggagatgtggtggaagtgactggccacgcccacgtgctcttggctgcctttgaaaagcacatggacggcagcttctctgtgaagcctttaaagcagaagcaaattgtggaccgggtcagctacctcctgcaggagatctatggcattgagaacaagaacaaccaggagaccaagccctcggacgacgagaacagcgacaacagcaacgagtgtgtggtgtgcctgtccgacctgcgggacacgctgatcctgccctgccgccacctgtgcctctgtacctcctgcgccgacacgctgcgctaccaggccaacaactgccccatctgccggctgcctttccgggccctcctgcagatccgggcggtgcggaagaagccaggagccctgtcccccgtgtccttcagccccgtcctggcccagagcctggagcatgatgagcactctaactctgacagcgtcccacctggctacgagcccatctcgctgctcgaggcgctcaacggcctccgggctgtctccccggccatcccctcggcccctctttatgaagaaatcacctattcaggcatctcggacggcctgtcccaggccagctgtcccctcgcggctatcgaccacatcctggacagcagccgccagaagggcaggccgcagagcaaggcccccgacagcaccctacggtccccgtcttcccccatccacgaagaggatgaggagaagctctccgaggacgtggacgcccctcccccactgggtggcgcagagctggccctgcgggaaagcagctcccctgagagtttcataacagaagaggttgatgagtcgtcgtcaccacagcaagggacccgagcagcttccattgagaatgtcctgcaggacagcagccccgagcactgtggccgaggcccacctgctgacatctacctgccagccctggggcccgactcctgctctgttggtatagacgagtaagccggtacgtgacctcccagacgcgcttcgggggctctgacgcgcgtccttggagagaggagccctcccctgctctctggcgggggttccttctggtttttgggtcttcgtccgcatccgcatcttcccaggggccctggattccgaatccagagctctccagtggctgctgcaccttcccccagaaagtggcctcctggggggtcctgactttcggggccagaggtctctccatctggactaggcggccggtcaggctcttcttccagccttgaggggccctggaacagtcccagcccaggcagggagacagacacagcccaggtgcgccagagccactgtccactgcgggaggcaggagcttgagggatgagggcagcaccgtggagggaaccccagggagacatggggtgagcgtcccaaggggagaggcctgggcctggccttgttccggatggtcccaccatgagttcgcatcggtcctgcagcagacacgttaggacgctcagcaggtccactcccgtgttccggtcgtggctttaacaattcatggggaaagaatgcgccccgattgggagagcccctggatcacgtcttcccaagctcagtccctgtctcttggagggagtccgtcctcgaggggccctctggtgcccaggggagagtatcttgcgtcctgtcctgagggcgtccgctcacacagccacctgctcccccgctccctccttcccttgtcagcatggccaccgtgggcctggcatcaccatgggcctggcacacagtccctcgtgggctgcctttgtgccatgagcccactgctgccgactcacctgtccctcccagtactggaaccttctggaacaccagcactaaaagataggaggccctgtgaggttggcatcccccatcccccccaagaggcgccctctaccagggtggcccaggtgagtgttttacagaaggcggctctgtccaggcagtggttcgcacctataagcccggtactttgggagaccgaggggatagatcacttgagcccaggaattcaagatcagtgtagaaaacatagaccccctctctatgaaaaataaaaaattggcttgggcgtggtagcttgtgcctgtggtcccagctactcaggggtgctgaggtgggaggattgccggagctggggaggtcaaggcccactccagcctgagacgctgtctcaataaaaaaaaatacacacacacccacccacccactccagcctgagaccctgtctcaagaaaaaaaaaatacacacacacacacacacacacacacacacgggggagagagagaaggcagctccaggagtgccaccaaaatgtaggcagacggattggggaccctctgccttcccagagggtcttggcacacaagctgcgtgcagctctggtctgccgaggcccatgcagcctgctgggaggtgcctggccgggggtgcaggctctaagaggccctttccccttgggtggacttgagccgggtcagggagaacttcgcttcttttgactgcgctctgcattcccatgaacctctgtcttcttgagcccagcgagtccctctgttgacccctgtcctgagccattatacccctagattgaaacagtcagcacctttcagacggccccggcctgcgcatcggtggaaggtgccgtgcgaatgtcacgattcaggtcaagcttccggagctggggagtgcaggtgtgatctagaacagggctcacagcctcggaaacctgctctcgccgcggcccccgaagaaaatagacgcccttcaccggagagtggggcctgggccgtgtctgctgggagccatgtgtcagggctggtggctgggtgtcaggcagccctgaggccatgctggccccgtcccaggctctgcaccagcaccattgcccaagccccagggacgccagacccatctggggacagcgcccggcggcgtcgtgcaggccacagtctgggcattggggctctgtgggaggctcctctctttgccttgcagtagccatccgggggctactctgagcacgggcttgttctcacccagggccgctccccacccctgcaccctgggttgaccgagttccaccctaacccagccgtaagaaccttggcaggacagtggctggccacatcccaggaaaccggaaccagggcaagggcaggaggcccagagggcatccaccgcggtgccgtgtcgcgctctgactcggggctgcagatctgctgtgggtgtccggggatctgggatcgtctgtcccaagagggacacagcgtatttggcacagttagggagtccccgggcccttggtgtgctcacatctgagtgaatgctgttgtggccacaggcggcgggagtgggggtgctggatggcccagcccctctggggctccagatcggtaggagcgggtggcgtggcaccaggcatccgagtgtgaccctcctccctctgctcccacctgcaggacggcccacctccatggagacggcccacggcctcgccaccaccagccccacctggcctccacttggtggccccagccccgatcccagcgccgccgagctgaccccactctgagagcctggccgagctggcagcatggagccctcggctccccagactttgccgaggggctgctccggaccccgttgtgagccggcctcctgtctgcatgccccctgtggccaccaggctccgaggggccgtggtgactcttgatcaaagagcacagtgaactgtcccttctgagtctcccttttctacagttgatatatttgtaactggtacaagatgaaggacagcagctttccatccctagttcagagcccccgttccccagggtcctgtgggctgagcggctggggctggggctgcccacgtgtggcctccgctggctctgcctgctcctgcaacagtgcggtccctgcccggagaactcaggaggcctgcagaagagaactgattggtggtcgaagcaccatcttcacagatgttcaggggcagtggggggctccaggcacggtcaatgaaggaaacagtgcctgtccacccaccctgcgtgtcactgtggcggcctggctgtcgctgctttttgtcctctgccgtgtttgcgcggcctcagtgccctccctggtgcgtctgcgctggggccctcagtgctcggggccttggggtgcatgggtgccgccctgggcagctagagtgtctcagcccggtgctgggcctggccgaggggcggaggcacagctgcttccagcagccagcattcagtggccttgtcaccaagctccacacctcctcctggtgctggctttggtgacatcacaaggcccctccaggtgcaggggcttctgtttggcaggcccctgccagggaggacctggtggcctcctcattctcttttgccattggaatgtccccttgcagttctcttctctttttttttttttttgagatggagtttcactcttgctgcccaggctggagtgcagtggctcaatctcgggtcactgcaacctccgcctcccgggttcaagtgatcgtcctgccttaggctcctgagtagctggggattacaggtgcctaccagcatgctcggctaatttttttgtatttttagtagagaagggatttcaccatgttggccgggctggtctcaaactcctaaggtcatccacctgcctcggcctcccagagtgctgagattacaggcgtgagcctccgcgcccggcccccttgcagttctctctgatttggtttgttctgtctcaggcttctgtggcaggactggcccagggaggaggaagccagcagcacacctggggaatggggtcccggccgggaggcttggcctctgggcgacctcgtcctgttttttttgtttgtttgtttgtttttttaaaggtaaacctcctgggccgcagatggcaaagggagtgcctgggcctggtgacccagggctggatccacccctgcggagccctgggccaggcaggtgtctgctgctcacctggctctggagggctgccctgcagctgggcctggggacaggtcggctgtggggcagctcagtaccctccctgaggctcacggtggctccgagcatgaggtccgcctcctgggcgagacccagcagtggacagcatggtcctcacacccagctccctgcacacccaggccagccacccctcccgctcgtgcacaggcacgcagatgcgctcacacgtacacacacacaaatgcacgcccacttgcacatgctcacgcacatgttcacacatgcacactcacgctcacacatgctgtcacgcatacacacacgcacatactcctgcacatgttcccatgcatgtgtgtgcactcggaccgagcatctcccacgcacctctaccccaccccaagcacctctctccccccatgcacctctccccaacaacacacacagccccctgcaccgcccgccccccgcccccaccaaggccccagcctctggccatcagtcctggtgccagagctttgcgtgaagttcgggccgcagagtggcccgctgggactcccatgtgctgccgtctgatgtgctcagatgggctcatcgttggttcgtttttactgtatatttatagtaataaaatcatgcagcaata

SEQ ID NO: 150596 - DNA, 1575 bp, Homo sapiens
  Payload ID: 9745
  Gene Symbol: MGRN1
  Gene Name: mahogunin ring finger 1, E3 ubiquitin protein ligase
  ENST ID: ENST00000536343
  CDS Start-End: 120-1082
tccgcggccgtggacgagcgtccgtgcggcctggtccgggccatgtccgcgtgaggaccccgccgctgtcgccgctcccgttccggccctggcccctctgcccggcagcgccgcgcaccatgggctccattctcagccgccgcatcgcgggggtggaggacatcgacatccaggcgaactcggcctatcgctaccctccgaagtccggaaactactttgcttcgcactttttcatgggaggagagaaattcgacaccccccaccctgaaggttacctctttggagagaacatggatctgaacttcctgggcagccgcccggtccagtttccctacgtcactcctgccccccacgagcccgtgaagacgctgcggagcctggtgaacatccgcaaagactccctgcggctggtgaggtacaaagacgatgccgacagccccaccgaggacggcgacaagccccgggtgctctacagcctggagttcaccttcgacgccgatgcccgcgtggccatcaccatctactgccaggcatcggaggagttcctgaacggcagggcagtatacagccccaagagcccctcgctacagtccgagaccgtccactacaagagaggggtgagccagcagttctccctgccctccttcaagattgacttctcggaatggaaggatgacgagctgaactttgacctggaccggggcgtgtttccagtagtcatccaggctgtggtggacgaaggagatgtggtggaagtgactggccacgcccacgtgctcttggctgcctttgaaaagcacatggacggcagcttctctgtgaagcctttaaagcagaagcaaattgtggaccgggtcagctacctcctgcaggagatctatggcattgagaacaagaacaaccaggagaccaagccctcggacgacgagaacagcgacaacagcaacgagtgtgtggtgtgcctgtccgacctgcgggacacgctgatcctgccctgccgccacctgtgcctctgtacctcctgcgccgacacgctgcgctaccaggccaacaactgccccatctgccggctgcaactctgacagcgtcccacctggctacgagcccatctcgctgctcgaggcgctcaacggcctccgggctgtctccccggccatcccctcggcccctctttatgaagaaatcacctattcaggcatctcggacggcctgtcccaggccagctgtcccctcgcggctatcgaccacatcctggacagcagccgccagaagggcaggccgcagagcaaggcccccgacagcaccctacggtccccgtcttcccccatccacgaagaggatgaggagaagctctccgaggacgtggacgcccctcccccactgggtggcgcagagctggccctgcgggaaagcagctcccctgagagtttcataacagaagaggttgatgagtcgtcgtcaccacagcaagggacccgagcagcttccattgagaatgtcctgcaggacagcagccccgagcactgtggccgaggcccacctgctgacatctacctgccaggacggcccacctcc

SEQ ID NO: 150597 - DNA, 994 bp, Homo sapiens
  Payload ID: 9745
  Gene Symbol: MGRN1
  Gene Name: mahogunin ring finger 1, E3 ubiquitin protein ligase
  ENST ID: ENST00000590790
  CDS Start-End: 1-994
tttcatgggaggagagaaattcgacaccccccaccctgaaggttacctctttggagagaacatggatctgaacttcctgggcagccgcccggtccagtttccctacgtcactcctgccccccacgagcccgtgaagacgctgcggagcctggtgaacatccgcaaagactccctgcggctggtgaggtacaaagacgatgccgacagccccaccgaggacggcgacaagccccgggtgctctacagcctggagttcaccttcgacgccgatgcccgcgtggccatcaccatctactgccaggcatcggaggagttcctgaacggcagggcagtatacagccccaagagcccctcgctacagtccgagaccgtccactacaagagaggggtgagccagcagttctccctgccctccttcaagattgacttctcggaatggaaggatgacgagctgaactttgacctggaccggggcgtgtttccagtagtcatccaggctgtggtggacgaaggagatgcagtggtggaagtgactggccacgcccacgtgctcttggctgcctttgaaaagcacatggacggcagcttctctgtgaagcctttaaagcagaagcaaattgtggaccgggtcagctacctcctgcaggagatctatggcattgagaacaagaacaaccaggagaccaagccctcggacgacgagaacagcgacaacagcaacgagtgtgtggtgtgcctgtccgacctgcgggacacgctgatcctgccctgccgccacctgtgcctctgtacctcctgcgccgacacgctgcgctaccaggccaacaactgccccatctgccggctgcctttccgggccctcctgcagatccgggcggtgcggaagaagccaggagccctgtcccccgtgtccttcagccccgtcctggcccagagcctggagcatgatgagcactcttgtccctttaaaaaatcaaagccgcaccccgcctcc

SEQ ID NO: 150598 - DNA, 498 bp, Homo sapiens
  Payload ID: 9745
  Gene Symbol: MGRN1
  Gene Name: mahogunin ring finger 1, E3 ubiquitin protein ligase
  ENST ID: ENST00000593224
  CDS Start-End: 1-498
gagaaattcgacaccccccaccctgaaggttacctctttggagagaacatggatctgaacttcctgggcagccgcccggtccagtttccctacgtcactcctgccccccacgagcccgtgaagacgctgcggagcctggtgaacatccgcaaagactccctgcggctggtgaggtacaaagacgatgccgacagccccaccgaggacggcgacaagccccgggtgctctacagcctggagttcaccttcgacgccgatgcccgcgtggccatcaccatctactgccaggcatcggaggagttcctgaacggcagggcagtatacagccccaagagcccctcgctacagtccgagaccgtccactacaagagaggggtgagccagcactacctcctgcaggagatctatggcattgagaacaagaacaaccaggagaccaagccctcggacgacgagaacagcgacaacagcaacgagtgtgtggtgtgcctgtccgac

SEQ ID NO: 150599 - DNA, 1841 bp, Homo sapiens
  Payload ID: 9745
  Gene Symbol: MGRN1
  Gene Name: mahogunin ring finger 1, E3 ubiquitin protein ligase
  Uniprot ID: O60291
  ENST ID: ENST00000586183
  CDS Start-End: 1-1593
atgggctccattctcagccgccgcatcgcgggggtggaggacatcgacatccaggcgaactcggcctatcgctaccctccgaagtccggaaactactttgcttcgcactttttcatgggaggagagaaattcgacaccccccaccctgaaggttacctctttggagagaacatggatctgaacttcctgggcagccgcccggtccagtttccctacgtcactcctgccccccacgagcccgtgaagacgctgcggagcctggtgaacatccgcaaagactccctgcggctggtgaggtacaaagacgatgccgacagccccaccgaggacggcgacaagccccgggtgctctacagcctggagttcaccttcgacgccgatgcccgcgtggccatcaccatctactgccaggcatcggaggagttcctgaacggcagggcagtatacagccccaagagcccctcgctacagtccgagaccgtccactacaagagaggggtgagccagcagttctccctgccctccttcaagattgacttctcggaatggaaggatgacgagctgaactttgacctggaccggggcgtgtttccagtagtcatccaggctgtggtggacgaaggagatgtggtggaagtgactggccacgcccacgtgctcttggctgcctttgaaaagcacatggacggcagcttctctgtgaagcctttaaagcagaagcaaattgtggaccgggtcagctacctcctgcaggagatctatggcattgagaacaagaacaaccaggagaccaagccctcggacgacgagaacagcgacaacagcaacgagtgtgtggtgtgcctgtccgacctgcgggacacgctgatcctgccctgccgccacctgtgcctctgtacctcctgcgccgacacgctgcgctaccaggccaacaactgccccatctgccggctgcctttccgggccctcctgcagatccgggcggtgcggaagaagccaggagccctgtcccccgtgtccttcagccccgtcctggcccagagcctggagcatgatgagcactctaactctgacagcgtcccacctggctacgagcccatctcgctgctcgaggcgctcaacggcctccgggctgtctccccggccatcccctcggcccctctttatgaagaaatcacctattcaggcatctcggacggcctgtcccaggccagctgtcccctcgcggctatcgaccacatcctggacagcagccgccagaagggcaggccgcagagcaaggcccccgacagcaccctacggtccccgtcttcccccatccacgaagaggatgaggagaagctctccgaggacgtggacgcccctcccccactgggtggcgcagagctggccctgcgggaaagcagctcccctgagagtttcataacagaagaggttgatgagtcgtcgtcaccacagcaagggacccgagcagcttccattgagaatgtcctgcaggacagcagccccgagcactgtggccgaggcccacctgctgacatctacctgccagccctggggcccgactcctgctctgttggtatagacgagtaagccggacggcccacctccatggagacggcccacggcctcgccaccaccagccccacctggcctccacttggtggccccagccccgatcccagcgccgccgagctgaccccactctgagagcctggccgagctggcagcatggagccctcggctccccagactttgccgaggggctgctccggaccccgttgtgagccggcctcctgtctgcatgccccctgtggccaccaggctccgaggggccgtgg

SEQ ID NO: 150600 - DNA, 1898 bp, Homo sapiens
  Payload ID: 9745
  Gene Symbol: MGRN1
  Gene Name: mahogunin ring finger 1, E3 ubiquitin protein ligase
  ENST ID: ENST00000587747
  CDS Start-End: 116-1898
cggccgtggacgagcgtccgtgcggcctggtccgggccatgtccgcgtgaggaccccgccgctgtcgccgctcccgttccggccctggcccctctgcccggcagcgccgcgcaccatgggctccattctcagccgccgcatcgcgggggtggaggacatcgacatccaggcgaactcggcctatcgctaccctccgaagtccggaaactactttgcttcgcactttttcatgggaggagagaaattcgacaccccccaccctgaaggttacctctttggagagaacatggatctgaacttcctgggcagccgcccggtccagtttccctacgtcactcctgccccccacgagcccgtgaagacgctgcggagcctggtgaacatccgcaaagactccctgcggctggtgaggtacaaagacgatgccgacagccccaccgaggacggcgacaagccccgggtgctctacagcctggagttcaccttcgacgccgatgcccgcgtggccatcaccatctactgccaggcatcggaggagttcctgaacggcagggcagtatacagccccaagagcccctcgctacagtccgagaccgtccactacaagagaggggtgagccagcagttctccctgccctccttcaagattgacttctcggaatggaaggatgacgagctgaactttgacctggaccggggcgtgtttccagtagtcatccaggctgtggtggacgaaggagatgtggtggaagtgactggccacgcccacgtgctcttggctgcctttgaaaagcacatggacggcagcttctctgtgaagcctttaaagcagaagcaaattgtggaccgggtcagctacctcctgcaggagatctatggcattgagaacaagaacaaccaggagaccaagatctcttggaaagtctcacaggcccgcttcattatggcatctgggcccaggacaactggagcagctccacgtggcgggagcggagcacctggccgggcctcgcctcaacccagggaaccctcggacgacgagaacagcgacaacagcaacgagtgtgtggtgtgcctgtccgacctgcgggacacgctgatcctgccctgccgccacctgtgcctctgtacctcctgcgccgacacgctgcgctaccaggccaacaactgccccatctgccggctgcctttccgggccctcctgcagatccgggcggtgcggaagaagccaggagccctgtcccccgtgtccttcagccccgtcctggcccagagcctggagcatgatgagcactcttgtccctttaaaaaatcaaagccgcaccccgcctccctggccagcaagaaacctaaaagggaaacaaactctgacagcgtcccacctggctacgagcccatctcgctgctcgaggcgctcaacggcctccgggctgtctccccggccatcccctcggcccctctttatgaagaaatcacctattcaggcatctcggacggcctgtcccaggccagctgtcccctcgcggctatcgaccacatcctggacagcagccgccagaagggcaggccgcagagcaaggcccccgacagcaccctacggtccccgtcttcccccatccacgaagaggatgaggagaagctctccgaggacgtggacgcccctcccccactgggtggcgcagagctggccctgcgggaaagcagctcccctgagagtttcataacagaagaggttgatgagtcgtcgtcaccacagcaagggacccgagcagcttccattgagaatgtcctgcaggacagcagccccgagcactgtggccgaggcccacctgctgacatctacctgccaggacggcccacctccatggagacggcccacggcctcgccaccaccagcc

SEQ ID NO: 150601 - DNA, 556 bp, Homo sapiens
  Payload ID: 9745
  Gene Symbol: MGRN1
  Gene Name: mahogunin ring finger 1, E3 ubiquitin protein ligase
  ENST ID: ENST00000591895
  CDS Start-End: 110-556
gtttacagaccggcacatggcgcttccggttgacgttgctgacagctagtgaggctttagcccgcttcgagcgcccgggggcggaaactactttgcttcgcactttttcatgggaggagagaaattcgacaccccccaccctgaaggttacctctttggagagaacatggatctgaacttcctgggcagccgcccggtccagtttccctacgtcactcctgccccccacgagcccgtgaagacgctgcggagcctggtgaacatccgcaaagactccctgcggctggtgaggtacaaagacgatgccgacagccccaccgaggacggcgacaagccccgggtgctctacagcctggagttcaccttcgacgccgatgcccgcgtggccatcaccatctactgccaggcatcggaggagttcctgaacggcagggcagtatacagccccaagagcccctcgctacagtccgagaccgtccactacaagagaggggtgagccagcagttctccctgccctccttcaagattgacttctcggaatggaaggatgacgag

SEQ ID NO: 150602 - DNA, 1665 bp, Homo sapiens
  Payload ID: 9745
  Gene Symbol: MGRN1
  Gene Name: mahogunin ring finger 1, E3 ubiquitin protein ligase
  Uniprot ID: O60291
  ENST ID: ENST00000588994
  CDS Start-End: 1-1665
atgggctccattctcagccgccgcatcgcgggggtggaggacatcgacatccaggcgaactcggcctatcgctaccctccgaagtccggaaactactttgcttcgcactttttcatgggaggagagaaattcgacaccccccaccctgaaggttacctctttggagagaacatggatctgaacttcctgggcagccgcccggtccagtttccctacgtcactcctgccccccacgagcccgtgaagacgctgcggagcctggtgaacatccgcaaagactccctgcggctggtgaggtacaaagacgatgccgacagccccaccgaggacggcgacaagccccgggtgctctacagcctggagttcaccttcgacgccgatgcccgcgtggccatcaccatctactgccaggcatcggaggagttcctgaacggcagggcagtatacagccccaagagcccctcgctacagtccgagaccgtccactacaagagaggggtgagccagcagttctccctgccctccttcaagattgacttctcggaatggaaggatgacgagctgaactttgacctggaccggggcgtgtttccagtagtcatccaggctgtggtggacgaaggagatgtggtggaagtgactggccacgcccacgtgctcttggctgcctttgaaaagcacatggacggcagcttctctgtgaagcctttaaagcagaagcaaattgtggaccgggtcagctacctcctgcaggagatctatggcattgagaacaagaacaaccaggagaccaagccctcggacgacgagaacagcgacaacagcaacgagtgtgtggtgtgcctgtccgacctgcgggacacgctgatcctgccctgccgccacctgtgcctctgtacctcctgcgccgacacgctgcgctaccaggccaacaactgccccatctgccggctgcctttccgggccctcctgcagatccgggcggtgcggaagaagccaggagccctgtcccccgtgtccttcagccccgtcctggcccagagcctggagcatgatgagcactctaactctgacagcgtcccacctggctacgagcccatctcgctgctcgaggcgctcaacggcctccgggctgtctccccggccatcccctcggcccctctttatgaagaaatcacctattcaggcatctcggacggcctgtcccaggccagctgtcccctcgcggctatcgaccacatcctggacagcagccgccagaagggcaggccgcagagcaaggcccccgacagcaccctacggtccccgtcttcccccatccacgaagaggatgaggagaagctctccgaggacgtggacgcccctcccccactgggtggcgcagagctggccctgcgggaaagcagctcccctgagagtttcataacagaagaggttgatgagtcgtcgtcaccacagcaagggacccgagcagcttccattgagaatgtcctgcaggacagcagccccgagcactgtggccgaggcccacctgctgacatctacctgccaggacggcccacctccatggagacggcccacggcctcgccaccaccagccccacctggcctccacttggtggccccagccccgatcccagcgccgccgagctgaccccactctga

SEQ ID NO: 150603 - DNA, 1594 bp, Homo sapiens
  Payload ID: 9746
  Gene Symbol: MFSD1
  Gene Name: major facilitator superfamily domain containing 1
  Uniprot ID: Q9H3U5
  ENST ID: ENST00000264266
  CDS Start-End: 63-1460
gctgcttcctgcctgggtttggagttgtcaccactttcccctctccgtctcctgcgggcgcaatggaggaggaggatgaggaagcgcgggcgctcctggcaggcggccctgacgaggccgacagaggtgccccggccgcccctggagccctgccggccctctgcgaccccagtcgcctggcgcaccggcttttggtgctgttactgatgtgcttccttggctttggcagctatttttgctatgataatcctgctgcccttcagactcaagttaaacgagatatgcaagtgaataccacgaaattcatgctgctgtatgcctggtattcttggcccaatgtagttttgtgtttctttggtggctttttgatagaccgagtatttggaatacgatggggcacaatcatttttagctgctttgtttgcattggacaggttgtttttgccctgggtggaatatttaatgctttttggctgatggaatttggaagatttgtatttgggattggtggcgagtccttagcagttgcccagaatacatatgctgtgagctggtttaaaggcaaagaattaaacctggtgtttggacttcaacttagcatggctagaattggaagtacagtaaacatgaacctcatgggatggctgtattctaagattgaagctttgttaggttctgctggtcacacaaccctcgggatcacacttatgattgggggtataacgtgtattctttcactaatctgtgccttggctcttgcctacttggatcagagagcagagagaatccttcataaagaacaaggaaaaacaggtgaagttattaaattaactgatgtaaaggacttctccttacccctgtggcttatatttatcatctgtgtctgctattatgttgctgtgttcccttttattggacttgggaaagttttctttacagagaaatttggattttcttcccaggcagcaagtgcaattaacagtgttgtatatgtcatatcagctcccatgtccccggtgtttgggctcctggtggataaaacagggaagaacatcatctgggttctttgcgcagtagcagccactcttgtgtcccacatgatgctggcctttacgatgtggaacccttggattgctatgtgtcttctgggactctcctactcattgcttgcctgtgcattgtggccaatggtggcatttgtagttcctgaacatcagctgggaactgcatatggcttcatgcagtccattcagaatcttgggttggccatcatttccatcattgctggtatgatactggattctcgggggtatttgtttttggaagtgttcttcattgcctgtgtttctttgtcacttttatctgtggtcttactctatttggtgaatcgtgcccagggtgggaacctaaattattctgcaagacaaagggaagaaataaaattttcccatactgaatgagaagttaaaatgaatgtgtcatgagaatgggcttaacacatcgttggtttgaaaacttccatttttaaaaatttagagtttagtcattagaaaaaataatggactggaaagttatatttatatccaaatatacc

SEQ ID NO: 150604 - DNA, 2244 bp, Homo sapiens
  Payload ID: 9746
  Gene Symbol: MFSD1
  Gene Name: major facilitator superfamily domain containing 1
  Uniprot ID: Q9H3U5
  ENST ID: ENST00000392813
  CDS Start-End: 81-1508
agtcacccaggaaaagcgaaccgcgccaggccctgtcatcgaccgctgggtccgtcctcccagcgctcgcggccgctcacatgggcgtggccctgcgtgacctgccggggcgtcacgtgagctcccggagtcatgtgaccgccgtcttgacagtgttccacgggcgctgcttcctgcctgggtttggagttgtcaccactttcccctctccgtctcctgcgggcgcaatggaggaggaggatgaggaagcgcgggcgctcctggcaggcggccctgacgaggccgacagaggtgccccggccgcccctggagccctgccggccctctgcgaccccagtcgcctggcgcaccggcttttggtgctgttactgatgtgcttccttggctttgctatttttgctatgataatcctgctgcccttcagactcaagttaaacgaatggggcacaatcatttttagctgctttgtttgcattggacaggttgtttttgccctgggtggaatatttaatgctttttggctgatggaatttggaagatttgtatttgggattggtggcgagtccttagcagttgcccagaatacatatgctgtgagctggtttaaaggcaaagaattaaacctggtgtttggacttcaacttagcatggctagaattggaagtacagtaaacatgaacctcatgggatggctgtattctaagattgaagctttgttaggttctgctggtcacacaaccctcgggatcacacttatgattgggggtataacgtgtattctttcactaatctgtgccttggctcttgcctacttggatcagagagcagagagaatccttcataaagaacaaggaaaaacaggtgaagttattaaattaactgatgtaaaggacttctccttacccctgtggcttatatttatcatctgtgtctgctattatgttgctgtgttcccttttattggacttgggaaagttttctttacagagaaatttggattttcttcccaggcagcaagtgcaattaacagtgttgtatatgtcatatcagctcccatgtccccggtgtttgggctcctggtggataaaacagggaagaacatcatctgggttctttgcgcagtagcagccactcttgtgtcccacatgatgctggcctttacgatgtggaacccttggattgctatgtgtcttctgggactctcctactcattgcttgcctgtgcattgtggccaatggtggcatttgtagttcctgaacatcagctgggaactgcatatggcttcatgcagtccattcagaatcttgggttggccatcatttccatcattgctggtatgatactggattctcgggggtatttgtttttggaagtgttcttcattgcctgtgtttctttgtcacttttatctgtggtcttactctatttggtgaatcgtgcccagggtgggaacctaaattattctgcaagacaaagggaagaaataaaattttcccatactgaatgagaagttaaaatgaatgtgtcatgagaatgggcttaacacatcgttggtttgaaaacttccatttttaaaaatttagagtttagtcattagaaaaaataatggactggaaagttatatttatatccaaatatacctatttcaaagtgtatttgtgaggcctgttttagcctgtgtcttttgtattgtgtgttgctaaagaattctacttttagtaggctaatcaacaatgaaagggttagaaaattgctgtggaacatccaggtgaacttcaggaaagacagtgaaaaatggaaaacgttggagcttctgttgagataatcttcattaggtatatatcttagggatacagccttttctttatcttatagcaggaaaaaaaaacttttgagggaaatagaagggctgcgttacacaaaataaacaatggcattgtcataggccttccttttactagtagggcataatgctagggaatatgtgaagatgtttttatgaagtctctttctgatcacgaacaatagcttgcgctctactctgtagttatgtggattgccgagcaatgacccttttcaatttcttatttctgtgttactgaggaccctaatcacttagggatgtaattttatagtataaactttctgtacagtttttcttatagtctaataagtaaaaagtgtccttcaaattatgataattgcctatgtacatggataaattaaaacactgcacacggagt

SEQ ID NO: 150605 - DNA, 2423 bp, Homo sapiens
  Payload ID: 9746
  Gene Symbol: MFSD1
  Gene Name: major facilitator superfamily domain containing 1
  Uniprot ID: Q9H3U5
  ENST ID: ENST00000415822
  CDS Start-End: 142-1686
agtgcagtaattggtggaaagctggaagtgggcacctcgagggcctcagccccacgaacacagtcacccaggaaaagcgaaccgcgccaggccctgtcatcgaccgctgggtccgtcctcccagcgctcgcggccgctcacatgggcgtggccctgcgtgacctgccggggcgtcacgtgagctcccggagtcatgtgaccgccgtcttgacagtgttccacgggcgctgcttcctgcctgggtttggagttgtcaccactttcccctctccgtctcctgcgggcgcaatggaggaggaggatgaggaagcgcgggcgctcctggcaggcggccctgacgaggccgacagaggtgccccggccgcccctggagccctgccggccctctgcgaccccagtcgcctggcgcaccggcttttggtgctgttactgatgtgcttccttggctttggcagctatttttgctatgataatcctgctgcccttcagactcaagttaaacgagatatgcaagtgaataccacgaaattcatgctgctgtatgcctggtattcttggcccaatgtagttttgtgtttctttggtggctttttgatagaccgagtatttggaatacgatggggcacaatcatttttagctgctttgtttgcattggacaggttgtttttgccctgggtggaatatttaatgctttttggctgatggaatttggaagatttgtatttgggattggtggcgagtccttagcagttgcccagaatacatatgctgtgagctggtttaaaggcaaagaattaaacctggtgtttggacttcaacttagcatggctagaattggaagtacagtaaacatgaacctcatgggatggctgtattctaagattgaagctttgttaggttctgctggtcacacaaccctcgggatcacacttatgattgggggtataacgtgtattctttcactaatctgtgccttggctcttgcctacttggatcagagagcagagagaatccttcataaagaacaaggaaaaacaggtgaagttattaaattaactgatgtaaaggacttctccttacccctgtggcttatatttatcatctgtgtctgctattatgttgctgtgttcccttttattggacttgggaaagttttctttacagagaaatttggattttcttcccaggcagcaagtgcaattaacagtgttgtatatgtcatatcagctcccatgtccccggtgtttgggctcctggtggataaaacagggaagaacatcatctgggttctttgcgcagtagcagccactcttgtgtcccacatgatgctggcctttacgatgtggaacccttggattgctatgtgtcttctgggactctcctactcattgcttgcctgtgcattgtggccaatggtggcatttgtagttcctgaacatcagctgggaactgcatatggcttcatgcagtccattcagaatcttgggttggccatcatttccatcattgctggtatgatactggattctcgggggtatttgtttttggaagtgttcttcattgcctgtgtttctttgtcacttttatctgtggtcttactctatttggtgaatcgtgcccagggtgggaacctaaattattctgcaagacaaagggaagaaataaaattttcccatactgaatgagaagttaaaatgaatgtgtcatgagaatgggcttaacacatcgttggtttgaaaacttccatttttaaaaatttagagtttagtcattagaaaaaataatggactggaaagttatatttatatccaaatatacctatttcaaagtgtatttgtgaggcctgttttagcctgtgtcttttgtattgtgtgttgctaaagaattctacttttagtaggctaatcaacaatgaaagggttagaaaattgctgtggaacatccaggtgaacttcaggaaagacagtgaaaaatggaaaacgttggagcttctgttgagataatcttcattaggtatatatcttagggatacagccttttctttatcttatagcaggaaaaaaaaacttttgagggaaatagaagggctgcgttacacaaaataaacaatggcattgtcataggccttccttttactagtagggcataatgctagggaatatgtgaagatgtttttatgaagtctctttctgatcacgaacaatagcttgcgctctactctgtagttatgtggattgccgagcaatgacccttttcaatttcttatttctgtgttactgaggaccctaatcacttagggatgtaattttatagtataaactttctgtacagtttttcttatagtctaataagtaaaaagtgtccttcaaattatgataattgcctatgtacatggataaattaaaacactgcacacggagta

SEQ ID NO: 150606 - DNA, 581 bp, Homo sapiens
  Payload ID: 9746
  Gene Symbol: MFSD1
  Gene Name: major facilitator superfamily domain containing 1
  ENST ID: ENST00000477743
  CDS Start-End: 1-581
ggcaaagaattaaacctggtgtttggacttcaacttagcatggctagaattggaagtacagtaaacatgaacctcatgggatggctgtattctaagattgaagctttgttaggttctgctggtcacacaaccctcgggatcacacttatgattgggggtataacgtgtattctttcactaatctgtgccttggctcttgcctacttggatcagagagcagagagaatccttcataaagaacaaggaaaaacaggtgaagttattaaattaactgatgtaaaggacttctccttacccctgtggcttatatttatcatctgtgtctgctattatgttgctgtgttcccttttattggacttgggaatgttgtatatgtcatatcagctcccatgtccccggtgtttgggctcctggtggataaaacagggaagaacatcatctgggttctttgcgcagtagcagccactcttgtgtcccacatgatgctggcctttacgatgtggaacccttggattgctatgtgtcttctgggactctcctactcattgcttgcctgtgcattgtggccaatggtggcatt

SEQ ID NO: 150607 - DNA, 566 bp, Homo sapiens
  Payload ID: 9746
  Gene Symbol: MFSD1
  Gene Name: major facilitator superfamily domain containing 1
  ENST ID: ENST00000486568
  CDS Start-End: 217-566
cggaagttgaagaagtgaagcgccgcgcgcgccgcctgctgcaggagcctgcgcgggaccccagcatcctgaggctgcccagggtcgtcggggtccccggaccccgcgggcgccgccaccggggcgagcaacagcagcagcgcgagcagcggggcggtggggcgcgggcccctgggcccggaccagggagcaggcagccgttgccggcggggctgcatggacgcaggaaagttggctcggcacccgacagacacgggctcggagcgggcagtgccggcgctcgcggaaataaggccgtggtgggcccctcccctccgcccccagggcgaaggcagctatttttgctatgataatcctgctgcccttcagactcaagttaaacgagatatgcaagtgaataccacgaaattcatgctgctgtatgcctggtattcttggcccaatgtagttttgtgtttctttggtggctttttgatagaccgagtatttggaatacgatggggcacaatcatttttagctgctttgtttgcattggacaggttgtttttgccctgggtggaatatt

SEQ ID NO: 150608 - DNA, 2121 bp, Homo sapiens
  Payload ID: 9746
  Gene Symbol: MFSD1
  Gene Name: major facilitator superfamily domain containing 1
  Uniprot ID: Q9H3U5
  ENST ID: ENST00000484166
  CDS Start-End: 103-339
cggagtcatgtgaccgccgtcttgacagtgttccacgggcgctgcttcctgcctgggtttggagttgtcaccactttcccctctccgtctcctgcgggcgcaatggaggaggaggatgaggaagcgcgggcgctcctggcaggcggccctgacgaggccgacagaggtgccccggccgcccctggagccctgccggccctctgcgaccccagtcgcctggcgcaccggcttttggtgctgttactgatgtgcttccttggctttggcagctatttttgctatgataatcctgctgcccttcagactcaagttaaacgaatggggcacaatcatttttagctgctttgtttgcattggacaggttgtttttgccctgggtggaatatttaatgctttttggctgatggaatttggaagatttgtatttgggattggtggcgagtccttagcagttgcccagaatacatatgctgtgagctggtttaaaggcaaagaattaaacctggtgtttggacttcaacttagcatggctagaattggaagtacagtaaacatgaacctcatgggatggctgtattctaagattgaagctttgttaggttctgctggtcacacaaccctcgggatcacacttatgattgggggtataacgtgtattctttcactaatctgtgccttggctcttgcctacttggatcagagagcagagagaatccttcataaagaacaaggaaaaacaggtgaagttattaaattaactgatgtaaaggacttctccttacccctgtggcttatatttatcatctgtgtctgctattatgttgctgtgttcccttttattggacttgggaaagttttctttacagagaaatttggattttcttcccaggcagcaagtgcaattaacagtgttgtatatgtcatatcagctcccatgtccccggtgtttgggctcctggtggataaaacagggaagaacatcatctgggttctttgcgcagtagcagccactcttgtgtcccacatgatgctggcctttacgatgtggaacccttggattgctatgtgtcttctgggactctcctactcattgcttgcctgtgcattgtggccaatggtggcatttgtagttcctgaacatcagctgggaactgcatatggcttcatgcagtccattcagaatcttgggttggccatcatttccatcattgctggtatgatactggattctcgggggtatttgtttttggaagtgttcttcattgcctgtgtttctttgtcacttttatctgtggtcttactctatttggtgaatcgtgcccagggtgggaacctaaattattctgcaagacaaagggaagaaataaaattttcccatactgaatgagaagttaaaatgaatgtgtcatgagaatgggcttaacacatcgttggtttgaaaacttccatttttaaaaatttagagtttagtcattagaaaaaataatggactggaaagttatatttatatccaaatatacctatttcaaagtgtatttgtgaggcctgttttagcctgtgtcttttgtattgtgtgttgctaaagaattctacttttagtaggctaatcaacaatgaaagggttagaaaattgctgtggaacatccaggtgaacttcaggaaagacagtgaaaaatggaaaacgttggagcttctgttgagataatcttcattaggtatatatcttagggatacagccttttctttatcttatagcaggaaaaaaaaacttttgagggaaatagaagggctgcgttacacaaaataaacaatggcattgtcataggccttccttttactagtagggcataatgctagggaatatgtgaagatgtttttatgaagtctctttctgatcacgaacaatagcttgcgctctactctgtagttatgtggattgccgagcaatgacccttttcaatttcttatttctgtgttactgaggaccctaatcacttagggatgtaattttatagtataaactttctgtacagtttttcttatagtctaataagtaaaaagtgtccttcaaattatgataattgcctatgtacatggataaattaaaacactgcacacgga

SEQ ID NO: 150609 - DNA, 639 bp, Homo sapiens
  Payload ID: 9746
  Gene Symbol: MFSD1
  Gene Name: major facilitator superfamily domain containing 1
  ENST ID: ENST00000465739
  CDS Start-End: 530-639
cttgtcaaggctcagccccgtggcctgcactcacctctcctcctgatggccttagcctcctgattgagactgcacactcagaccatgctgttaggactgagggatttttagtcccccaagtaccaatgagagctggagaagtgacaagtggatgtgtccagagaaggaggccgaggcagaccgtgctctctgtttccacagtatcccttctccatttctcccttactgtgatggtctgagttttgtgttccccacaaattaacatatttcagtcctaacactcaaagtgatggattaggaggtagggcctttgaggggtgattagtggctgtatgaaagaggcccgagagtggcacctcatcttttccatcacgcgaggacacagcaaaaaggccctgtgaaccatgaagtgggtcctcaccagaacctgaatctgctggcactttgatcttggatttccagccaccagaaccgcagctatttttgctatgataatcctgctgcccttcagactcaagttaaacgagatatgcaagtgaataccacgaaattcatgctgctgtatgcctggtattcttggcccaatgtagttttgtgtttctttggtggctttttgatagaccgagtatttggaatacg

SEQ ID NO: 150610 - DNA, 384 bp, Homo sapiens
  Payload ID: 9746
  Gene Symbol: MFSD1
  Gene Name: major facilitator superfamily domain containing 1
  ENST ID: ENST00000482835
  CDS Start-End: 1-384
atgttgctagttactccgcgtccggaacgtggaggtcgagggactgagctgggcgagttttgtggcactcctttgctcttcagtaagtcccaggggctagcgactcgccctagaggcgatagatatgaaggcagctatttttgctatgataatcctgctgcccttcagactcaagttaaacgagatatgcaagtgaataccacgaaattcatgctgctgtatgcctggtattcttggcccaatgtagttttgtgtttctttggtggctttttgatagaccgagtatttggaatacgatggggcacaatcatttttagctgctttgtttgcattggacaggttgtttttgccctgggtggaatatttaatgctttttggctgatg

SEQ ID NO: 150611 - DNA, 560 bp, Homo sapiens
  Payload ID: 9746
  Gene Symbol: MFSD1
  Gene Name: major facilitator superfamily domain containing 1
  ENST ID: ENST00000471266
  CDS Start-End: 17-253
gtctcctgcgggcgcaatggaggaggaggatgaggaagcgcgggcgctcctggcaggcggccctgacgaggccgacagaggtgccccggccgcccctggagccctgccggccctctgcgaccccagtcgcctggcgcaccggcttttggtgctgttactgatgtgcttccttggctttggcagctatttttgctatgataatcctgctgcccttcagactcaagttaaacgattttattttcttttcatataggatatgcaagtgaataccacgaaattcatgctgctgtatgcctggtattcttggcccaatgtagttttgtgtttctttggtggctttttgatagaccgagtatttggaatacgatggggcacaatcatttttagctgctttgtttgcattggacaggttgtttttgccctgggtggaatatttaatgctttttggctgatggaatttggaagatttgtatttgggattggtggcgagtccttagcagttgcccagaatacatatgctgtgagctggtttaaaggcaaagaattaaacctggtgtttg

SEQ ID NO: 150612 - DNA, 2239 bp, Homo sapiens
  Payload ID: 9746
  Gene Symbol: MFSD1
  Gene Name: major facilitator superfamily domain containing 1
  Uniprot ID: Q9H3U5
  ENST ID: ENST00000480292
  CDS Start-End: 97-333
catgtgaccgccgtcttgacagtgttccacgggcgctgcttcctgcctgggtttggagttgtcaccactttcccctctccgtctcctgcgggcgcaatggaggaggaggatgaggaagcgcgggcgctcctggcaggcggccctgacgaggccgacagaggtgccccggccgcccctggagccctgccggccctctgcgaccccagtcgcctggcgcaccggcttttggtgctgttactgatgtgcttccttggctttggcagctatttttgctatgataatcctgctgcccttcagactcaagttaaacgaatggggcacaatcatttttagctgctttgtttgcattggacaggttgtttttgccctgggtggaatatttaatgctttttggctgatggaatttggaagatttgtatttgggattggtggcgagtccttagcagttgcccagaatacatatgctgtgagctggtttaaaggcaaagaattaaacctggtgtttggacttcaacttagcatggctagaattggaagtacagtaaacatgaacctcatgggatggctgtattctaagattgaagctttgttaggttctgctggtcacacaaccctcgggatcacacttatgattgggggtataacgtgtattctttcactaatctgtgccttggctcttgcctacttggatcagagagcagagagaatccttcataaagaacaaggaaaaacaggtgaagttattaaattaactgatgtaaaggacttctccttacccctgtggcttatatttatcatctgtgtctgctattatgttgctgtgttcccttttattggacttgggaaagttttctttacagagaaatttggattttcttcccaggcagcaagtgcaattaacagtgttgtatatgtcatatcagctcccatgtccccggtgtttgggctcctggtggataaaacagggaagaacatcatctgggttctttgcgcagtagcagccactcttgtgtcccacatgatgctggcctttacgatgtggaacccttggattgctatgtgtcttctgggactctcctactcattgcttgcctgtgcattgtggccaatggtggcatttgtagttcctgaacatcagctgggaactgcatatggcttcatgcagtccattcagaatcttgggttggccatcatttccatcattgctggtatgatactggattctcgggggtatttgtttttggaagtgttcttcattgcctgtgtttcttagacaggatttgtctctgtcacccagactggaatgcagtggagcagtcacagctcaatgtaactttgaactgcggagttcaggtgatcctcccacctcagcctccgtgatagctaagactacagtgtcacttttatctgtggtcttactctatttggtgaatcgtgcccagggtgggaacctaaattattctgcaagacaaagggaagaaataaaattttcccatactgaatgagaagttaaaatgaatgtgtcatgagaatgggcttaacacatcgttggtttgaaaacttccatttttaaaaatttagagtttagtcattagaaaaaataatggactggaaagttatatttatatccaaatatacctatttcaaagtgtatttgtgaggcctgttttagcctgtgtcttttgtattgtgtgttgctaaagaattctacttttagtaggctaatcaacaatgaaagggttagaaaattgctgtggaacatccaggtgaacttcaggaaagacagtgaaaaatggaaaacgttggagcttctgttgagataatcttcattaggtatatatcttagggatacagccttttctttatcttatagcaggaaaaaaaaacttttgagggaaatagaagggctgcgttacacaaaataaacaatggcattgtcataggccttccttttactagtagggcataatgctagggaatatgtgaagatgtttttatgaagtctctttctgatcacgaacaatagcttgcgctctactctgtagttatgtggattgccgagcaatgacccttttcaatttcttatttctgtgttactgaggaccctaatcacttagggatgtaattttatagtataaactttctgtacagtttttcttatagtctaataagtaaaaagtgtccttcaaattatgataattgcctatgtacatggataaattaaaacactgcacacgga

SEQ ID NO: 150613 - DNA, 592 bp, Homo sapiens
  Payload ID: 9746
  Gene Symbol: MFSD1
  Gene Name: major facilitator superfamily domain containing 1
  ENST ID: ENST00000474670
  CDS Start-End: 108-592
atcgtcatcgtggtcactggtgccacggggcctcagcgcagcttctgtcttaagctcctgggcctccttattttcccctttgcgatcgattccagccacacctgtggatgttgctagttactccgcgtccggaacgtggaggtcgagggactgagctgggcgagttttgtggcactcctttgctcttcagcagctatttttgctatgataatcctgctgcccttcagactcaagttaaacgagatatgcaagtgaataccacgaaattcatgctgctgtatgcctggtattcttggcccaatgtagttttgtgtttctttggtggctttttgatagaccgagtatttggaatacgatggggcacaatcatttttagctgctttgtttgcattggacaggttgtttttgccctgggtggaatatttaatgctttttggctgatggaatttggaagatttgtatttgggattggtggcgagtccttagcagttgcccagaatacatatgctgtgagctggtttaaaggcaaagaattaaacctggtgtttggacttcaacttagcatggctagaattggaagtacagtaaacat

SEQ ID NO: 150614 - DNA, 312 bp, Homo sapiens
  Payload ID: 9746
  Gene Symbol: MFSD1
  Gene Name: major facilitator superfamily domain containing 1
  ENST ID: ENST00000491804
  CDS Start-End: 58-312
gggcgcgggcccctgggcccggaccagggagcaggcagccgttgccggcggggctgcatggacgcaggaaagttggctcggcacccgacagacacgggctcggagcgggcagtgccggcgctcgcggaaataaggccgtggtgggcccctcccctccgcccccagggcgaagataattgtgaaacacctgtgccaggccctgggggaatgagggtgaacaatcttaaacatctctgccttcctggagcacaccttctaggcagctatttttgctatgataatcctgctgcccttcagactcaagttaaacga

SEQ ID NO: 150615 - DNA, 2097 bp, Homo sapiens
  Payload ID: 9746
  Gene Symbol: MFSD1
  Gene Name: major facilitator superfamily domain containing 1
  ENST ID: ENST00000471500
  CDS Start-End: 1-195
gaggaggaggatgaggaagcgcgggcgctcctggcaggcggccctgacgaggccgacagaggtgccccggccgcccctggagccctgccggccctctgcgaccccagtcgcctggcgcaccggcttttggcagctatttttgctatgataatcctgctgcccttcagactcaagttaaacgagatatgcaagtgaataccacgaaattcatgctgctgtatgcctggtattcttggcccaatgtagttttgtgtttctttggtggctttttgatagaccgagtatttggaatacgatggggcacaatcatttttagctgctttgtttgcattggacaggttgtttttgccctgggtggaatatttaatgctttttggctgatggaatttggaagatttgtatttgggattggtggcgagtccttagcagttgcccagaatacatatgctgtgagctggtttaaaggcaaagaattaaacctggtgtttggacttcaacttagcatggctagaattggaagtacagtaaacatgaacctcatgggatggctgtattctaagattgaagctttgttaggttctgctggtcacacaaccctcgggatcacacttatgattgggggtataacgtgtattctttcactaatctgtgccttggctcttgcctacttggatcagagagcagagagaatccttcataaagaacaaggaaaaacaggtgaagttattaaattaactgatgtaaaggacttctccttacccctgtggcttatatttatcatctgtgtctgctattatgttgctgtgttcccttttattggacttgggaaagttttctttacagagaaatttggattttcttcccaggcagcaagtgcaattaacagtgttgtatatgtcatatcagctcccatgtccccggtgtttgggctcctggtggataaaacagggaagaacatcatctgggttctttgcgcagtagcagccactcttgtgtcccacatgatgctggcctttacgatgtggaacccttggattgctatgtgtcttctgggactctcctactcattgcttgcctgtgcattgtggccaatggtggcatttgtagttcctgaacatcagctgggaactgcatatggcttcatgcagtccattcagaatcttgggttggccatcatttccatcattgctggtatgatactggattctcgggggtatttgtttttggaagtgttcttcattgcctgtgtttctttgtcacttttatctgtggtcttactctatttggtgaatcgtgcccagggtgggaacctaaattattctgcaagacaaagggaagaaataaaattttcccatactgaatgagaagttaaaatgaatgtgtcatgagaatgggcttaacacatcgttggtttgaaaacttccatttttaaaaatttagagtttagtcattagaaaaaataatggactggaaagttatatttatatccaaatatacctatttcaaagtgtatttgtgaggcctgttttagcctgtgtcttttgtattgtgtgttgctaaagaattctacttttagtaggctaatcaacaatgaaagggttagaaaattgctgtggaacatccaggtgaacttcaggaaagacagtgaaaaatggaaaacgttggagcttctgttgagataatcttcattaggtatatatcttagggatacagccttttctttatcttatagcaggaaaaaaaaacttttgagggaaatagaagggctgcgttacacaaaataaacaatggcattgtcataggccttccttttactagtagggcataatgctagggaatatgtgaagatgtttttatgaagtctctttctgatcacgaacaatagcttgcgctctactctgtagttatgtggattgccgagcaatgacccttttcaatttcttatttctgtgttactgaggaccctaatcacttagggatgtaattttatagtataaactttctgtacagtttttcttatagtctaataagtaaaaagtgtccttcaaattatgataattgcctatgtacatggataaattaaaacactgcacacgg

SEQ ID NO: 150616 - DNA, 2361 bp, Homo sapiens
  Payload ID: 9746
  Gene Symbol: MFSD1
  Gene Name: major facilitator superfamily domain containing 1
  Uniprot ID: Q9H3U5
  ENST ID: ENST00000622669
  CDS Start-End: 81-1625
agtcacccaggaaaagcgaaccgcgccaggccctgtcatcgaccgctgggtccgtcctcccagcgctcgcggccgctcacatgggcgtggccctgcgtgacctgccggggcgtcacgtgagctcccggagtcatgtgaccgccgtcttgacagtgttccacgggcgctgcttcctgcctgggtttggagttgtcaccactttcccctctccgtctcctgcgggcgcaatggaggaggaggatgaggaagcgcgggcgctcctggcaggcggccctgacgaggccgacagaggtgccccggccgcccctggagccctgccggccctctgcgaccccagtcgcctggcgcaccggcttttggtgctgttactgatgtgcttccttggctttggcagctatttttgctatgataatcctgctgcccttcagactcaagttaaacgagatatgcaagtgaataccacgaaattcatgctgctgtatgcctggtattcttggcccaatgtagttttgtgtttctttggtggctttttgatagaccgagtatttggaatacgatggggcacaatcatttttagctgctttgtttgcattggacaggttgtttttgccctgggtggaatatttaatgctttttggctgatggaatttggaagatttgtatttgggattggtggcgagtccttagcagttgcccagaatacatatgctgtgagctggtttaaaggcaaagaattaaacctggtgtttggacttcaacttagcatggctagaattggaagtacagtaaacatgaacctcatgggatggctgtattctaagattgaagctttgttaggttctgctggtcacacaaccctcgggatcacacttatgattgggggtataacgtgtattctttcactaatctgtgccttggctcttgcctacttggatcagagagcagagagaatccttcataaagaacaaggaaaaacaggtgaagttattaaattaactgatgtaaaggacttctccttacccctgtggcttatatttatcatctgtgtctgctattatgttgctgtgttcccttttattggacttgggaaagttttctttacagagaaatttggattttcttcccaggcagcaagtgcaattaacagtgttgtatatgtcatatcagctcccatgtccccggtgtttgggctcctggtggataaaacagggaagaacatcatctgggttctttgcgcagtagcagccactcttgtgtcccacatgatgctggcctttacgatgtggaacccttggattgctatgtgtcttctgggactctcctactcattgcttgcctgtgcattgtggccaatggtggcatttgtagttcctgaacatcagctgggaactgcatatggcttcatgcagtccattcagaatcttgggttggccatcatttccatcattgctggtatgatactggattctcgggggtatttgtttttggaagtgttcttcattgcctgtgtttctttgtcacttttatctgtggtcttactctatttggtgaatcgtgcccagggtgggaacctaaattattctgcaagacaaagggaagaaataaaattttcccatactgaatgagaagttaaaatgaatgtgtcatgagaatgggcttaacacatcgttggtttgaaaacttccatttttaaaaatttagagtttagtcattagaaaaaataatggactggaaagttatatttatatccaaatatacctatttcaaagtgtatttgtgaggcctgttttagcctgtgtcttttgtattgtgtgttgctaaagaattctacttttagtaggctaatcaacaatgaaagggttagaaaattgctgtggaacatccaggtgaacttcaggaaagacagtgaaaaatggaaaacgttggagcttctgttgagataatcttcattaggtatatatcttagggatacagccttttctttatcttatagcaggaaaaaaaaacttttgagggaaatagaagggctgcgttacacaaaataaacaatggcattgtcataggccttccttttactagtagggcataatgctagggaatatgtgaagatgtttttatgaagtctctttctgatcacgaacaatagcttgcgctctactctgtagttatgtggattgccgagcaatgacccttttcaatttcttatttctgtgttactgaggaccctaatcacttagggatgtaattttatagtataaactttctgtacagtttttcttatagtctaataagtaaaaagtgtccttcaaattatgataattgcctatgtacatggataaattaaaacactgcacacggagt

SEQ ID NO: 150617 - DNA, 2173 bp, Homo sapiens
  Payload ID: 9747
  Gene Symbol: MFSD10
  Gene Name: major facilitator superfamily domain containing 10
  Uniprot ID: Q14728
  ENST ID: ENST00000329687
  CDS Start-End: 536-1903
ggacgcacgcgggatggcggagtgggaggcgcgcggggttgggggtgctcctgcgtccggtgtgcaccccatggcccccgccagggagaccgagtccgggccaggggccggaatcgcggggcgcgggccggggctggggttggggttgggatcgggatcgggatcgggatcgggatccgggttccccgcggcttcaagttttctctcgctgttacgagggcgtgggaggcgcggccgtggggtggggtggggccaggtccgcgatgtgctcaccctggtctctcaggaccgttgcctttgcggctattttttgtgcaatccccgaagcctgcgtttcctgctgcctgggttcggggcgggggcatcgcgcaggccagaacggcccctgcgtccgtaggccagagcccctgccatcagcccctttagggtgctcgccggctgtcgggtgtgggggtatgccaggccccggaggactcggcttccccgctaacccgacccgccgcaccccacccaggccaggtcagagcagcccaccatgggatggggagggggtggaggctgcaccccgcgcccacccatccaccagcagccgccggagcgccgcgtggtcaccgttgtctttctcggcctcctgctggacctcctggccttcacgctgctgctgcccctgctgcccgggctgttggagagccacggccgtgcccacgaccccctctatggctcctggcagggcggggtggactggtttgccaccgccatcgggatgccagtggagaagaggtacaacagtgtcctgttcggaggtctcattggctcggcattctctgtcctgcagtttctgtgtgcgccactcactggggccacctctgactgcttggggaggcgcccggtgatgctgctgtgcctgatgggtgtggccacctcatatgcagtctgggccacctctcggagctttgcggccttcctggcctccaggctgattgggggcatcagcaaagggaacgtcagcctctccacggccatcgttgctgacctgggctcgcctctggcccgcagtcaaggcatggcggtcattggggtggccttctcactgggcttcaccctgggccctatgctcggagcctccctgcccctggaaatggcaccctggtttgccctgctcttcgcagcctccgacctgctgttcatcttctgcttcctgccagagacgctgcccctggagaaacgggcgccctctatcgccctggggttccgtgatgcggctgatctgctcagccccctggccctgctgcgcttctcggctgtcgctcgtggccaggacccaccctctggagacaggctcagcagcctgcgccgcctgggcctagtctacttcctctacctcttcctgttctcgggcctggagtacacgctgagcttcctcacacaccagcgcttccagttcagtagcctacagcaggggaagatgtttttcctcatcggcctcaccatggccaccatccagggtgcctatgcccggcggatccaccctggcggggaagttgctgccgtgaagcgggccctcctgctgctggtgcccgccttcctcctcatcggctggggacgttctctgcccgtgctgggcctggggctgctgctctactcctttgccgccgccgttgtggtgccctgcctgtcctccgtggtcgctggctatggctcaccagggcagaagggcacggtcatgggtacactgcgcagcctaggtgctctggccagggccgcggggcccctggtggccgcttcagtgtactggctggccggggcccaggcctgcttcaccacgtggtccgggctctttttgctccccttcttcctcctgcagaagctgagttacccggcacagacgctcaaggctgagtagctgagccactgtgcccaggctgtgggcaccaggcagagtgggagcctaggtcaggcccctgcccactgcctgacccccaccccccgccagtccagggagaccctgtgggtgggggccggcccctaagcaggaagctcaggcagctcctccagacttacttactccttcagtgactccgagctgcagcactccaaggctgtcagggcttctgtttgttttttaaactatgcaccaggtttctgatgatgaaataaagcacctgtttgtttt

SEQ ID NO: 150618 - DNA, 1753 bp, Homo sapiens
  Payload ID: 9747
  Gene Symbol: MFSD10
  Gene Name: major facilitator superfamily domain containing 10
  Uniprot ID: Q14728
  ENST ID: ENST00000355443
  CDS Start-End: 113-1480
gccgggcgtggccgtcccgcccctggcggcgtgcctggtgccctgttccgcgtctgtgcgaccgtccgtcccgagcgcgcagccgcggcaggccaggtcagagcagcccaccatgggatggggagggggtggaggctgcaccccgcgcccacccatccaccagcagccgccggagcgccgcgtggtcaccgttgtctttctcggcctcctgctggacctcctggccttcacgctgctgctgcccctgctgcccgggctgttggagagccacggccgtgcccacgaccccctctatggctcctggcagggcggggtggactggtttgccaccgccatcgggatgccagtggagaagaggtacaacagtgtcctgttcggaggtctcattggctcggcattctctgtcctgcagtttctgtgtgcgccactcactggggccacctctgactgcttggggaggcgcccggtgatgctgctgtgcctgatgggtgtggccacctcatatgcagtctgggccacctctcggagctttgcggccttcctggcctccaggctgattgggggcatcagcaaagggaacgtcagcctctccacggccatcgttgctgacctgggctcgcctctggcccgcagtcaaggcatggcggtcattggggtggccttctcactgggcttcaccctgggccctatgctcggagcctccctgcccctggaaatggcaccctggtttgccctgctcttcgcagcctccgacctgctgttcatcttctgcttcctgccagagacgctgcccctggagaaacgggcgccctctatcgccctggggttccgtgatgcggctgatctgctcagccccctggccctgctgcgcttctcggctgtcgctcgtggccaggacccaccctctggagacaggctcagcagcctgcgccgcctgggcctagtctacttcctctacctcttcctgttctcgggcctggagtacacgctgagcttcctcacacaccagcgcttccagttcagtagcctacagcaggggaagatgtttttcctcatcggcctcaccatggccaccatccagggtgcctatgcccggcggatccaccctggcggggaagttgctgccgtgaagcgggccctcctgctgctggtgcccgccttcctcctcatcggctggggacgttctctgcccgtgctgggcctggggctgctgctctactcctttgccgccgccgttgtggtgccctgcctgtcctccgtggtcgctggctatggctcaccagggcagaagggcacggtcatgggtacactgcgcagcctaggtgctctggccagggccgcggggcccctggtggccgcttcagtgtactggctggccggggcccaggcctgcttcaccacgtggtccgggctctttttgctccccttcttcctcctgcagaagctgagttacccggcacagacgctcaaggctgagtagctgagccactgtgcccaggctgtgggcaccaggcagagtgggagcctaggtcaggcccctgcccactgcctgacccccaccccccgccagtccagggagaccctgtgggtgggggccggcccctaagcaggaagctcaggcagctcctccagacttacttactccttcagtgactccgagctgcagcactccaaggctgtcagggcttctgtttgttttttaaactatgcaccaggtttctgatgatgaaataaagcacctgtttgttttata

SEQ ID NO: 150619 - DNA, 1573 bp, Homo sapiens
  Payload ID: 9747
  Gene Symbol: MFSD10
  Gene Name: major facilitator superfamily domain containing 10
  ENST ID: ENST00000507555
  CDS Start-End: 88-1188
gcggcgtgcctggtgccctgttccgcgtctgtgcgaccgtccgtcccgagcgcgcagccgcggcaggccaggtcagagcagcccaccatgggatggggagggggtggaggctgcaccccgcgcccacccatccaccagcagccgccggagcgccgcgtggtcaccgttgtctttctcggcctcctgctggacctcctggccttcacgctgctgctgcccctgctgcccgggctgttggagagccacggccgtgcccacgaccccctctatggctcctggcagggcggggtggactggtttgccaccgccatcgggatgccagtggagaagaggtacaacagtgtcctgttcggaggtctcattggctcggcattctctgtcctgcagtttctgtgtgcgccactcactggggccacctctgactgcttggggaggcgcccggtgatgctgctgtgcctgatgggtgtggccacctcatatgcagtctgggccacctctcggagctttgcggccttcctggcctccaggctgattgggggcatcagcaaagggaacgtcagcctctccacggccatcgttgctgacctgggctcgcctctggcccgcagtcaaggcatggcggtcattggggtggccttctcactgggcttcaccctgggccctatgctcggagcctccctgcccctggaaatggcaccctggtttgccctgctcttcgcagcctccgacctgctgttcatcttctgcttcctgccagagacgctgcccctggagaaacgggcgccctctatcgccctggggttccgtgatgcggctgatctgctcagccccctggccctgctgcgcttctcggctgtcgctcgtggccaggacccaccctctggagacaggctcagcagcctgcgccgcctgggcctagtctacttcctctacctcttcctgttctcgggcctggagtacacgctgagcttcctcacacaccagcgcttccagttcagtaggccctcctgctgctggtgcccgccttcctcctcatcggctggggacgttctctgcccgtgctgggcctggggctgctgctctactcctttgccgccgccgttgtggtgccctgcctgtcctccgtggtcgctggctatggctcaccagggcagaagggcacggtcatgggtacactgcgcagcctaggtgctctggccagggccgcggggcccctggtggccgcttcagtgtactggctggccggggcccaggcctgcttcaccacgtggtccgggctctttttgctccccttcttcctcctgcagaagctgagttacccggcacagacgctcaaggctgagtagctgagccactgtgcccaggctgtgggcaccaggcagagtgggagcctaggtcaggcccctgcccactgcctgacccccaccccccgccagtccagggagaccctgtgggtgggggccggcccctaagcaggaagctcaggcagctcctccagacttacttactccttcagtgactccgagctgcagcactccaaggctgtcagggcttctgtttgttttttaaacta

SEQ ID NO: 150620 - DNA, 1589 bp, Homo sapiens
  Payload ID: 9747
  Gene Symbol: MFSD10
  Gene Name: major facilitator superfamily domain containing 10
  ENST ID: ENST00000503596
  CDS Start-End: 70-798
tgttccgcgtctgtgcgaccgtccgtcccgagcgcgcagccgcggcaggccaggtcagagcagcccaccatgggatggggagggggtggaggctgcaccccgcgcccacccatccaccagcagccgccggagcgccgcgtggtcaccgttgtctttctcggcctcctgctggacctcctggccttcacgctgctgctgcccctgctgcccgggctgttggagagccacggccgtgcccacgaccccctctatggctcctggcagggcggggtggactggtttgccaccgccatcgggatgccagtggagaagaggtacaacagtgtcctgttcggaggtctcattggctcggcattctctgtcctgcagtttctgtgtgcgccactcactggggccacctctgactgcttggggaggcgcccggtgatgctgctgtgcctgatgggtgtggccacctcatatgcagtctgggccacctctcggagctttgcggccttcctggcctccaggctgattgggggcatcagcaaagggaacgtcagcctctccacggccatcgttgctgacctgggctcgcctctggcccgcagtcaaggcatgcctccgacctgctgttcatcttctgcttcctgccagagacgctgcccctggagaaacgggcgccctctatcgccctggggttccgtgatgcggctgatctgctcagccccctggccctgctgcgcttctcggctgtcgctcgtggccaggacccaccctctggagacaggctcagcagcctgcgccgcctgggcctagtctacttcctctacctcttcctgttctcgggcctggagtacacgctgagcttcctcacacaccagcgcttccagttcagtagcctacagcaggggaagatgtttttcctcatcggcctcaccatggccaccatccagggtgcctatgcccggcggatccaccctggcggggaagttgctgccgtgaagcgggccctcctgctgctggtgcccgccttcctcctcatcggctggggacgttctctgcccgtgctgggcctggggctgctgctctactcctttgccgccgccgttgtggtgccctgcctgtcctccgtggtcgctggctatggctcaccagggcagaagggcacggtcatgggtacactgcgcagcctaggtgctctggccagggccgcggggcccctggtggccgcttcagtgtactggctggccggggcccaggcctgcttcaccacgtggtccgggctctttttgctccccttcttcctcctgcagaagctgagttacccggcacagacgctcaaggctgagtagctgagccactgtgcccaggctgtgggcaccaggcagagtgggagcctaggtcaggcccctgcccactgcctgacccccaccccccgccagtccagggagaccctgtgggtgggggccggcccctaagcaggaagctcaggcagctcctccagacttacttactccttcagtgactccgagctgcagcactccaaggctgtcagggcttctgtttgttttttaaactatgcaccaggtttctgatgatgaaataaa

SEQ ID NO: 150621 - DNA, 1639 bp, Homo sapiens
  Payload ID: 9747
  Gene Symbol: MFSD10
  Gene Name: major facilitator superfamily domain containing 10
  ENST ID: ENST00000508221
  CDS Start-End: 69-1139
gttccgcgtctgtgcgaccgtccgtcccgagcgcgcagccgcggcaggccaggtcagagcagcccaccatgggatggggagggggtggaggctgcaccccgcgcccacccatccaccagcagccgccggagcgccgcgtggtcaccgttgtctttctcggcctcctgctggacctcctggccttcacgctgctgctgcccctgctgcccgggctgttggagagccacggccgtgcccacgaccccctctatggctcctggcagggcggggtggactggtttgccaccgccatcgggatgccagtggagaagaggtacaacagtgtcctgttcggaggtctcattggctcggcattctctgtcctgcagtttctgtgtgcgccactcactggggccacctctgactgcttggggaggcgcccggtgatgctgctgtgcctgatgggtgtggccacctcatatgcagtctgggccacctctcggagctttgcggccttcctggcctccaggctgattgggggcatcagcaaagggaacgtcagcctctccacggccatcgttgctgacctgggctcgcctctggcccgcagtcaaggcatggcggtcattggggtggccttctcactgggcttcaccctgggccctatgctcggagcctccctgcccctggaaatggcaccctggtttgccctgctcttcgcagcctccgacctgctgttcatcttctgcttcctgccagagacgctgcccctggagaaacgggcgccctctatcgccctggggttccgtgatgcggctgatctgctcagccccctggccctgctgcgcttctcggctgtcgctcgtggccaggacccaccctctggagacaggctcagcagcctgcgccgcctgggcctagtctacttcctctacctcttcctgttctcgggcctggagtacacgctgagcttcctcacacaccagcgcttccagttcagtagcctacagcaggggaagatgtttttcctcatcggcctcaccatggccaccatccagggtgcctatgcccggcggatccaccctggcggggaagttgctgccgtgaagcgggctcaccagggcagaagggcacggtcatgggtacactgcgcagcctaggtgctctggccagggccgcggggcccctggtggccgcttcaggtgagggcgcgggatggtgctggggcaggctgggggccaagcacctgccctcgcctcccaagtgccagccccctcggggactgggtgacgccaccgtctctccgcagtgtactggctggccggggcccaggcctgcttcaccacgtggtccgggctctttttgctccccttcttcctcctgcagaagctgagttacccggcacagacgctcaaggctgagtagctgagccactgtgcccaggctgtgggcaccaggcagagtgggagcctaggtcaggcccctgcccactgcctgacccccaccccccgccagtccagggagaccctgtgggtgggggccggcccctaagcaggaagctcaggcagctcctccagacttacttactccttcagtgactccgagctgcagcactccaaggctgtcagggcttctgtttgttttttaaactatgcaccag

SEQ ID NO: 150622 - DNA, 1776 bp, Homo sapiens
  Payload ID: 9747
  Gene Symbol: MFSD10
  Gene Name: major facilitator superfamily domain containing 10
  ENST ID: ENST00000514800
  CDS Start-End: 25-1467
caggccaggtcagagcagcccaccatgggatggggagggggtggaggctgcaccccgcgcccacccatccaccagcagccgccggagcgccgcgtggtcaccgttgtctttctcggcctcctgctggacctcctggccttcacgctgctgctgcccctgctgcccgggctgttggagagccacggccgtgcccacgaccccctctatggctcctggcagggcggggtggactggtttgccaccgccatcgggatgccagtggagaagaggtacaacagtgtcctgttcggaggtctcattggctcggcattctctgtcctgcagtttctgtgtgcgccactcactggggccacctctgactgcttggggaggcgcccggtgatgctgctgtgcctgatgggtgtggccacctcatatgcagtctgggccacctctcggagctttgcggccttcctggcctccaggctgattgggggcatcagcaaagggaacgtcagcctctccacggccatcgttgctgacctgggctcgcctctggcccgcagtcaaggcatggcggtcattggggtggccttctcactgggcttcaccctgggccctatgctcggagcctccctgcccctggaaatggcaccctggtttgccctgctcttcgcagcctccgacctgctgttcatcttctgcttcctgccagagacgctgcccctggagaaacgggcgccctctatcgccctggggttccgtgatgcggctgatctgctcagccccctggccctgctgcgcttctcggctgtcgctcgtggccaggacccaccctctggagacaggctcagcagcctgcgccgcctgggcctagtctacttcctctacctcttcctgttctcgggcctggagtacacgctgagcttcctcacacaccagcgcttccagttcagtagcctacagcaggggaagatgtttttcctcatcggcctcaccatggccaccatccagggtgcctatgcccggcggatccaccctggcggggaagttgctgccgtgaagcgggccctcctgctgctggtgcccgccttcctcctcatcggctggggacgttctctgcccgtgctgggcctggggctgctgctctactcctttgccgccgccgttgtggtgccctgcctgtcctccgtggtcgctggctatggctcaccagggcagaagggcacggtcatgggtacactgcgcagcctaggtgctctggccagggccgcggggcccctggtggccgcttcaggtgagggcgcgggatggtgctggggcaggctgggggccaagcacctgccctcgcctcccaagtgccagccccctcggggactgggtgacgccaccgtctctccgcagtgtactggctggccggggcccaggcctgcttcaccacgtggtccgggctctttttgctccccttcttcctcctgcagaagctgagttacccggcacagacgctcaaggctgagtagctgagccactgtgcccaggctgtgggcaccaggcagagtgggagcctaggtcaggcccctgcccactgcctgacccccaccccccgccagtccagggagaccctgtgggtgggggccggcccctaagcaggaagctcaggcagctcctccagacttacttactccttcagtgactccgagctgcagcactccaaggctgtcagggcttctgtttgttttttaaactatgcaccaggtttctgatgatgaaataaagcacctgtttgttttataccaa

SEQ ID NO: 150623 - DNA, 1575 bp, Homo sapiens
  Payload ID: 9747
  Gene Symbol: MFSD10
  Gene Name: major facilitator superfamily domain containing 10
  ENST ID: ENST00000507272
  CDS Start-End: 75-377
ggccccggaggactcggcttccccgctaacccgacccgccgcaccccacccaggccaggtcagagcagcccaccatgggatggggagggggtggaggctgcaccccgcgcccacccatccaccagcagccgccggagcgccgcgtggtcaccgttgtctttctcggcctcctgctggacctcctggccttcacgctgctgctgcccctgctgcccgggctgttggagagccacggccgtgcccacgaccccctctatggctcctggcagggcggggtggactggtttgccaccgccatcgggatgccagtggagaagaggtacaacagtgtcctgttcggagtttctgtgtgcgccactcactggggccacctctgactgcttggggaggcgcccggtgatgctgctgtgcctggctgattgggggcatcagcaaagggaacgtcagcctctccacggccatcgttgctgacctgggctcgcctctggcccgcagtcaaggcatggcggtcattggggtggccttctcactgggcttcaccctgggccctatgctcggagcctccctgcccctggaaatggcaccctggtttgccctgctcttcgcagcctccgacctgctgttcatcttctgcttcctgccagagacgctgcccctggagaaacgggcgccctctatcgccctggggttccgtgatgcggctgatctgctcagccccctggccctgctgcgcttctcggctgtcgctcgtggccaggacccaccctctggagacaggctcagcagcctgcgccgcctgggcctagtctacttcctctacctcttcctgttctcgggcctggagtacacgctgagcttcctcacacaccagcgcttccagttcagtagcctacagcaggggaagatgtttttcctcatcggcctcaccatggccaccatccagggtgcctatgcccggcggatccaccctggcggggaagttgctgccgtgaagcgggccctcctgctgctggtgcccgccttcctcctcatcggctggggacgttctctgcccgtgctgggcctggggctgctgctctactcctttgccgccgccgttgtggtgccctgcctgtcctccgtggtcgctggctatggctcaccagggcagaagggcacggtcatgggtacactgcgcagcctaggtgctctggccagggccgcggggcccctggtggccgcttcagtgtactggctggccggggcccaggcctgcttcaccacgtggtccgggctctttttgctccccttcttcctcctgcagaagctgagttacccggcacagacgctcaaggctgagtagctgagccactgtgcccaggctgtgggcaccaggcagagtgggagcctaggtcaggcccctgcccactgcctgacccccaccccccgccagtccagggagaccctgtgggtgggggccggcccctaagcaggaagctcaggcagctcctccagacttacttactccttcagtgactccgagctgcagcactccaaggctgtcagggcttctgtttgttttttaaactatgcacc

SEQ ID NO: 150624 - DNA, 2538 bp, Homo sapiens
  Payload ID: 9748
  Gene Symbol: MFSD11
  Gene Name: major facilitator superfamily domain containing 11
  Uniprot ID: O43934
  ENST ID: ENST00000336509
  CDS Start-End: 255-1604
cccgtctccgtctgaagagtgcttctgccctcatttgcctctccctgtgaccccggccccctcagactccgctgcgtcgtctctcggccccgtccagccgttcctgactgctcttcgccggagtccgcttcccaaccccctttcgccagagcccgagagctccgtcggctctgcgtcctggcggattgtcagtggcttcgccccgaggagagctgactgccctgggctgctgcctccggcagagctgagccaaaatgtccccggaatctaaaaagcttttcaacatcattattttaggagttgcctttatgtttatgttcactgcctttcaaacttgtggaaatgtggcgcaaactgtcatcaggagcttaaataggacagattttcacggcagtggatataccagcatggctattatctatggagtgttctctgcttcaaatttgattacaccgtcagtggttgccattgtaggacctcaactctctatgtttgccagtggtttattttacagcatgtacattgccgttttcatccagcctttcccgtggtccttctacacagcctctgttttcattggaattgctgctgctgtgctttggacagcacaaggaaactgcctgacaatcaattcggatgagcacagcattgggagaaacagtgggattttctgggcacttctgcagtctagcttgttctttggaaatctctacatatattttgcctggcaagggaaaactcagatatcagagagtgaccgaagaacagtgtttattgccctaacggtgattagccttgtggggacagttctattctttctcattcggaaaccagattctgaaaatgtcctaggagaagatgagtcttctgatgaccaggacatggaagtcaacgagtctgcccagaacaatctgacaaaggcagtagatgcttttaaaaagtcttttaagttatgtgtcaccaaggagatgctccttcttagtattacaactgcttatacaggtctggaattaactttcttctctggtgtatatggaacctgtattggtgctacaaataaatttggagcagaagagaaaagccttattggactttctggcattttcatcggcattggagaaattttaggtggaagcctcttcggcctgctgagcaagaacaatcgttttggtagaaatccagttgtgctgttgggcatcctggtgcacttcatagctttttatctaatatttctcaacatgcctggagatgccccgattgctcctgttaaaggaactgacagcagtgcttacatcaaatccagcaaagaagttgccattctctgcagttttctgttgggccttggagacagctgctttaatacccagctgcttagtatcttgggctttctgtattctgaagacagcgccccagcatttgccatcttcaagtttgttcagtctatttgcgcagccgtggcatttttctacagcaactaccttctccttcactggcaactcctggtcatggtgatatttgggttttttggaacaatttctttcttcactgtggaatgggaagctgccgcctttgtagcccgcggctctgactaccgaagtatctgatctggtgtccgtgaggggacacgtatgacctcagaaacacagctggacacagagcttggtggaagaagtcgcctttgatcttcactatatattgggtgatgttcagtatggaaaatcaagggattaagactgttaaatcagccagagttggtgttcaagtttacagatatgagttatttaaagcaagtagaataagggaaagctgttctgtcaactgtaattgttcaaagatgttgtttttcatttcatctatctcaattcttataatcatgttatagaatgtaaatgttttcttctctctcctgctcttgttggaagatcctgccttgatttagaatactaggccatatgtcatataaatattttttctggatatggagtatgttttgccatgtaataatgggaagcatatgtcattccccatatgtgttggagaatgacatttaaataaatagcaaagctgggtgtggtgttgcaccgctatactcccagctgttggggaggctgagacagaaggatcacttcagcccaggagattgaggctgcggtgagctatgatcacaccactgcactccaggctgggcaacagagtgagaccctgtcttgaaaataataataggctggtcacagtggctcatgcctgtaatcccaacactttgggaggctgaggtgggtggatcacctgaggtcaggagtttgagaccagcctggccaacatggtgaaacctcatctctactaaaaatacaaaaatgtgttgggtttggtggtgcatgcctgtaatcctagctactagggaggctgaggtaagagaattcgcttgaacctgggaggcggaggttgcagtgagccgagatcgtgccattgcactccagcctggatgacaagagtgaaactccatctcaaaaaaaaaaaaaaaaaaaagaaaagaaaata

SEQ ID NO: 150625 - DNA, 2832 bp, Homo sapiens
  Payload ID: 9748
  Gene Symbol: MFSD11
  Gene Name: major facilitator superfamily domain containing 11
  Uniprot ID: O43934
  ENST ID: ENST00000355954
  CDS Start-End: 737-1930
aaaaagcgcggagtcacggctggagggagggggagcggaattagcgggcagttggaaagcccgcgaaacgctttttccgcctgggaggccggacgatcgcgattgggcaggaggaagaggaggtgctccccatctgggcccccacctttttttcatgccaatactccaagttcacgccccttttttgctcagccgtcagccccgtctccgtctgaagagtgcttctgccctcatttgcctctccctgtgaccccggccccctcagactccgctgcgtcgtctctcggccccgtccagccgttcctgactgctcttcgccggagtccgcttcccaaccccctttcgccagagcccgagagctccgtcggctctgcgtcctggcggtggggactccccgcggagcgcttgcgcgtgccaggccacccgggactacgtttcccagcgggccgagcggccggcgccgcggctgcggtcaggtgacccggtcgcctggccgcagtgagtcaggctgggagggcggggccgcgccggctgctgcggctggcacttggccctttaatccccttcgtgggcccctcaacctggagcggataaattcttggcgcttctccgggggttgtgctcttccgtactcggatcgcttcttaggagtatcctaactgccggattgtcagtggcttcgccccgaggagagctgactgccctgggctgctgcctccggcagagctgagccaaaatgtccccggaatctaaaaagcttttcaacatcattattttaggagttgcctttatgtttatgttcactgcctttcaaacttgtggaaatgtggcgcaaactgtcatcaggagcttaaataggacagattttcacggcagtggatataccagcatggctattatctatggagtgttctctgcttcaaatttgattacaccgtcagtggttgccattgtaggacctcaactctctatgtttgccagtggtttattttacagcatgtacattgccgttttcatccagcctttcccgtggtccttctacacagcctctgttttcattggaattgctgctgctgagagtgaccgaagaacagtgtttattgccctaacggtgattagccttgtggggacagttctattctttctcattcggaaaccagattctgaaaatgtcctaggagaagatgagtcttctgatgaccaggacatggaagtcaacgagtctgcccagaacaatctgacaaaggcagtagatgcttttaaaaagtcttttaagttatgtgtcaccaaggagatgctccttcttagtattacaactgcttatacaggtctggaattaactttcttctctggtgtatatggaacctgtattggtgctacaaataaatttggagcagaagagaaaagccttattggactttctggcattttcatcggcattggagaaattttaggtggaagcctcttcggcctgctgagcaagaacaatcgttttggtagaaatccagttgtgctgttgggcatcctggtgcacttcatagctttttatctaatatttctcaacatgcctggagatgccccgattgctcctgttaaaggaactgacagcagtgcttacatcaaatccagcaaagaagttgccattctctgcagttttctgttgggccttggagacagctgctttaatacccagctgcttagtatcttgggctttctgtattctgaagacagcgccccagcatttgccatcttcaagtttgttcagtctatttgcgcagccgtggcatttttctacagcaactaccttctccttcactggcaactcctggtcatggtgatatttgggttttttggaacaatttctttcttcactgtggaatgggaagctgccgcctttgtagcccgcggctctgactaccgaagtatctgatctggtgtccgtgaggggacacgtatgacctcagaaacacagctggacacagagcttggtggaagaagtcgcctttgatcttcactatatattgggtgatgttcagtatggaaaatcaagggattaagactgttaaatcagccagagttggtgttcaagtttacagatatgagttatttaaagcaagtagaataagggaaagctgttctgtcaactgtaattgttcaaagatgttgtttttcatttcatctatctcaattcttataatcatgttatagaatgtaaatgttttcttctctctcctgctcttgttggaagatcctgccttgatttagaatactaggccatatgtcatataaatattttttctggatatggagtatgttttgccatgtaataatgggaagcatatgtcattccccatatgtgttggagaatgacatttaaataaatagcaaagctgggtgtggtgttgcaccgctatactcccagctgttggggaggctgagacagaaggatcacttcagcccaggagattgaggctgcggtgagctatgatcacaccactgcactccaggctgggcaacagagtgagaccctgtcttgaaaataataataggctggtcacagtggctcatgcctgtaatcccaacactttgggaggctgaggtgggtggatcacctgaggtcaggagtttgagaccagcctggccaacatggtgaaacctcatctctactaaaaatacaaaaatgtgttgggtttggtggtgcatgcctgtaatcctagctactagggaggctgaggtaagagaattcgcttgaacctgggaggcggaggttgcagtgagccgagatcgtgccattgcactccagcctggatgacaagagtgaaactccatctc

SEQ ID NO: 150626 - DNA, 3612 bp, Homo sapiens
  Payload ID: 9748
  Gene Symbol: MFSD11
  Gene Name: major facilitator superfamily domain containing 11
  Uniprot ID: O43934
  ENST ID: ENST00000588460
  CDS Start-End: 2043-3392
cttggacttggaccttcgtgcggatctggacttggaggtcgaccgagatcgagaacgagtgcgggaccgagacttcgagcggctgtagcgagatcggctgcgagacctggaacgactccgactccgggatcggctgcggcgacgccgcctagggctgcgggcgggacgagcaagcacagcggggttaattccaggcagcggggccggccccgcccgcgcgctcccgcccaggccgccattatctcgccgccagacgccatttccccagtcgcgaggcggggtcctccgccccgcgccgcccacaccccggccactcccgggtcgcagacggcggaagctcgcggggtggccggagggtcgcgagacgcggcgtgcacccccgccccgtccgggcccgcaccacgtgcttcgccgcggacctttgtgaggtcgcccgggcctcccgcgcgccccgccccgcctcccgcggtcccctcagccccgtttacctgcggctccggcgtccgtagccaccgcccccgtacctgcggggtggcggtccccggcggctgtggtgtgagtccggggggcggccgtagcgcgccatttgcacccgcagctcgcggccgtccagcacggccccgtccatggcatccatagcgtcctcagcgtcgcgcttgtcgtgaaagcgaacgaaggcgaagccgcgggactccttggtgtagcggtcccgcgggatgtacacgtcgccgacgcgcccgtacttctcgaagacgcgcctcagcgtgtcgggcgaggtgcggtaggtcaggttgtccaccttgagggaggtcataccctccacatcgggaggggggcggccgtagctcatagctctgagtggcggcccggagccccgcgaactggcgccggcttcctcagctctgggcggtgcgacgccgcgcctctcaggcagttgccttccgcgtggggacactgggaaaggccttgccgcagaacagcacggacgggctccgcaggctagcgcacctgagtaacaactgggcgggcagccggcctctgcgcccgtttatatcgctcctcacaaaatggcgcccgcgccacccggaaatgaaaccttctgattggcccaccgcgccccgcttcgtaacgaccctgccgcgcgccccgcccctacccgaagcgcctgcgcacagcccggcgggcgggccaaaaagcgcggagtcacggctggagggagggggagcggaattagcgggcagttggaaagcccgcgaaacgctttttccgcctgggaggccggacgatcgcgattgggcaggaggaagaggaggtgctccccatctgggcccccacctttttttcatgccaatactccaagttcacgccccttttttgctcagccgtcagccccgtctccgtctgaagagtgcttctgccctcatttgcctctccctgtgaccccggccccctcagactccgctgcgtcgtctctcggccccgtccagccgttcctgactgctcttcgccggagtccgcttcccaaccccctttcgccagagcccgagagctccgtcggctctgcgtcctggcggtggggactccccgcggagcgcttgcgcgtgccaggccacccgggactacgtttcccagcgggccgagcggccggcgccgcggctgcggtcaggtgacccggtcgcctggccgcagtgagtcaggctgggagggcggggccgcgccggctgctgcggctggcacttggccctttaatccccttcgtgggcccctcaacctggagcggataaattcttggcgcttctccgggggttgtgctcttccgtactcggatcgcttcttaggagtatcctaactgccggtggggagaacttcgccctaaacctggggttccgatccaggaactggaagttgacagcttggctgcctggctcctgcatctgccttctccactcaccatctcatttctttctccaggattgtcagtggcttcgccccgaggagagctgactgccctgggctgctgcctccggcagagctgagccaaaatgtccccggaatctaaaaagcttttcaacatcattattttaggagttgcctttatgtttatgttcactgcctttcaaacttgtggaaatgtggcgcaaactgtcatcaggagcttaaataggacagattttcacggcagtggatataccagcatggctattatctatggagtgttctctgcttcaaatttgattacaccgtcagtggttgccattgtaggacctcaactctctatgtttgccagtggtttattttacagcatgtacattgccgttttcatccagcctttcccgtggtccttctacacagcctctgttttcattggaattgctgctgctgtgctttggacagcacaaggaaactgcctgacaatcaattcggatgagcacagcattgggagaaacagtgggattttctgggcacttctgcagtctagcttgttctttggaaatctctacatatattttgcctggcaagggaaaactcagatatcagagagtgaccgaagaacagtgtttattgccctaacggtgattagccttgtggggacagttctattctttctcattcggaaaccagattctgaaaatgtcctaggagaagatgagtcttctgatgaccaggacatggaagtcaacgagtctgcccagaacaatctgacaaaggcagtagatgcttttaaaaagtcttttaagttatgtgtcaccaaggagatgctccttcttagtattacaactgcttatacaggtctggaattaactttcttctctggtgtatatggaacctgtattggtgctacaaataaatttggagcagaagagaaaagccttattggactttctggcattttcatcggcattggagaaattttaggtggaagcctcttcggcctgctgagcaagaacaatcgttttggtagaaatccagttgtgctgttgggcatcctggtgcacttcatagctttttatctaatatttctcaacatgcctggagatgccccgattgctcctgttaaaggaactgacagcagtgcttacatcaaatccagcaaagaagttgccattctctgcagttttctgttgggccttggagacagctgctttaatacccagctgcttagtatcttgggctttctgtattctgaagacagcgccccagcatttgccatcttcaagtttgttcagtctatttgcgcagccgtggcatttttctacagcaactaccttctccttcactggcaactcctggtcatggtgatatttgggttttttggaacaatttctttcttcactgtggaatgggaagctgccgcctttgtagcccgcggctctgactaccgaagtatctgatctggtgtccgtgaggggacacgtatgacctcagaaacacagctggacacagagcttggtggaagaagtcgcctttgatcttcactatatattgggtgatgttcagtatggaaaatcaagggattaagactgttaaatcagccagagttggtgttcaagtttacagatatgagttatttaaagcaagtagaataagggaaagctgttctgtcaactgtaa

SEQ ID NO: 150627 - DNA, 577 bp, Homo sapiens
  Payload ID: 9748
  Gene Symbol: MFSD11
  Gene Name: major facilitator superfamily domain containing 11
  ENST ID: ENST00000586689
  CDS Start-End: 392-577
ccttttttgctcagccgtcagccccgtctccgtctgaagagtgcttctgccctcatttgcctctccctgtgaccccggccccctcagactccgctgcgtcgtctctcggccccgtccagccgttcctgactgctcttcgccggagtccgcttcccaaccccctttcgccagagcccgagagctccgtcggctctgcgtcctggcggtggggactccccgcggagcgcttgcgcgtgccaggccacccgggactacgtttcccagcgggccgagcggccggcgccgcggctgcggtcaggtgacccggtcgcctggccgcagattgtcagtggcttcgccccgaggagagctgactgccctgggctgctgcctccggcagagctgagccaaaatgtccccggaatctaaaaagcttttcaacatcattattttaggagttgcctttatgtttatgttcactgcctttcaaacttgtggaaatgtggcgcaaactgtcatcaggagcttaaataggacagattttcacggcagtggatataccagcatggctattatctatggagtgttctctgcttca

SEQ ID NO: 150628 - DNA, 757 bp, Homo sapiens
  Payload ID: 9748
  Gene Symbol: MFSD11
  Gene Name: major facilitator superfamily domain containing 11
  ENST ID: ENST00000588031
  CDS Start-End: 142-486
ttcttggcgcttctccgggggttgtgctcttccgtactcggatcgcttcttaggagtatcctaactgccggattgtcagtggcttcgccccgaggagagctgactgccctgggctgctgcctccggcagagctgagccaaaatgtccccggaatctaaaaagcttttcaacatcattattttaggagttgcctttatgtttatgttcactgcctttcaaacttgtggaaatgtggcgcaaactgtcatcaggagcttaaataggacagattttcacggcagtggatataccagcatggctattatctatggagtgttctctgcttcaaatttgattacaccgtcagtggttgccattgtaggacctcaactctctatgtttgccagtggtttattttacagcctttcccgtggtccttctacacagcctctgttttcattggaattgctgctgctgtgctttggacagcacaaggaaactgcctgacaatcaattcggatgagcacagcattgggagaaacagtgggattttctgggcacttctgcagtctagcttgttctttggaaatctctacatatattttgcctggcaagggaaaactcagatatcagagagtgaccgaagaacagtgtttattgccctaacggtgattagccttgtggggacagttctattctttctcattcggaaaccagattctgaaaatgtcctaggagaagatgagtcttctgatgaccaggacatggaagtcaacga

SEQ ID NO: 150629 - DNA, 536 bp, Homo sapiens
  Payload ID: 9748
  Gene Symbol: MFSD11
  Gene Name: major facilitator superfamily domain containing 11
  ENST ID: ENST00000585584
  CDS Start-End: 1-354
caaggaaactgcctgacaatcaattcggatgagcacagcattgggagaaacagtgggattttctgggcacttctgcagtctagcttgttctttggaaatctctacatatattttgcctggcaagggaaaactcagatatcagagagtgaccgaagaacagtgtttattgccctaacggtgattagccttgtggggacagttctattctttctcattcggaaaccagattctgaaaatgtcctaggagaagatgagtcttctgatgaccaggacatggaagtcaacgaacactgggttttttacaaattgaaggcttgtggcaaccctgcatcgagtctgcccagaacaatctgacaaaggcagtagatgcttttaaaaagtcttttaagttatgtgtcaccaaggagatgctccttcttagtattacaactgcttatacaggtctggaattaactttcttctctggtgtatatggaacctgtattggtgctacaaataaatttggagcagaagagaaaagccttattggactttct

SEQ ID NO: 150630 - DNA, 2952 bp, Homo sapiens
  Payload ID: 9748
  Gene Symbol: MFSD11
  Gene Name: major facilitator superfamily domain containing 11
  Uniprot ID: O43934
  ENST ID: ENST00000586622
  CDS Start-End: 1138-2487
ggagaccgcagctttaaagggggaaaatgcagacgttggataaaaacagcaagaaatagtcattttcattaataggtctcaaacagtttacgaaacagccattattatctaagcttcatacacatcctttctgcagacccctctcttcagtattactcccaaaggagacttggggggactcttcgatcgcgacctggatttggattccctcttggacactgggggaggactcctggaccgagaccgggacctggaccgcgaacgagatctggagaccgacgaggacttggacttggaccttcgtgcggatctggacttggaggtcgaccgagatcgagaacgagtgcgggaccgagacttcgagcggctgtagcgagatcggctgcgagacctggaacgactccgactccgggatcggctgcggcgacgccgcctagggctgcgggcgggacgagcaagcacagcggggttaattccaggcagcggggccggccccgcccgcgcgctcccgcccaggccgccattatctcgccgccagacgccatttccccagtcgcgaggcggggtcctccgccccgcgccgcccacaccccggccactcccgggtcgcagacggcggaagctcgcggggtggccggagggtcgcgagacgcggcgtgcacccccgccccgtccgggcccgcaccacgtgcttcgccgcggacctttgtgaggtcgcccgggcctcccgcgcgccccgccccgcctcccgcggtcccctcagccccgtttacctgcggctccggcgtccgtagccaccgcccccgtacctgcggggtggcggtccccggcggctgtggtgtgagtccggggggcggccgtagcgcgccatttgcacccgcagctcgcggccgtccagcacggccccgtccatggcatccatagcgtcctcagcgtcgcgcttgtcgtgaaagcgaacgaaggcgaagccgcgggactccttggtgtagcggtcccgcgggatgtacacgtcgccgacgcgcccgtacttctcgaagacgcgcctcagcgtgtcgggcgaggtgcggattgtcagtggcttcgccccgaggagagctgactgccctgggctgctgcctccggcagagctgagccaaaatgtccccggaatctaaaaagcttttcaacatcattattttaggagttgcctttatgtttatgttcactgcctttcaaacttgtggaaatgtggcgcaaactgtcatcaggagcttaaataggacagattttcacggcagtggatataccagcatggctattatctatggagtgttctctgcttcaaatttgattacaccgtcagtggttgccattgtaggacctcaactctctatgtttgccagtggtttattttacagcatgtacattgccgttttcatccagcctttcccgtggtccttctacacagcctctgttttcattggaattgctgctgctgtgctttggacagcacaaggaaactgcctgacaatcaattcggatgagcacagcattgggagaaacagtgggattttctgggcacttctgcagtctagcttgttctttggaaatctctacatatattttgcctggcaagggaaaactcagatatcagagagtgaccgaagaacagtgtttattgccctaacggtgattagccttgtggggacagttctattctttctcattcggaaaccagattctgaaaatgtcctaggagaagatgagtcttctgatgaccaggacatggaagtcaacgagtctgcccagaacaatctgacaaaggcagtagatgcttttaaaaagtcttttaagttatgtgtcaccaaggagatgctccttcttagtattacaactgcttatacaggtctggaattaactttcttctctggtgtatatggaacctgtattggtgctacaaataaatttggagcagaagagaaaagccttattggactttctggcattttcatcggcattggagaaattttaggtggaagcctcttcggcctgctgagcaagaacaatcgttttggtagaaatccagttgtgctgttgggcatcctggtgcacttcatagctttttatctaatatttctcaacatgcctggagatgccccgattgctcctgttaaaggaactgacagcagtgcttacatcaaatccagcaaagaagttgccattctctgcagttttctgttgggccttggagacagctgctttaatacccagctgcttagtatcttgggctttctgtattctgaagacagcgccccagcatttgccatcttcaagtttgttcagtctatttgcgcagccgtggcatttttctacagcaactaccttctccttcactggcaactcctggtcatggtgatatttgggttttttggaacaatttctttcttcactgtggaatgggaagctgccgcctttgtagcccgcggctctgactaccgaagtatctgatctggtgtccgtgaggggacacgtatgacctcagaaacacagctggacacagagcttggtggaagaagtcgcctttgatcttcactatatattgggtgatgttcagtatggaaaatcaagggattaagactgttaaatcagccagagttggtgttcaagtttacagatatgagttatttaaagcaagtagaataagggaaagctgttctgtcaactgtaattgttcaaagatgttgtttttcatttcatctatctcaattcttataatcatgttatagaatgtaaatgttttcttctctctcctgctcttgttggaagatcctgccttgatttagaatactaggccatatgtcatataaatattttttctggatatggagtatgttttgccatgtaataatgggaagcatatgtcattccccatatgtgttggagaatgacatttaaataaatagcaaagctggg

SEQ ID NO: 150631 - DNA, 1922 bp, Homo sapiens
  Payload ID: 9748
  Gene Symbol: MFSD11
  Gene Name: major facilitator superfamily domain containing 11
  Uniprot ID: O43934
  ENST ID: ENST00000593181
  CDS Start-End: 354-1547
gtcagccccgtctccgtctgaagagtgcttctgccctcatttgcctctccctgtgaccccggccccctcagactccgctgcgtcgtctctcggccccgtccagccgttcctgactgctcttcgccggagtccgcttcccaaccccctttcgccagagcccgagagctccgtcggctctgcgtcctggcggtggggactccccgcggagcgcttgcgcgtgccaggccacccgggactacgtttcccagcgggccgagcggccggcgccgcggctgcggtcaggattgtcagtggcttcgccccgaggagagctgactgccctgggctgctgcctccggcagagctgagccaaaatgtccccggaatctaaaaagcttttcaacatcattattttaggagttgcctttatgtttatgttcactgcctttcaaacttgtggaaatgtggcgcaaactgtcatcaggagcttaaataggacagattttcacggcagtggatataccagcatggctattatctatggagtgttctctgcttcaaatttgattacaccgtcagtggttgccattgtaggacctcaactctctatgtttgccagtggtttattttacagcatgtacattgccgttttcatccagcctttcccgtggtccttctacacagcctctgttttcattggaattgctgctgctgagagtgaccgaagaacagtgtttattgccctaacggtgattagccttgtggggacagttctattctttctcattcggaaaccagattctgaaaatgtcctaggagaagatgagtcttctgatgaccaggacatggaagtcaacgagtctgcccagaacaatctgacaaaggcagtagatgcttttaaaaagtcttttaagttatgtgtcaccaaggagatgctccttcttagtattacaactgcttatacaggtctggaattaactttcttctctggtgtatatggaacctgtattggtgctacaaataaatttggagcagaagagaaaagccttattggactttctggcattttcatcggcattggagaaattttaggtggaagcctcttcggcctgctgagcaagaacaatcgttttggtagaaatccagttgtgctgttgggcatcctggtgcacttcatagctttttatctaatatttctcaacatgcctggagatgccccgattgctcctgttaaaggaactgacagcagtgcttacatcaaatccagcaaagaagttgccattctctgcagttttctgttgggccttggagacagctgctttaatacccagctgcttagtatcttgggctttctgtattctgaagacagcgccccagcatttgccatcttcaagtttgttcagtctatttgcgcagccgtggcatttttctacagcaactaccttctccttcactggcaactcctggtcatggtgatatttgggttttttggaacaatttctttcttcactgtggaatgggaagctgccgcctttgtagcccgcggctctgactaccgaagtatctgatctggtgtccgtgaggggacacgtatgacctcagaaacacagctggacacagagcttggtggaagaagtcgcctttgatcttcactatatattgggtgatgttcagtatggaaaatcaagggattaagactgttaaatcagccagagttggtgttcaagtttacagatatgagttatttaaagcaagtagaataagggaaagctgttctgtcaactgtaattgttcaaagatgttgtttttcatttcatctatctcaattcttataatcatgttatagaatgtaaatgttttcttctctctcctgctcttgttggaagatcctgccttgatttagaatactaggccatatgtcatataaatattttttctggata

SEQ ID NO: 150632 - DNA, 446 bp, Homo sapiens
  Payload ID: 9748
  Gene Symbol: MFSD11
  Gene Name: major facilitator superfamily domain containing 11
  ENST ID: ENST00000591864
  CDS Start-End: 311-436
cggcggctgtggtgtgagtccggggggcggccgtagcgcgccatttgcacccgcagctcgcggccgtccagcacggccccgtccatggcatccatagcgtcctcagcgtcgcgcttgtcgtgaaagcgaacgaaggcgaagccgcgggactccttggtgtagcggtcccgcgggatgtacacgtcgccgacgcgcccgtacttctcgaagacgcgcctcagcgtgtcgggcgaggtgcggattgtcagtggcttcgccccgaggagagctgactgccctgggctgctgcctccggcagagctgagccaaaatgtccccggaatctaaaaagcttttcaacatcattattttaggagttgcctttatgtttatgttcactgcctttcaaacttgtggaaatgtggcggtgagttggaatctgtcctccctcctttgaagtgcccatc

SEQ ID NO: 150633 - DNA, 1141 bp, Homo sapiens
  Payload ID: 9748
  Gene Symbol: MFSD11
  Gene Name: major facilitator superfamily domain containing 11
  ENST ID: ENST00000590393
  CDS Start-End: 967-1092
gcgccacccggaaatgaaaccttctgattggcccaccgcgccccgcttcgtaacgaccctgccgcgcgccccgcccctacccgaagcgcctgcgcacagcccggcgggcgggccaaaaagcgcggagtcacggctggagggagggggagcggaattagcgggcagttggaaagcccgcgaaacgctttttccgcctgggaggccggacgatcgcgattgggcaggaggaagaggaggtgctccccatctgggcccccacctttttttcatgccaatactccaagttcacgccccttttttgctcagccgtcagccccgtctccgtctgaagagtgcttctgccctcatttgcctctccctgtgaccccggccccctcagactccgctgcgtcgtctctcggccccgtccagccgttcctgactgctcttcgccggagtccgcttcccaaccccctttcgccagagcccgagagctccgtcggctctgcgtcctggcggtggggactccccgcggagcgcttgcgcgtgccaggccacccgggactacgtttcccagcgggccgagcggccggcgccgcggctgcggtcaggtgacccggtcgcctggccgcagtgagtcaggctgggagggcggggccgcgccggctgctgcggctggcacttggccctttaatccccttcgtgggcccctcaacctggagcggataaattcttggcgcttctccgggggttgtgctcttccgtactcggatcgcttcttaggagtatcctaactgccggtggggagaacttcgccctaaacctggggttccgatccaggaactggaagttgacagcttggctgcctggctcctgcatctgccttctccactcaccatctcatttctttctccaggattgtcagtggcttcgccccgaggagagctgactgccctgggctgctgcctccggcagagctgagccaaaatgtccccggaatctaaaaagcttttcaacatcattattttaggagttgcctttatgtttatgttcactgcctttcaaacttgtggaaatgtggcggtgagttggaatctgtcctccctcctttgaagtgcccatcataatgcagtccagaaatgaaaataaacgttcattatat

SEQ ID NO: 150634 - DNA, 834 bp, Homo sapiens
  Payload ID: 9748
  Gene Symbol: MFSD11
  Gene Name: major facilitator superfamily domain containing 11
  ENST ID: ENST00000588670
  CDS Start-End: 70-405
ttgtcagtggcttcgccccgaggagagctgactgccctgggctgctgcctccggcagagctgagccaaaatgtccccggaatctaaaaagcttttcaacatcattattttaggagttgcctttatgtttatgttcactgcctttcaaacttgtggaaatgtggcgcaaactgtcatcaggagcttaaataggacagattttcacggcagtggatataccagcatggctattatctatggagtgttctctgcttcaaatttgattacaccgtcagtggttgccattgtaggacctcaactctctatgtttgccagtggtttattttacagcctctgttttcattggaattgctgctgctgtgctttggacagcacaaggaaactgcctgacaatcaattcggatgagcacagcattgggagaaacagtgggattttctgggcacttctgcagtctagagagtgaccgaagaacagtgtttattgccctaacggtgattagccttgtggggacagttctattctttctcattcggaaaccagattctgaaaatgtcctaggagaagatgagtcttctgatgaccaggacatggaagtcaacgagtctgcccagaacaatctgacaaaggcagtagatgcttttaaaaagtcttttaagttatgtgtcaccaaggagatgctccttcttagtattacaactgcttatacaggtctggaattaactttcttctctggtgtatatggaacctgtattggtgctacaaataaatttggagcagaagagaaaagccttattggactttctggcattttcatcggcattggagaaattttag

SEQ ID NO: 150635 - DNA, 1891 bp, Homo sapiens
  Payload ID: 9748
  Gene Symbol: MFSD11
  Gene Name: major facilitator superfamily domain containing 11
  Uniprot ID: O43934
  ENST ID: ENST00000590514
  CDS Start-End: 167-1516
ggcccctcaacctggagcggataaattcttggcgcttctccgggggttgtgctcttccgtactcggatcgcttcttaggagtatcctaactgccggattgtcagtggcttcgccccgaggagagctgactgccctgggctgctgcctccggcagagctgagccaaaatgtccccggaatctaaaaagcttttcaacatcattattttaggagttgcctttatgtttatgttcactgcctttcaaacttgtggaaatgtggcgcaaactgtcatcaggagcttaaataggacagattttcacggcagtggatataccagcatggctattatctatggagtgttctctgcttcaaatttgattacaccgtcagtggttgccattgtaggacctcaactctctatgtttgccagtggtttattttacagcatgtacattgccgttttcatccagcctttcccgtggtccttctacacagcctctgttttcattggaattgctgctgctgtgctttggacagcacaaggaaactgcctgacaatcaattcggatgagcacagcattgggagaaacagtgggattttctgggcacttctgcagtctagcttgttctttggaaatctctacatatattttgcctggcaagggaaaactcagatatcagagagtgaccgaagaacagtgtttattgccctaacggtgattagccttgtggggacagttctattctttctcattcggaaaccagattctgaaaatgtcctaggagaagatgagtcttctgatgaccaggacatggaagtcaacgagtctgcccagaacaatctgacaaaggcagtagatgcttttaaaaagtcttttaagttatgtgtcaccaaggagatgctccttcttagtattacaactgcttatacaggtctggaattaactttcttctctggtgtatatggaacctgtattggtgctacaaataaatttggagcagaagagaaaagccttattggactttctggcattttcatcggcattggagaaattttaggtggaagcctcttcggcctgctgagcaagaacaatcgttttggtagaaatccagttgtgctgttgggcatcctggtgcacttcatagctttttatctaatatttctcaacatgcctggagatgccccgattgctcctgttaaaggaactgacagcagtgcttacatcaaatccagcaaagaagttgccattctctgcagttttctgttgggccttggagacagctgctttaatacccagctgcttagtatcttgggctttctgtattctgaagacagcgccccagcatttgccatcttcaagtttgttcagtctatttgcgcagccgtggcatttttctacagcaactaccttctccttcactggcaactcctggtcatggtgatatttgggttttttggaacaatttctttcttcactgtggaatgggaagctgccgcctttgtagcccgcggctctgactaccgaagtatctgatctggtgtccgtgaggggacacgtatgacctcagaaacacagctggacacagagcttggtggaagaagtcgcctttgatcttcactatatattgggtgatgttcagtatggaaaatcaagggattaagactgttaaatcagccagagttggtgttcaagtttacagatatgagttatttaaagcaagtagaataagggaaagctgttctgtcaactgtaattgttcaaagatgttgtttttcatttcatctatctcaattcttataatcatgttatagaatgtaaatgttttcttctctctcctgctcttgttggaagatcctgccttgatttagaatactaggccatatgtcatataaatattttttctggata

SEQ ID NO: 150636 - DNA, 857 bp, Homo sapiens
  Payload ID: 9748
  Gene Symbol: MFSD11
  Gene Name: major facilitator superfamily domain containing 11
  ENST ID: ENST00000585865
  CDS Start-End: 1-634
tgcttatacaggtctggaattaactttcttctctggtgtatatggaacctgtattggtgctacaaataaatttggagcagaagagaaaagccttattggactttctggcattttcatcggcattggagaaattttaggtggaagcctcttcggcctgctgagcaagaacaatcgttttggtagaaatccagttgtgctgttgggcatcctggtgcacttcatagctttttatctaatatttctcaacatgcctggagatgccccgattgctcctgttaaaggaactgacagcagtgcttacatcaaatccagcaaagaagttgccattctctgcagttttctgttgggccttggagacagctgctttaatacccagctgcttagtatcttgggctttctgtattctgaagacagcgccccagcatttgccatcttcaagtttgttcagtttctgtgggtcgggaatctgcgcatggctgagctgagtcctgagcgtctctccaggctgcagtccatgtctctgcaggctgcagtgaaggtgtgttccaggcttcactgggggagggcctgcttccctgctcactcgtatagttgttgcaggagtcagttcctcacagactgtcaggctaagtaaggatcttggtttcttatggctattggctaaagatcgccctctgcccttcatcatgctacggagtagtcctcagggcagcctacgacatggcagctgtctccatcaaaggtcacaagcaaggacagctggagagaacgagagcaagacaaaagccgcagtctctcataacttcatcactgttgcactctgtctgttaggtgccagtcactagttccagcctatt

SEQ ID NO: 150637 - DNA, 843 bp, Homo sapiens
  Payload ID: 9748
  Gene Symbol: MFSD11
  Gene Name: major facilitator superfamily domain containing 11
  ENST ID: ENST00000588768
  CDS Start-End: 1-387
tttatgttcactgcctttcaaacttgtggaaatgtggcgcaaactgtcatcaggagcttaaataggacagattttcacggcagtggatataccagcatggctattatctatggagtgttctctgcttcaaatttgattacaccgtcagtggttgccattgtaggacctcaactctctatgtttgccagtggtttattttacagcatgtacattgccgttttcatccagcctttcccgtggtccttctacacagcctctgttttcattggaattgctgctgctgtgctttggacagcacaaggaaactgcctgacaatcaattcggatgagcacagcattgggagaaacagtgggattttctgggcacttctgcagtctagagagtgaccgaagaacagtgtttattgccctaacggtgattagccttgtggggacagttctattctttctcattcggaaaccagattctgaaaatgtcctaggagaagatgagtcttctgatgaccaggacatggaagtcaacgagtctgcccagaacaatctgacaaaggcagtagatgcttttaaaaagtcttttaagttatgtgtcaccaaggagatgctccttcttagtattacaactgcttatacaggtctggaattaactttcttctctggtgtatatggaacctgtattggtgctacaaataaatttggagcagaagagaaaagccttattggactttctggcattttcatcggcattggagaaattttaggtggaagcctcttcggcctgctgagcaagaacaatcgttttggtagaaatccagttgtgctgttgggcatcctggtgcacttcat

SEQ ID NO: 150638 - DNA, 898 bp, Homo sapiens
  Payload ID: 9748
  Gene Symbol: MFSD11
  Gene Name: major facilitator superfamily domain containing 11
  ENST ID: ENST00000587661
  CDS Start-End: 559-898
ccttttttgctcagccgtcagccccgtctccgtctgaagagtgcttctgccctcatttgcctctccctgtgaccccggccccctcagactccgctgcgtcgtctctcggccccgtccagccgttcctgactgctcttcgccggagtccgcttcccaaccccctttcgccagagcccgagagctccgtcggctctgcgtcctggcggtggggactccccgcggagcgcttgcgcgtgccaggccacccgggactacgtttcccagcgggccgagcggccggcgccgcggctgcggtcaggtgacccggtcgcctggccgcagtgagtcaggctgggagggcggggccgcgccggctgctgcggctggcacttggccctttaatccccttcgtgggcccctcaacctggagcggataaattcttggcgcttctccgggggttgtgctcttccgtactcggatcgcttcttaggagtatcctaactgccggattgtcagtggcttcgccccgaggagagctgactgccctgggctgctgcctccggcagagctgagccaaaatgtccccggaatctaaaaagcttttcaacatcattattttaggagttgcctttatgtttatgttcactgcctttcaaacttgtggaaatgtggcgcaaactgtcatcaggagcttaaataggacagattttcacggcagtggatataccagcatggctattatctatggagtgttctctgcttcaaatttgattacaccgtcagtggttgccattgtaggacctcaactctctatgtttgccagtggtttattttacagcatgtacattgccgttttcatccagcctttcccgtggtccttctacacagcctctgttttcattggaattgctgctgctg

SEQ ID NO: 150639 - DNA, 2850 bp, Homo sapiens
  Payload ID: 9748
  Gene Symbol: MFSD11
  Gene Name: major facilitator superfamily domain containing 11
  Uniprot ID: O43934
  ENST ID: ENST00000621483
  CDS Start-End: 599-1948
cgccatttccccagtcgcgaggcggggtcctccgccccgcgccgcccacaccccggccactcccgggtcgcagacggcggaagctcgcggggtggccggagggtcgcgagacgcggcgtgcacccccgccccgtccgggcccgcaccacgtgcttcgccgcggacctttgtgaggtcgcccgggcctcccgcgcgccccgccccgcctcccgcggtcccctcagccccgtttacctgcggctccggcgtccgtagccaccgcccccgtacctgcggggtggcggtccccggcggctgtggtgtgagtccggggggcggccgtagcgcgccatttgcacccgcagctcgcggccgtccagcacggccccgtccatggcatccatagcgtcctcagcgtcgcgcttgtcgtgaaagcgaacgaaggcgaagccgcgggactccttggtgtagcggtcccgcgggatgtacacgtcgccgacgcgcccgtacttctcgaagacgcgcctcagcgtgtcgggcgaggtgcggattgtcagtggcttcgccccgaggagagctgactgccctgggctgctgcctccggcagagctgagccaaaatgtccccggaatctaaaaagcttttcaacatcattattttaggagttgcctttatgtttatgttcactgcctttcaaacttgtggaaatgtggcgcaaactgtcatcaggagcttaaataggacagattttcacggcagtggatataccagcatggctattatctatggagtgttctctgcttcaaatttgattacaccgtcagtggttgccattgtaggacctcaactctctatgtttgccagtggtttattttacagcatgtacattgccgttttcatccagcctttcccgtggtccttctacacagcctctgttttcattggaattgctgctgctgtgctttggacagcacaaggaaactgcctgacaatcaattcggatgagcacagcattgggagaaacagtgggattttctgggcacttctgcagtctagcttgttctttggaaatctctacatatattttgcctggcaagggaaaactcagatatcagagagtgaccgaagaacagtgtttattgccctaacggtgattagccttgtggggacagttctattctttctcattcggaaaccagattctgaaaatgtcctaggagaagatgagtcttctgatgaccaggacatggaagtcaacgagtctgcccagaacaatctgacaaaggcagtagatgcttttaaaaagtcttttaagttatgtgtcaccaaggagatgctccttcttagtattacaactgcttatacaggtctggaattaactttcttctctggtgtatatggaacctgtattggtgctacaaataaatttggagcagaagagaaaagccttattggactttctggcattttcatcggcattggagaaattttaggtggaagcctcttcggcctgctgagcaagaacaatcgttttggtagaaatccagttgtgctgttgggcatcctggtgcacttcatagctttttatctaatatttctcaacatgcctggagatgccccgattgctcctgttaaaggaactgacagcagtgcttacatcaaatccagcaaagaagttgccattctctgcagttttctgttgggccttggagacagctgctttaatacccagctgcttagtatcttgggctttctgtattctgaagacagcgccccagcatttgccatcttcaagtttgttcagtctatttgcgcagccgtggcatttttctacagcaactaccttctccttcactggcaactcctggtcatggtgatatttgggttttttggaacaatttctttcttcactgtggaatgggaagctgccgcctttgtagcccgcggctctgactaccgaagtatctgatctggtgtccgtgaggggacacgtatgacctcagaaacacagctggacacagagcttggtggaagaagtcgcctttgatcttcactatatattgggtgatgttcagtatggaaaatcaagggattaagactgttaaatcagccagagttggtgttcaagtttacagatatgagttatttaaagcaagtagaataagggaaagctgttctgtcaactgtaattgttcaaagatgttgtttttcatttcatctatctcaattcttataatcatgttatagaatgtaaatgttttcttctctctcctgctcttgttggaagatcctgccttgatttagaatactaggccatatgtcatataaatattttttctggatatggagtatgttttgccatgtaataatgggaagcatatgtcattccccatatgtgttggagaatgacatttaaataaatagcaaagctgggtgtggtgttgcaccgctatactcccagctgttggggaggctgagacagaaggatcacttcagcccaggagattgaggctgcggtgagctatgatcacaccactgcactccaggctgggcaacagagtgagaccctgtcttgaaaataataataggctggtcacagtggctcatgcctgtaatcccaacactttgggaggctgaggtgggtggatcacctgaggtcaggagtttgagaccagcctggccaacatggtgaaacctcatctctactaaaaatacaaaaatgtgttgggtttggtggtgcatgcctgtaatcctagctactagggaggctgaggtaagagaattcgcttgaacctgggaggcggaggttgcagtgagccgagatcgtgccattgcactccagcctggatgacaagagtgaaactccatctc

SEQ ID NO: 150640 - DNA, 2124 bp, Homo sapiens
  Payload ID: 9749
  Gene Symbol: MFSD12
  Gene Name: major facilitator superfamily domain containing 12
  Uniprot ID: Q6NUT3
  ENST ID: ENST00000355415
  CDS Start-End: 171-1613
tggggcggacgcggcggacgtgggtgagggcgcggccgtaagagagcgggacgcggggtgcccggcgcgtggtgggggtccccggcgcctgcccccacggcacccaagaaggcctggccagggtaccctccgcggagcccgggggtggggggcgcgggcccggcgccgcgatgggcccgggacccccagcggccggagcggcgccgtccccgcggccgctgtccctggtggcgcggctgagctacgccgtgggccacttcctcaacgacctgtgcgcgtccatgtggttcacctacctgctgctctacctgcactcggtgcgcgcctacagctcccgcggcgcggggctgctgctgctgctgggccaggtggccgacgggctgtgcacaccgctcgtgggctacgaggccgaccgcgccgccagctgctgcgcccgctacggcccgcgcaaggcctggcacctggtcggcaccgtctgcgtcctgctgtccttccccttcatcttcagcccctgcctgggctgtggggcggccacgcccgagtgggctgccctcctctactacggcccgttcatcgtgatcttccagtttggctgggcctccacacagatctcccacctcagcctcatcccggagctcgtcaccaacgaccatgagaaggtggagctcacggcactcaggtatgcgttcaccgtggtggccaacatcaccgtctacggcgccgcctggctcctgctgcacctgcagggctcgtcgcgggtggagcccacccaagacatcagcatcagcgaccagctggggggccaggacgtgcccgtgttccggaacctgtccctgctggtggtgggtgtcggcgccgtgttctcactgctattccacctgggcacccgggagaggcgccggccgcatgcggaggagccaggcgagcacacccccctgttggcccctgccacggcccagcccctgctgctctggaagcactggctccgggagccggctttctaccaggtgggcatactgtacatgaccaccaggctcatcgtgaacctgtcccagacctacatggccatgtacctcacctactcgctccacctgcccaagaagttcatcgcgaccattcccctggtgatgtacctcagcggcttcttgtcctccttcctcatgaagcccatcaacaagtgcattgggaggaacatgacctacttctcaggcctcctggtgatcctggcctttgccgcctgggtggcgctggcggagggactgggtgtggccgtgtacgcagcggctgtgctgctgggtgctggctgtgccaccatcctcgtcacctcgctggccatgacggccgacctcatcggtccccacacgaacagcggagcgttcgtgtacggctccatgagcttcttggataaggtggccaatgggctggcagtcatggccatccagagcctgcacccttgcccctcagagctctgctgcagggcctgcgtgagcttttaccactgggcgatggtggctgtgacgggcggcgtgggcgtggccgctgccctgtgtctctgtagcctcctgctgtggccgacccgcctgcgacgctgggaccgtgatgcccggccctgactcctgacagcctcctgcacctgtgcaagggaactgtggggacgcacgaggatgccccccagggccttggggaaaagcccccactgcccctcactcttctctggacccccaccctccatcctcacccagctcccgggggtggggtcgggtgagggcagcagggatgcccgccagggacttgcaaggaccccctgggttttgagggtgtcccattctcaactctaatccatcccagccctctggaggatttggggtgcccctctcggcagggaacaggaagtaggaatcccagaagggtctgggggaaccctaaccctgagctcagtccagttcacccctcacctccagcctgggggtctccagacactgccagggccccctcaggacggctggagcctggaggagacagccacggggtggtgggctgggcctggaccccaccgtggtgggcagcagggctgcccggcaggcttggtggactctgctggcagcaaataaagagatgacggca

SEQ ID NO: 150641 - DNA, 2039 bp, Homo sapiens
  Payload ID: 9749
  Gene Symbol: MFSD12
  Gene Name: major facilitator superfamily domain containing 12
  Uniprot ID: Q6NUT3
  ENST ID: ENST00000389395
  CDS Start-End: 161-1576
gcggcggacgtgggtgagggcgcggccgtaagagagcgggacgcggggtgcccggcgcgtggtgggggtccccggcgcctgcccccacggcacccaagaaggcctggccagggtaccctccgcggagcccgggggtggggggcgcgggcccggcgccgcgatgggcccgggacccccagcggccggagcggcgccgtccccgcggccgctgtccctggtggcgcggctgagctacgccgtgggccacttcctcaacgacctgtgcgcgtccatgtggttcacctacctgctgctctacctgcactcggtgcgcgcctacagctcccgcggcgcggggctgctgctgctgctgggccaggtggccgacgggctgtgcacaccgctcgtgggctacgaggccgaccgcgccgccagctgctgcgcccgctacggcaccgtctgcgtcctgctgtccttccccttcatcttcagcccctgcctgggctgtggggcggccacgcccgagtgggctgccctcctctactacggcccgttcatcgtgatcttccagtttggctgggcctccacacagatctcccacctcagcctcatcccggagctcgtcaccaacgaccatgagaaggtggagctcacggcactcaggtatgcgttcaccgtggtggccaacatcaccgtctacggcgccgcctggctcctgctgcacctgcagggctcgtcgcgggtggagcccacccaagacatcagcatcagcgaccagctggggggccaggacgtgcccgtgttccggaacctgtccctgctggtggtgggtgtcggcgccgtgttctcactgctattccacctgggcacccgggagaggcgccggccgcatgcggaggagccaggcgagcacacccccctgttggcccctgccacggcccagcccctgctgctctggaagcactggctccgggagccggctttctaccaggtgggcatactgtacatgaccaccaggctcatcgtgaacctgtcccagacctacatggccatgtacctcacctactcgctccacctgcccaagaagttcatcgcgaccattcccctggtgatgtacctcagcggcttcttgtcctccttcctcatgaagcccatcaacaagtgcattgggaggaacatgacctacttctcaggcctcctggtgatcctggcctttgccgcctgggtggcgctggcggagggactgggtgtggccgtgtacgcagcggctgtgctgctgggtgctggctgtgccaccatcctcgtcacctcgctggccatgacggccgacctcatcggtccccacacgaacagcggagcgttcgtgtacggctccatgagcttcttggataaggtggccaatgggctggcagtcatggccatccagagcctgcacccttgcccctcagagctctgctgcagggcctgcgtgagcttttaccactgggcgatggtggctgtgacgggcggcgtgggcgtggccgctgccctgtgtctctgtagcctcctgctgtggccgacccgcctgcgacgctgggaccgtgatgcccggccctgactcctgacagcctcctgcacctgtgcaagggaactgtggggacgcacgaggatgccccccagggccttggggaaaagcccccactgcccctcactcttctctggacccccaccctccatcctcacccagctcccgggggtggggtcgggtgagggcagcagggatgcccgccagggacttgcaaggaccccctgggttttgagggtgtcccattctcaactctaatccatcccagccctctggaggatttggggtgcccctctcggcagggaacaggaagtaggaatcccagaagggtctgggggaaccctaaccctgagctcagtccagttcacccctcacctccagcctggaggagacagccacggggtggtgggctgggcctggaccccaccgtggtgggcagcagggctgcccggcaggcttggtggactctgctggcagcaaataaagagatgacggc

SEQ ID NO: 150642 - DNA, 1014 bp, Homo sapiens
  Payload ID: 9749
  Gene Symbol: MFSD12
  Gene Name: major facilitator superfamily domain containing 12
  ENST ID: ENST00000398558
  CDS Start-End: 1-527
tgggtgtggccgtgtacgcagcggctgtgctgctgggtgctggctgtgccaccatcctcgtcacctcgctggccatgacggccgacctcatcggtccccacacgaacagcggagcgttcgtgtacggctccatgagcttcttggataaggtggccaatgggctggcagtcatggccatccagagcctgcacccttgcccctcagagctctgctgcagggcctgcgtgagcttttaccactgggcgatggtggctgtgacgggcggcgtgggcgtggccgctgccctgtgtctctgtagcctcctgctgtggccgacccgcctgcgacgctcttttcttgcctggagaagagggaggggagaggacaagggccctggctactcctggattcctacagtccttgtccagcctccaagacccacaagtcccttcctctgggaagcccccctggcctggaggtgcaccaggaagaagtggtctggggctggcactaagccatggcccagggaagactgggggacccactaggccaggatgagacctgcacgcagtggctcacagcagcacgatttgtgacagcccgaggcggagaacaccgaacacccagtgaaggtgaggggatcagcacggcgccgccaccgtgctggaacgagactcagccacaaggaggtgcgaagctctgacccaggccacagtgcggatgcaccttgaggatgtcacgctcagtgagagacaccagacacagaagggtacgctgtgatcccacttctatgaaatgtccaggacagaccaatccacagaatcagggagaggattcgtgggtgccgggactggggagggggacctgggggtgactaggtgacataatggggacagggctgccttctgggtgatgagaatgttctggaatcagatgggatggctgcacggcgtggtgaaggtactgaacgccacctcactgtaagacggtagattttgtattttaccacaataaacaaaacaaaacaaaaccaaa

SEQ ID NO: 150643 - DNA, 777 bp, Homo sapiens
  Payload ID: 9749
  Gene Symbol: MFSD12
  Gene Name: major facilitator superfamily domain containing 12
  ENST ID: ENST00000589995
  CDS Start-End: 1-777
ctcagcctcatcccggagctcgtcaccaacgaccatgagaaggtggagctcacggcactcaggtatgcgttcaccgtggtggccaacatcaccgtctacggcgccgcctggctcctgctgcacctgcagggctcgtcgcgggtggagcccacccaagacatcagcatcagcgaccagctggggggccaggacgtgcccgtgttccggaacctgtccctgctggtggtgggtgtcggcgccgtgttctcactgctattccacctgggcacccgggagaggcgccggccgcatgcggaggagccaggcgagcacacccccctgttggcccctgccacggcccagcccctgctgctctggaagcactggctccgggagccggctttctaccaggtgggcatactgtacatgaccaccaggctcatcgtgaacctgtcccagacctacatggccatgtacctcacctactcgctccacctgcccaagaagttcatcgcgaccattcccctggtgatgtacctcagcggcttcttgtcctccttcctcatgaagcccatcaacaagtgcattgggaggaacaacagcggagcgttcgtgtacggctccatgagcttcttggataaggtggccaatgggctggcagtcatggccatccagagcctgcacccttgcccctcagagctctgctgcagggcctgcgtgagcttttaccactgggcgatggtggctgtgacgggcggcgtgggcgtggccgctgccctgtgtctctgtagcctcctg

SEQ ID NO: 150644 - DNA, 1002 bp, Homo sapiens
  Payload ID: 9749
  Gene Symbol: MFSD12
  Gene Name: major facilitator superfamily domain containing 12
  ENST ID: ENST00000585814
  CDS Start-End: 268-483
ggctggggcgggagcccggggcctcccccagctcagcgcagggactctcacctcctcctcgtgggaccccttctcgcccgcgcgtggaccctcgccgcgctcttgcttgacagtcaccacgaagcccccatgctggcccggagccttgccgcccgccggcctggagccaaggataccgcggtcagccccgtcccaagaatctcccctcccccaaaagcccaccccagggcgttttgacccccgacggcggggctgcagcgagagtgcatgagcccgaggaggcagggtctgatggggcaccgtctgcgtcctgctgtccttccccttcatcttcagcccctgcctgggctgtggggcggccacgcccgagtgggctgccctcctctactacggcccgttcatcgtgatcttccagtttggctgggcctccacacagatctcccacctcagcctcatcccggagctcgtcaccaacgaccatgagaaggtggagctcacggcactcaggtatgcgttcaccgtggtggccaacatcaccgtctacggcgccgcctggctcctgctgcacctgcagggctcgtcgcgggtggagcccacccaagacatcagcatcagcgaccagctggggggccaggacgtgcccgtgttccggaacctgtccctgctggtggtgggtgtcggcgccgtgttctcactgctattccacctgggcacccgggagaggcgccggccgcatgcggaggagccaggcgagcacacccccctgttggcccctgccacggcccagcccctgctgctctggaagcactggctccgggagccggctttctaccaggtgggcatactgtacatgaccaccaggctcatcgtgaacctgtcccagacctacatggccatgtacctcacctactcgctccacctgcccaagaagttcatcgcgaccattcccctggtgatgtacctcagcggcttcttgtcctccttcctcatgaagcccatcaa

SEQ ID NO: 150645 - DNA, 486 bp, Homo sapiens
  Payload ID: 9749
  Gene Symbol: MFSD12
  Gene Name: major facilitator superfamily domain containing 12
  ENST ID: ENST00000592652
  CDS Start-End: 46-486
cccagggcgttttgacccccgacggcggggctgcagcgagagtgcatgagcccgaggaggcagggtctgatggggctggagtgtagtcatcggatctcagctcactgcaacctcgaactcctgggctcaagtgattctcctgcttcagcctctcgagcagttgggaccacagaacctgtccctgctggtggtgggtgtcggcgccgtgttctcactgctattccacctgggcacccgggagaggcgccggccgcatgcggaggagccaggcgagcacacccccctgttggcccctgccacggcccagcccctgctgctctggaagcactggctccgggagccggctttctaccaggtgggcatactgtacatgaccaccaggctcatcgtgaacctgtcccagacctacatggccatgtacctcacctactcgctccacctgcccaagaagttcatcgcgaccattcccctggtgatgtacctcag

SEQ ID NO: 150646 - DNA, 2040 bp, Homo sapiens
  Payload ID: 9749
  Gene Symbol: MFSD12
  Gene Name: major facilitator superfamily domain containing 12
  Uniprot ID: Q6NUT3
  ENST ID: ENST00000588918
  CDS Start-End: 161-1576
gcggcggacgtgggtgagggcgcggccgtaagagagcgggacgcggggtgcccggcgcgtggtgggggtccccggcgcctgcccccacggcacccaagaaggcctggccagggtaccctccgcggagcccgggggtggggggcgcgggcccggcgccgcgatgggcccgggacccccagcggccggagcggcgccgtccccgcggccgctgtccctggtggcgcggctgagctacgccgtgggccacttcctcaacgacctgtgcgcgtccatgtggttcacctacctgctgctctacctgcactcggtgcgcgcctacagctcccgcggcgcggggctgctgctgctgctgggccaggtggccgacgggctgtgcacaccgctcgtgggctacgaggccgaccgcgccgccagctgctgcgcccgctacggcaccgtctgcgtcctgctgtccttccccttcatcttcagcccctgcctgggctgtggggcggccacgcccgagtgggctgccctcctctactacggcccgttcatcgtgatcttccagtttggctgggcctccacacagatctcccacctcagcctcatcccggagctcgtcaccaacgaccatgagaaggtggagctcacggcactcaggtatgcgttcaccgtggtggccaacatcaccgtctacggcgccgcctggctcctgctgcacctgcagggctcgtcgcgggtggagcccacccaagacatcagcatcagcgaccagctggggggccaggacgtgcccgtgttccggaacctgtccctgctggtggtgggtgtcggcgccgtgttctcactgctattccacctgggcacccgggagaggcgccggccgcatgcggaggagccaggcgagcacacccccctgttggcccctgccacggcccagcccctgctgctctggaagcactggctccgggagccggctttctaccaggtgggcatactgtacatgaccaccaggctcatcgtgaacctgtcccagacctacatggccatgtacctcacctactcgctccacctgcccaagaagttcatcgcgaccattcccctggtgatgtacctcagcggcttcttgtcctccttcctcatgaagcccatcaacaagtgcattgggaggaacatgacctacttctcaggcctcctggtgatcctggcctttgccgcctgggtggcgctggcggagggactgggtgtggccgtgtacgcagcggctgtgctgctgggtgctggctgtgccaccatcctcgtcacctcgctggccatgacggccgacctcatcggtccccacacgaacagcggagcgttcgtgtacggctccatgagcttcttggataaggtggccaatgggctggcagtcatggccatccagagcctgcacccttgcccctcagagctctgctgcagggcctgcgtgagcttttaccactgggcgatggtggctgtgacgggcggcgtgggcgtggccgctgccctgtgtctctgtagcctcctgctgtggccgacccgcctgcgacgctgggaccgtgatgcccggccctgactcctgacagcctcctgcacctgtgcaagggaactgtggggacgcacgaggatgccccccagggccttggggaaaagcccccactgcccctcactcttctctggacccccaccctccatcctcacccagctcccgggggtggggtcgggtgagggcagcagggatgcccgccagggacttgcaaggaccccctgggttttgagggtgtcccattctcaactctaatccatcccagccctctggaggatttggggtgcccctctcggcagggaacaggaagtaggaatcccagaagggtctgggggaaccctaaccctgagctcagtccagttcacccctcacctccagcctgggggagacagccacggggtggtgggctgggcctggaccccaccgtggtgggcagcagggctgcccggcaggcttggtggactctgctggcagcaaataaagagatgacggca

SEQ ID NO: 150647 - DNA, 590 bp, Homo sapiens
  Payload ID: 9749
  Gene Symbol: MFSD12
  Gene Name: major facilitator superfamily domain containing 12
  ENST ID: ENST00000589063
  CDS Start-End: 1-543
ctcagcggcttcttgtcctccttcctcatgaagcccatcaacaagtgcattgggaggaacatgacctacttctcaggcctcctggtgatcctggcctttgccgcctgggtggcgctggcggagggactgggtgtggccgtgtacgcagcggctgtgctgctgggtgctggctgtgccaccatcctcgtcacctcgctggccatgacggccgacctcatcggtccccacacgaacagcggagcgttcgtgtacggctccatgagcttcttggataaggtggccaatgggctggcagtcatggccatccagagcctgcacccttgcccctcagagctctgctgcagggcctgcgtgagcttttaccactgggcgatggtggctgtgacgggcggcgtgggcgtggccgctgccctgtgtctctgtagcctcctgctgtggccgacccgcctgcgacgctgtgagtcctggcccacccctccctccccagacactgacccacactctctaatgccatttccacccctcccttgcaggggaccgtgatgcccggccctgactcctgacagcctcctgcacctgtgcaagggaac

SEQ ID NO: 150648 - DNA, 525 bp, Homo sapiens
  Payload ID: 9749
  Gene Symbol: MFSD12
  Gene Name: major facilitator superfamily domain containing 12
  ENST ID: ENST00000588626
  CDS Start-End: 31-192
cccccgacggcggggctgcagcgagagtgcatgagcccgaggaggcagggtctgatgggggcccggagttccgcggctgttttcacctccaaagaaactttcccggacctcccgactgcgcgacgctccaaccaaccgcccgcagcccgcccccgtcggccgccccgcccctccccgcccccggcatgctaatgaaggcctcggcgaacggtcccattgggctggagtgtagtcatcggatctcagctcactgcaacctcgaactcctgggctcaagtgattctcctgcttcagcctctcgagcagttgggaccacaggcaccgtctgcgtcctgctgtccttccccttcatcttcagcccctgcctgggctgtggggcggccacgcccgagtgggctgccctcctctactacggcccgttcatcgtgatcttccagtttggctgggcctccacacagatctcccacctcagcctcatcccggagctcgtcaccaacgaccatgagaaggtggagctcacggcac

SEQ ID NO: 150649 - DNA, 986 bp, Homo sapiens
  Payload ID: 9749
  Gene Symbol: MFSD12
  Gene Name: major facilitator superfamily domain containing 12
  ENST ID: ENST00000615073
  CDS Start-End: 1-492
aagttcatcgcgaccattcccctggtgatgtacctcagcggcttcttgtcctccttcctcatgaagcccatcaacaagtgcattgggaggaacatgacctacttctcaggcctcctggtgatcctggcctttgccgcctgggtggcgctggcggagggactgggtgtggccgtgtacgcagcggctgtgctgctgggtgctggctgtgccaccatcctcgtcacctcgctggccatgacggccgacctcatcggtccccacacgaacagcggagcgttcgtgtacggctccatgagcttcttggataaggtggccaatgggctggcagtcatggccatccagagcctgcacccttgcccctcagagctctgctgcagggcctgcgtgagcttttaccactgggcgatggtggctgtgacgggcggcgtgggcgtggccgctgccctgtgtctctgtagcctcctgctgtggccgacccgcctgcgacgctgatgagacctgcacgcagtggctcacagcagcacgatttgtgacagcccgaggcggagaacaccgaacacccagtgaaggtgaggggatcagcacggcgccgccaccgtgctggaacgagactcagccacaaggaggtgcgaagctctgacccaggccacagtgcggatgcaccttgaggatgtcacgctcagtgagagacaccagacacagaagggtacgctgtgatcccacttctatgaaatgtccaggacagaccaatccacagaatcagggagaggattcgtgggtgccgggactggggagggggacctgggggtgactaggtgacataatggggacagggctgccttctgggtgatgagaatgttctggaatcagatgggatggctgcacggcgtggtgaaggtactgaacgccacctcactgtaagacggtagattttgtattttaccacaataaacaaaacaaaacaaaaccaaaccaaacccaacaaa

SEQ ID NO: 150650 - DNA, 688 bp, Homo sapiens
  Payload ID: 9749
  Gene Symbol: MFSD12
  Gene Name: major facilitator superfamily domain containing 12
  ENST ID: ENST00000615613
  CDS Start-End: 253-684
gggctcaagtgatcctcctgtcttagccttccaaagtgctgggattacaggtgtgggccaccatgcccagccaccatcttggtttaatttctttccttggaaatggagcaaagggctttcactcttctttttcatggctgcatagtattccataattgtttaaacaattgataatagacactgtatcggggtgactggtatacccccaaaatcacatctgcccagagcctcaggacatggccttgtttggaaatggttttagcagatgcagctaagatgaggtcaccccgtgttaggatggccccgaatccagtgcctggcacccttataaggagagggaaacttggacgcagacaggaaggccgggtgaagacagaagcagagaccgggggccaaggagtgcctggggttgcccagagccaccacgggctgcaagaggtgtgggacagactctctcagccacagaagggcccagccccgcacaggcctggatttcagagggcgaacatttctgtggccgaagctcccagtgcgtttgcagtccttggagacggccgcagacacatttgttcttggcctgtctccaggtctgtagcccccacagtgagcggccactggccggaggggaacaggaagagctggaggggacgtcacacacatgagccttttaggaataacgagtgacacg

SEQ ID NO: 150651 - DNA, 2173 bp, Homo sapiens
  Payload ID: 9750
  Gene Symbol: MFSD2A
  Gene Name: major facilitator superfamily domain containing 2A
  Uniprot ID: Q8NA29
  ENST ID: ENST00000372809
  CDS Start-End: 144-1775
gcgttcctcgtctgccagccggcttggctagcgcgcggcggccgtggctaaggctgctacgaagcgagcttgggaggagcagcggcctgcggggcagaggagcatcccgtctaccaggtcccaagcggcgtggcccgcgggtcatggccaaaggagaaggcgccgagagcggctccgcggcggggctgctacccaccagcatcctccaaagcactgaacgcccggcccaggtgaagaaagaaccgaaaaagaagaaacaacagttgtctgtttgcaacaagctttgctatgcacttgggggagccccctaccaggtgacgggctgtgccctgggtttcttccttcagatctacctattggatgtggctcagaaggatgaggaagttgtcttttgcttctcctcattccaggtgggccctttctctgcctccatcatcctgtttgtgggccgagcctgggatgccatcacagaccccctggtgggcctctgcatcagcaaatccccctggacctgcctgggtcgccttatgccctggatcatcttctccacgcccctggccgtcattgcctacttcctcatctggttcgtgcccgacttcccacacggccagacctattggtacctgcttttctattgcctctttgaaacaatggtcacgtgtttccatgttccctactcggctctcaccatgttcatcagcaccgagcagactgagcgggattctgccaccgcctatcggatgactgtggaagtgctgggcacagtgctgggcacggcgatccagggacaaatcgtgggccaagcagacacgccttgtttccaggacctcaatagctctacagtagcttcacaaagtgccaaccatacacatggcaccacctcacacagggaaacgcaaaaggcatacctgctggcagcgggggtcattgtctgtatctatataatctgtgctgtcatcctgatcctgggcgtgcgggagcagagagaaccctatgaagcccagcagtctgagccaatcgcctacttccggggcctacggctggtcatgagccacggcccatacatcaaacttattactggcttcctcttcacctccttggctttcatgctggtggaggggaactttgtcttgttttgcacctacaccttgggcttccgcaatgaattccagaatctactcctggccatcatgctctcggccactttaaccattcccatctggcagtggttcttgacccggtttggcaagaagacagctgtatatgttgggatctcatcagcagtgccatttctcatcttggtggccctcatggagagtaacctcatcattacatatgcggtagctgtggcagctggcatcagtgtggcagctgccttcttactaccctggtccatgctgcctgatgtcattgacgacttccatctgaagcagccccacttccatggaaccgagcccatcttcttctccttctatgtcttcttcaccaagtttgcctctggagtgtcactgggcatttctaccctcagtctggactttgcagggtaccagacccgtggctgctcgcagccggaacgtgtcaagtttacactgaacatgctcgtgaccatggctcccatagttctcatcctgctgggcctgctgctcttcaaaatgtaccccattgatgaggagaggcggcggcagaataagaaggccctgcaggcactgagggacgaggccagcagctctggctgctcagaaacagactccacagagctggctagcatcctctagggcccgccacgttgcccgaagccaccatgcagaaggccacagaagggatcaggacctgtctgccggcttgctgagcagctggactgcaggtgctaggaagggaactgaagactcaaggaggtggcccaggacacttgctgtgctcactgtggggccggctgctctgtggcctcctgcctcccctctgcctgcctgtggggccaagccctggggctgccactgtgaatatgccaaggactgatcgggcctagcccggaacactaatgtagaaacctttttttttacagagcctaattaataacttaatgactgtgtacatagcaatgtgtgtgtatgtatatgtctgtgagctattaatgttattaattttcataaaagctggaaagcagctgcctgtt

SEQ ID NO: 150652 - DNA, 2154 bp, Homo sapiens
  Payload ID: 9750
  Gene Symbol: MFSD2A
  Gene Name: major facilitator superfamily domain containing 2A
  Uniprot ID: Q8NA29
  ENST ID: ENST00000372811
  CDS Start-End: 164-1756
gagggggcgtgcagcagagtgcgttcctcgtctgccagccggcttggctagcgcgcggcggccgtggctaaggctgctacgaagcgagcttgggaggagcagcggcctgcggggcagaggagcatcccgtctaccaggtcccaagcggcgtggcccgcgggtcatggccaaaggagaaggcgccgagagcggctccgcggcggggctgctacccaccagcatcctccaaagcactgaacgcccggcccaggtgaagaaagaaccgaaaaagaagaaacaacagttgtctgtttgcaacaagctttgctatgcacttgggggagccccctaccaggtgacgggctgtgccctgggtttcttccttcagatctacctattggatgtggctcaggtgggccctttctctgcctccatcatcctgtttgtgggccgagcctgggatgccatcacagaccccctggtgggcctctgcatcagcaaatccccctggacctgcctgggtcgccttatgccctggatcatcttctccacgcccctggccgtcattgcctacttcctcatctggttcgtgcccgacttcccacacggccagacctattggtacctgcttttctattgcctctttgaaacaatggtcacgtgtttccatgttccctactcggctctcaccatgttcatcagcaccgagcagactgagcgggattctgccaccgcctatcggatgactgtggaagtgctgggcacagtgctgggcacggcgatccagggacaaatcgtgggccaagcagacacgccttgtttccaggacctcaatagctctacagtagcttcacaaagtgccaaccatacacatggcaccacctcacacagggaaacgcaaaaggcatacctgctggcagcgggggtcattgtctgtatctatataatctgtgctgtcatcctgatcctgggcgtgcgggagcagagagaaccctatgaagcccagcagtctgagccaatcgcctacttccggggcctacggctggtcatgagccacggcccatacatcaaacttattactggcttcctcttcacctccttggctttcatgctggtggaggggaactttgtcttgttttgcacctacaccttgggcttccgcaatgaattccagaatctactcctggccatcatgctctcggccactttaaccattcccatctggcagtggttcttgacccggtttggcaagaagacagctgtatatgttgggatctcatcagcagtgccatttctcatcttggtggccctcatggagagtaacctcatcattacatatgcggtagctgtggcagctggcatcagtgtggcagctgccttcttactaccctggtccatgctgcctgatgtcattgacgacttccatctgaagcagccccacttccatggaaccgagcccatcttcttctccttctatgtcttcttcaccaagtttgcctctggagtgtcactgggcatttctaccctcagtctggactttgcagggtaccagacccgtggctgctcgcagccggaacgtgtcaagtttacactgaacatgctcgtgaccatggctcccatagttctcatcctgctgggcctgctgctcttcaaaatgtaccccattgatgaggagaggcggcggcagaataagaaggccctgcaggcactgagggacgaggccagcagctctggctgctcagaaacagactccacagagctggctagcatcctctagggcccgccacgttgcccgaagccaccatgcagaaggccacagaagggatcaggacctgtctgccggcttgctgagcagctggactgcaggtgctaggaagggaactgaagactcaaggaggtggcccaggacacttgctgtgctcactgtggggccggctgctctgtggcctcctgcctcccctctgcctgcctgtggggccaagccctggggctgccactgtgaatatgccaaggactgatcgggcctagcccggaacactaatgtagaaacctttttttttacagagcctaattaataacttaatgactgtgtacatagcaatgtgtgtgtatgtatatgtctgtgagctattaatgttattaattttcataaaagctggaaagcagctgcctgtt

SEQ ID NO: 150653 - DNA, 1914 bp, Homo sapiens
  Payload ID: 9750
  Gene Symbol: MFSD2A
  Gene Name: major facilitator superfamily domain containing 2A
  ENST ID: ENST00000420632
  CDS Start-End: 390-1514
agaactataagaggcgcggagggggcgtgcagcagagtgcgttcctcgtctgccagccggcttggctagcgcgcggcggccgtggctaaggctgctacgaagcgagcttgggaggagcagcggcctgcggggcagaggagcatcccgtctaccaggtcccaagcggcgtggcccgcgggtcatggccaaaggagaaggcgccgagagcggctccgcggcggggctgctacccaccagcatcctccaaagcactgaacgcccggcccaggtgaaggatcatcttctccacgcccctggccgtcattgcctacttcctcatctggttcgtgcccgacttcccacacggccagacctattggtacctgcttttctattgcctctttgaaacaatggtcacgtgtttccatgttccctactcggctctcaccatgttcatcagcaccgagcagactgagcgggattctgccaccgcctatcggatgactgtggaagtgctgggcacagtgctgggcacggcgatccagggacaaatcgtgggccaagcagacacgccttgtttccaggacctcaatagctctacagtagcttcacaaagtgccaaccatacacatggcaccacctcacacagggaaacgcaaaaggcatacctgctggcagcgggggtcattgtctgtatctatataatctgtgctgtcatcctgatcctgggcgtgcgggagcagagagaaccctatgaagcccagcagtctgagccaatcgcctacttccggggcctacggctggtcatgagccacggcccatacatcaaacttattactggcttcctcttcacctccttggctttcatgctggtggaggggaactttgtcttgttttgcacctacaccttgggcttccgcaatgaattccagaatctactcctggccatcatgctctcggccactttaaccattcccatctggcagtggttcttgacccggtttggcaagaagacagctgtatatgttgggatctcatcagcagtgccatttctcatcttggtggccctcatggagagtaacctcatcattacatatgcggtagctgtggcagctggcatcagtgtggcagctgccttcttactaccctggtccatgctgcctgatgtcattgacgacttccatctgaagcagccccacttccatggaaccgagcccatcttcttctccttctatgtcttcttcaccaagtttgcctctggagtgtcactgggcatttctaccctcagtctggactttgcagggtaccagacccgtggctgctcgcagccggaacgtgtcaagtttacactgaacatgctcgtgaccatggctcccatagttctcatcctgctgggcctgctgctcttcaaaatgtaccccattgatgaggagaggcggcggcagaataagaaggccctgcaggcactgagggacgaggccagcagctctggctgctcagaaacagactccacagagctggctagcatcctctagggcccgccacgttgcccgaagccaccatgcagaaggccacagaagggatcaggacctgtctgccggcttgctgagcagctggactgcaggtgctaggaagggaactgaagactcaaggaggtggcccaggacacttgctgtgctcactgtggggccggctgctctgtggcctcctgcctcccctctgcctgcctgtggggccaagccctggggctgccactgtgaatatgccaaggactgatcgggcctagcccggaacactaatgtagaaacctttttttttacagagcctaattaataacttaatgactgtgtacatagcaatgtgtgtgtatgtatatgtctgtgagctattaatgttattaattttcataaaagctggaaagcagctgcctgtttc

SEQ ID NO: 150654 - DNA, 946 bp, Homo sapiens
  Payload ID: 9750
  Gene Symbol: MFSD2A
  Gene Name: major facilitator superfamily domain containing 2A
  ENST ID: ENST00000434861
  CDS Start-End: 148-946
gagtgcgttcctcgtctgccagccggcttggctagcgcgcggcggccgtggctaaggctgctacgaagcgagcttgggaggagcagcggcctgcggggcagaggagcatcccgtctaccaggtcccaagcggcgtggcccgcgggtcatggccaaaggagaaggcgccgagagcggctccgcggcggggctgctacccaccagcatcctccaaagcactgaacgcccggcccagaaagaaccgaaaaagaagaaacaacagttgtctgtttgcaacaagctttgctatgcacttgggggagccccctaccaggtgacgggctgtgccctgggtttcttccttcagatctacctattggatgtggctcaggtgggccctttctctgcctccatcatcctgtttgtgggccgagcctgggatgccatcacagaccccctggtgggcctctgcatcagcaaatccccctggacctgcctgggtcgccttatgccctggatcatcttctccacgcccctggccgtcattgcctacttcctcatctggttcgtgcccgacttcccacacggccagacctattggtacctgcttttctattgcctctttgaaacaatggtcacgtgtttccatgttccctactcggctctcaccatgttcatcagcaccgagcagactgagcgggattctgccaccgcctatcggatgactgtggaagtgctgggcacagtgctgggcacggcgatccagggacaaatcgtgggccaagcagacacgccttgtttccaggacctcaatagctctacagtagcttcacaaagtgccaaccatacacatggcaccacctcacacagggaaacgcaaaaggcatacctgctggcagcgggggtcattgtctgtatctatataatctgtgctgtcatcctgatcctgggcgtgcgggagcagagag

SEQ ID NO: 150655 - DNA, 2834 bp, Homo sapiens
  Payload ID: 9751
  Gene Symbol: MFSD2B
  Gene Name: major facilitator superfamily domain containing 2B
  ENST ID: ENST00000338315
  CDS Start-End: 1-1515
atggcggcgccccctgcaccagccgccaaggggtccccgcagccggagccgcacgccccagagcccggcccggggagcgccaagcgagggcgagaggacagcagagccggtcgcctctcattctgtacaaaggtgtgctatggcattggtggggtccccaaccagatagcctccagcgccacagccttttacctgcagcttttcctgcttgatatagcacagatccctgccgcccaggtgtcacttgttctgtttgggggaaaagtgtctggggcggctgctgaccctgtggctgggttcttcatcaacaggagccagaggacagggtctggacggctcatgccttgggtgctgggctgcacccccttcatcgccctggcctacttcttcctgtggttcctgccccccttcaccagcctgcgaggcctctggtacacgactttctactgcctgttccaggccctggccacgttcttccaggtgccctacacagcgctcaccatgctgctgactccctgcccaagggagcgggactcggccaccgcctaccggatgactgtggagatggcgggaacactgatgggggccactgtccacgggctcatcgtgtccggcgcccacagaccccacaggtgcgaggccactgcgaccccggggccagtcactgtctccccgaatgcagcccatctctactgcattgcggctgccgtggttgtagtgacttaccccgtgtgcatcagtttactgtgcctaggggtgaaggagcggccagacccctctgccccagcctcaggcccaggcttgagtttcctggctgggctgagcctcactacccggcacccaccctacctgaagctggtgatctccttcctgttcatctctgctgctgttcaggtggagcagagctacctggtcctgttctgtacacatgcctcccagctacacgaccacgtccagggcctggtactaactgtcctggtctcagccgtgctgagcaccccgctgtgggagtgggttctccagcgctttgggaagaagacgtcagcctttgggatctttgcgatggtgccctttgcgatcttgctggctgctgtgcccacagcacctgtggcatatgtcgtggcctttgtatctggcgtgagcattgctgtgtccttgctgctaccctggtccatgctgccagacgtggtggatgactttcagctgcagcaccgtcacgggccaggcctggagaccatcttctactcctcctacgtcttcttcaccaagctgtctggcgcatgtgccctgggcatctccaccctcagtctggagttctcggggtataaggcaggggtctgcaagcaagcagaggaggtggtggtcaccctcaaagtcctcattggcgccgtgcccacctgcatgatccttgctgggctctgcatcctcatggtcggctccactccaaagacacccagtcgggacgcctccagccggctgagccttcggaggaggaccagctacagcctggcctaaagcttaggagggcgactgtgaatggacacaggagccagcaccctcggggcctgacatcgccctcctcagccctccagcacctggtctggcagtttagtatgtgacctttctccctgggatgtggagtcttcggcaacgtgtcctgaagggactggcccgcactccaggaccccacttggcatttcttgtctgttgccttcagactatctcagataggcctgtgcccctgactagcccagtagcacttgtctctagaaaaaggaagctcctgcccaacctggcttgtggaccagtaatatctgtggcctaccacccattcaagaaaacgttacagccggctcactgcaaaatccgcctcccgggttcacgccattctcctgcctcagcctcccgagtagctgggactacaggtgcccgccaccacgcccagctaatttttgtatttttagtagagacggggtttcaccgtgttagccagaatggtttcgatctcctgacctcgtgatccgccccgcctcagcctcccaaaggcatgagccaccgtactcggcctgcccaggctggtcttaaactcctggcctcaggtgatcctactgcctcagcctcctgagtagctgggattacagacacagcccccgttcccagctctagcatttcttaaggacaaaattggtgtgtaagtaacaggaaattcacattatgctgtactcattctctaatatcacagccatgttagaacaaatttgggttttcaaaacaagcgtaactgaacagagtatatatatgtatgtatataaatatatagaaatcctaaatggtccctgtgacataagaaatacacatttggtctctgccccaggttcctggcacagagcttctaaaatgctagtaacttcctgagtggtaggggtgaggggaacatcttttgttatacataagaagcccttttcaaacagatctgagtttatgctaatgatgtgactggcagaggatgggggctggttgccagagaaaccaaccatgtgattagaaggttgaaactttcagccttatcttcctaccgggaggggacaggggctgaagactgagctcatcatcaatgatttaatcaattgtgcccatgtaatggagcctccacttccaaacgaagggtttcagagagcttctaggttggtgaacacatccatgtaccaggaggtctaccccactccacggggacagaaactcttgtgtaggggacccttttagatttcattctatatacctcttcagctggctgttcattttataatcaaccaataaatgttaagtaaagtgtt

SEQ ID NO: 150656 - DNA, 1528 bp, Homo sapiens
  Payload ID: 9751
  Gene Symbol: MFSD2B
  Gene Name: major facilitator superfamily domain containing 2B
  Uniprot ID: A6NFX1
  ENST ID: ENST00000406420
  CDS Start-End: 17-1510
cggcgctgcggtggcaatggcggcgccccctgcaccagccgccaaggggtccccgcagccggagccgcacgccccagagcccggcccggggagcgccaagcgagggcgagaggacagcagagccggtcgcctctcattctgtacaaaggtgtgctatggcattggtggggtccccaaccagatagcctccagcgccacagccttttacctgcagcttttcctgcttgatatagcacagatccctgccgcccaggtgtcacttgttctgtttgggggaaaagtgtctggggcggctgctgaccctgtggctgggttcttcatcaacaggagccagaggacagggtctggacggctcatgccttgggtgctgggctgcacccccttcatcgccctggcctacttcttcctgtggttcctgccccccttcaccagcctgcgaggcctctggtacacgactttctactgcctgttccaggccctggccacgttcttccaggtgccctacacagcgctcaccatgctgctgactccctgcccaagggagcgggactcggccaccgcctaccggatgactgtggagatggcgggaacactgatgggggccactgtccacgggctcatcgtgtccggcgcccacagaccccacaggtgcgaggccactgcgaccccggggccagtcactgtctccccgaatgcagcccatctctactgcattgcggctgccgtggttgtagtgacttaccccgtgtgcatcagtttactgtgcctaggggtgaaggagcggccagacccctctgccccagcctcaggcccaggcttgagtttcctggctgggctgagcctcactacccggcacccaccctacctgaagctggtgatctccttcctgttcatctctgctgctgttcaggtggagcagagctacctggtcctgttctgtacacatgcctcccagctacacgaccacgtccagggcctggtactaactgtcctggtctcagccgtgctgagcaccccgctgtgggagtgggttctccagcgctttgggaagaagacgtcagcctttgggatctttgcgatggtgccctttgcgatcttgctggctgctgtgcccacagcacctgtggcatatgtcgtggcctttgtatctggcgtgagcattgctgtgtccttgctgctaccctggtccatgctgccagacgtggtggatgactttcagctgcagcaccgtcacgggccaggcctggagaccatcttctactcctcctacgtcttcttcaccaagctgtctggcgcatgtgccctgggcatctccaccctcagtctggagttctcggggtataaggcaggggtctgcaagcaagcagaggaggtggtggtcaccctcaaagtcctcattggcgccgtgcccacctgcatgatccttgctgggctctgcatcctcatggtcggctccactccaaagacacccagtcgggacgcctccagccggctgagccttcggaggtaagccccgcacgccccctgc

SEQ ID NO: 150657 - DNA, 674 bp, Homo sapiens
  Payload ID: 9751
  Gene Symbol: MFSD2B
  Gene Name: major facilitator superfamily domain containing 2B
  ENST ID: ENST00000453731
  CDS Start-End: 1-135
aaagtcctcattggcgccgtgcccacctgcatgatccttgctgggctctgcatcctcatggtcggctccactccaaagacacccagtcgggacgcctccagccggctgagccttcggagggttcttcatcactaggaactggctctcctagaatacaactaataacactaaaaggatgatggacagcagcctgagagacacaatctgacggaaggacattccccaagaagggccaaacgtgtgtggtgcactacacaggaatgctccaaaatgggaagaagtttgattcatccagagacagaaacaaacctttcaagttcagaattggcaaacaggaagtcatcaaaggttttgaagagggtgcagcccagctgggtcctctttctcctctccccatctgcccccatccctgctagatgagcttggggcagagggcgaagctgacctgcacccctgatgtggcatatggagccacgggccaccccggtgtcatccctcccaatgccaccctcatctttgacgtggagctgctcaacttagagtgaaggcaggaaggaactcaaggtggctggagatggctgctgctcaccctcctagcctgctctgccactgggacggctcctgcttttggggctcttgatcagtgtgctaacctcactgcctcatggcatcat

SEQ ID NO: 150658 - DNA, 1548 bp, Homo sapiens
  Payload ID: 9752
  Gene Symbol: MFSD3
  Gene Name: major facilitator superfamily domain containing 3
  Uniprot ID: Q96ES6
  ENST ID: ENST00000301327
  CDS Start-End: 261-1499
agcatgccgggagccgccggccgccggtgtccggaccgctcgcccccgtttggacccgacttcggttcttctggggtgttgatgctcctaaagcccgagagcacgtgtccagaccctagcctgtacgacgctgactctgcccggtcccagaaccaaagccatgccggggtgtggcctctgaccccacgcggaggggacctcgccttgcgggaccccacctggaacccgacctcccagcctcgcagccggcctgagccgccatgcgcgggaagttgctgccgctggccggcctctacctggtgcagggcctgccctacgggctccagtccggcctcctgccagtgctgctgcgtgccggcggcctctcgctgacgcgcgtggggctggccaaggttctgtacgctccgtggctgctcaagctggcttgggccccgctggtggacgcgcagggctcggcgagggcctgggtgacgcgcagcacggcgggcctgggcctggtgtgtgggctgcttgccgggctgccccctcctggagctggccaggccgggctgcccgccgctgtggcggggttgctgctgttgttgaacctgggtgccgccatgcaggatgtggccctggacgcgctggctgtgcagctgctggagccggccgaactggggccgggcaataccgtgcaggtggtcgcgtacaagctgggggccgcgctagctgggggcgcgctgctggcgctgctgcccaccttctcgtggccgcaactctttctgctcctggctgccacctactggctggccgcggccctggcctgggctgcaccagccctgcggcggctcccacagcagcccccttccgagcagcgtccccacaccgcgcaccttctgcgggacgtgctagccgtgccggggaccgtgtggacggcaggctttgtgctcacctacaagctgggtgagcagggtgccagcagcctgtttcctcttctcctgctggaccacggcgtttctgctcccgagttgggactgtggaatggtgtgggtgctgtggtctgctccatcgctggctcctccctgggtgggaccttgctggccaagcactggaaactgctgcctctgttgaggtcggtgctgcgcttccgcctcgggggcctagcctgtcagactgccttggtcttccacctggacaccctgggggccagcatggacgctggcacaatcttgagagggtcagccttgctgagcctatgtctgcagcacttcttgggaggcctggtcaccacagtcaccttcactgggatgatgcgctgcagccagctggcccccagggccctgcaggccacacactacagccttctggccacgctggagctgctggggaagctgctgctgggcactctggccggaggcctggctgatgggttggggccacatccctgcttcttgctcctgctcatcctctctgcctttcccgttctgtacctggacctagcacccagcacctttctctgagctgagtggctggagtggtcaataaagccacatgtgcctgtggcccaga

SEQ ID NO: 150659 - DNA, 4095 bp, Homo sapiens
  Payload ID: 9753
  Gene Symbol: MFSD4
  Gene Name: major facilitator superfamily domain containing 4
  Uniprot ID: Q8N468
  ENST ID: ENST00000367147
  CDS Start-End: 94-1638
cgcgggcctccccagcccggccggccctcccgcgggcggcactcgggcaccgggctcgccgggaccagatccgcgagcccgtcagcctgcgccatgggctgcgacggccgcgtgtcggggctgctccgccgcaacctgcagcccacgctcacctactggagcgtcttcttcagcttcggcctgtgcatcgccttcctggggcccacgctgctggacctgcgctgtcagacgcacagctcgctgccccagatctcctgggtcttcttctcgcagcagctctgcctcctgctgggcagcgccctcgggggcgtcttcaaaaggaccctggcccagtcactatgggccctgttcacctcctctctggccatctccctggtgtttgccgtcatccccttctgccgcgacgtgaaggtgctggcctcagtcatggcgctggcgggcttggccatgggctgcatcgacaccgtggccaacatgcagctggtaaggatgtaccagaaggactcggccgtcttcctccaggtgctccatttcttcgtgggctttggtgctctgctgagcccccttattgctgaccctttcctgtctgaggccaactgcttgcctgccaatagcacggccaacaccacctcccgaggccacctgttccatgtctccagggtgctgggccagcaccacgtagatgccaagccttggtccaaccagacgttcccagggctgactccaaaggacggggcagggacccgagtgtcctatgccttctggatcatggccctcatcaatcttccagtgcccatggctgtgctgatgctgctgtccaaggagcggctgctgacctgctgtccccagaggaggcccctgcttctgtctgctgatgagcttgccttggagacacagcctcctgagaaggaagatgcctcctcactgcccccaaagtttcagtcacacctagggcatgaggacctgttcagctgctgccaaaggaagaacctcagaggagccccttattccttctttgccatccacatcacgggcgccctggtactgttcatgacggatgggttgacgggtgcctattccgccttcgtgtacagctatgctgtggagaagcccctgtctgtgggacacaaggtggctggctacctccccagcctcttctggggcttcatcacactgggccggctcctctccattcccatatcctcaagaatgaagccggccaccatggttttcatcaacgtggttggcgtggtggtgacgttcctggtgctgcttattttctcctacaacgtcgtcttcctgttcgtggggacggcaagcctgggcctgtttctcagcagcaccttccccagcatgctggcctacacggaggactcgctgcagtacaaaggctgtgcaaccacagtgctggtgacaggggcaggagttggcgagatggtgctgcagatgctggttggttcgatattccaggctcagggcagctatagtttcctggtctgtggcgtgatctttggttgtctggcttttaccttctatatcttgctcctgtttttccacaggatgcaccctggactcccatcagttcctacccaagacagatcaattggaatggaaaactctgagtgctaccagaggtaaaactgggtgaagaaggcaagagaagactttcagcctcttgatcaccagcacgaccatactgtttcagaaagctgggtggtggtggaggcgctctctcaatggctattcaagtcttctccactaaaacttggttgggtagaggaaattaaattgagtcctggtacctggtcaaaatcattagaagtttacctggcttctcaagttatcttcttccctggttcagactgttggtaagagctgtccagatacccagatgggaaggaaggagacagccgcgcgcttcactccatttgtcacctcatgcatggaccatactctgggtttgagatcattcttcattgaagtttgtaaaaataggttgaaattgtaaagctccatgatcattgctatatgtagatatatttcaatttaagcaaaacaagctgcaagttattccctggcatgctcaaaggattttcgtgcttttcacttaatagtccaaagtctcttaaattcctgctgcagacatcaatagcttatctatattctcaaacaccaaaaggaaaagttgaatcttgctctctttggtatactaatgtagtggtatgctaagctggctcataccaacttagaaaagctgattgtaaaattttcattttgacagctggttattaaatgcagccattattaaaaatcaaatcatacaaacttataattaaatcaattacatttaaaacaaaggtaataaatattcaaagcatatcacttcctaatttgatcttgatgctcttgaggtaatttacgtccatggtacctgtgtggtggaattactatatatgatggtgtgctactgtgcaccttgtctcaactccactcttcgtgatagcatgttggtagcttgaaatcagcctggtgggagtattaccatggacactggcaaaagctacagatcccggagagccagtggttaaacatttaccagcataccactgctagtaatcaaggctaactggtccagaaatcgcccaggagaatgaaatggatgttccatttttttctactgacattgactagcatataaaaggtatagaaacagcactaagactttctgaaaatacctaatgaaaattttacatctttttttgtttttgtttttgtttttgagacagagtctcactctgttgccaggctggaatgcagtggcgtcatctcggctcactgcaacctccgcctcccagtttcaagcgattctcctgcctcagcctcccaagtagctgtgactacaggcgcatgccatcacgcacagctaattttttgtatttttagtagagacgggatttcaccgtgttagccaggatggtcttgatctcctgacctcatgatctgcccgtctcggcctcccaaagtgctgggattacaggcgtgagccactgcacccagccaaaaattttacatcttttatagagggaaaaaaactctttataccatggcaaggccttttctttcacaaaaagctgggcctactgaacaattcaagctgtgcagtagtagactgaaagcaggatttgttgaggagttacagctcctgtccagagcaaatcctgtagtgatacaaggagaatgtaaacttgccagcttagacagggatcagtcctgagactgctggcagtagcaaatggctattagagtaactgtataatggttttgcctgcactttctctatgtatatacaaatgtacatgtataaatataaaaattaagtgatcatggttcttggtaacctgtcccaagtgctgtgattcacacgcctgacactaaaaggttcttcctggtccagtcagccagctgtgaccaccagcagcacagctgagtgctgagaatctggctggaaagagaaacgtggctcaagtgctggctcaccttctagctgtgtggccctgggcaggttactgaggctcttccaacctcacttttcacatgtaaaatggcatttctaaaagtacctaccctacctcaaaggaattctgaaaaaagtaagtgaatttgtataaagcaaagcactcacaatatgcctgacacacaaactgcttaataaatgttagtaatttttaaaacctcctcataagcggcttagaaattattcatgtttggtacatatttattgcaagtcaagcagatccaacttttttgaaagctggtggtctaggagtatagttttaattatatttgtaaatactcaaaagtattagatgccagtctaatttaaatgcagtctgactgtagcgagtaactgacctgggcaatgaaaaagcagttgtatttttcttgtggtttttcaagaaaatatcctttttatacagatttagaaagaagaatcaatggctatatcgaagttgattgtgactaatttgttaatacagaaaacaacattaacacaaatctaagagtacctttcctaaaataaaatatttaaactta

SEQ ID NO: 150660 - DNA, 1841 bp, Homo sapiens
  Payload ID: 9753
  Gene Symbol: MFSD4
  Gene Name: major facilitator superfamily domain containing 4
  ENST ID: ENST00000536357
  CDS Start-End: 121-1500
gttatctgagcagactttgacaacttgcccacagctaataagtgagcagcttcttcctcagctctcttccttttctaccagagggggagaaatgtcttggctgcccagaccacccagtgaatggaggagaagggggaggggatgcttccagccccatcccctgacatcacccttccctcctgcagcctggcccagtcactatgggccctgttcacctcctctctggccatctccctggtgtttgccgtcatccccttctgccgcgacgtgaaggtgctggcctcagtcatggcgctggcgggcttggccatgggctgcatcgacaccgtggccaacatgcagctggtaaggatgtaccagaaggactcggccgtcttcctccaggtgctccatttcttcgtgggctttggtgctctgctgagcccccttattgctgaccctttcctgtctgaggccaactgcttgcctgccaatagcacggccaacaccacctcccgaggccacctgttccatgtctccagggtgctgggccagcaccacgtagatgccaagccttggtccaaccagacgttcccagggctgactccaaaggacggggcagggacccgagtgtcctatgccttctggatcatggccctcatcaatcttccagtgcccatggctgtgctgatgctgctgtccaaggagcggctgctgacctgctgtccccagaggaggcccctgcttctgtctgctgatgagcttgccttggagacacagcctcctgagaaggaagatgcctcctcactgcccccaaagtttcagtcacacctagggcatgaggacctgttcagctgctgccaaaggaagaacctcagaggagccccttattccttctttgccatccacatcacgggcgccctggtactgttcatgacggatgggttgacgggtgcctattccgccttcgtgtacagctatgctgtggagaagcccctgtctgtgggacacaaggtggctggctacctccccagcctcttctggggcttcatcacactgggccggctcctctccattcccatatcctcaagaatgaagccggccaccatggttttcatcaacgtggttggcgtggtggtgacgttcctggtgctgcttattttctcctacaacgtcgtcttcctgttcgtggggacggcaagcctgggcctgtttctcagcagcaccttccccagcatgctggcctacacggaggactcgctgcagtacaaaggctgtgcaaccacagtgctggtgacaggggcaggagttggcgagatggtgctgcagatgctggttggttcgatattccaggctcagggcagctatagtttcctggtctgtggcgtgatctttggttgtctggcttttaccttctatatcttgctcctgtttttccacaggatgcaccctggactcccatcagttcctacccaagacagatcaattggaatggaaaactctgagtgctaccagaggtaaaactgggtgaagaaggcaagagaagactttcagcctcttgatcaccagcacgaccatactgtttcagaaagctgggtggtggtggaggcgctctctcaatggctattcaagtcttctccactaaaacttggttgggtagaggaaattaaattgagtcctggtacctggtcaaaatcattagaagtttacctggcttctcaagttatcttcttccctggttcagactgttggtaagagctgtccagatacccagatgggaaggaaggagacagccgcgcgcttcactccatttgtcacctcatgcatggaccatactctgggtttgagatcattcttcattg

SEQ ID NO: 150661 - DNA, 1883 bp, Homo sapiens
  Payload ID: 9753
  Gene Symbol: MFSD4
  Gene Name: major facilitator superfamily domain containing 4
  ENST ID: ENST00000539267
  CDS Start-End: 87-1409
ctccccagcccggccggccctcccgcgggcggcactcgggcaccgggctcgccgggaccagatccgcgagcccgtcagcctgcgccatgggctgcgacggccgcgtgtcggggctgctccgccgcaacctgcagcccacgctcacctactggagcgtcttcttcagcttcggcctgtgcatcgccttcctggggcccacgctgctggacctgcgctgtcagacgcacagctcgctgccccagatctcctgggtcttcttctcgcagcagctctgcctcctgctgggcagcgccctcgggggcgtcttcaaaaggaccctggcccagtcactatgggccctgttcacctcctctctggccatctccctggtgtttgccgtcatccccttctgccgcgacgtgaaggtgctggcctcagtcatggcgctggcgggcttggccatgggctgcatcgacaccgtggccaacatgcagctggtaaggatgtaccagaaggactcggccgtcttcctccaggtgctccatttcttcgtgggctttggtgctctgctgagcccccttattgctgaccctttcctgtctgaggccaactgcttgcctgccaatagcacggccaacaccacctcccgaggccacctgttccatgtctccagggtgctgggccagcaccacgtagatgccaagccttggtccaaccagacgttcccagggctgactccaaaggacggggcagggacccgagtgtcctatgccttctggatcatggccctcatcaatcttccagtgcccatggctgtgctgatgctgctgtccaaggagcggctgctgacctgctgtccccagaggaggcccctgcttctgtctgctgatgagcttgccttggagacacagcctcctgagaaggaagatgcctcctcactgcccccaaagtttcagtcacacctagggcatgaggacctgttcagctgctgccaaaggaagaacctcagaggagccccttattccttctttgccatccacatcacgggcgccctggtactgttcatgacggatgggttgacgggtgcctattccgccttcgtgtacagctatgctgtggagaagcccctgtctgtgggacacaaggtggctggctacctccccagcctcttctggggcttcatcacactgggccggctcctctccattcccatatcctcaagaatgaagccggccaccatggttttcatcaacgtggttggcgtggtggtgacgttcctggtgctgcttattttctcctacaacgtcgtcttcctgttcgtggggacggcaagcctgggcctgtttctcagcagcaccttccccagcatgctggcctacacggaggactcgctgcagtacaaagatattccaggctcagggcagctatagtttcctggtctgtggcgtgatctttggttgtctggcttttaccttctatatcttgctcctgtttttccacaggatgcaccctggactcccatcagttcctacccaagacagatcaattggaatggaaaactctgagtgctaccagaggtaaaactgggtgaagaaggcaagagaagactttcagcctcttgatcaccagcacgaccatactgtttcagaaagctgggtggtggtggaggcgctctctcaatggctattcaagtcttctccactaaaacttggttgggtagaggaaattaaattgagtcctggtacctggtcaaaatcattagaagtttacctggcttctcaagttatcttcttccctggttcagactgttggtaagagctgtccagatacccagatgggaaggaaggagacagccgcgcgcttcactccatttgtcacctcatgcatggaccatactctgggtt

SEQ ID NO: 150662 - DNA, 1136 bp, Homo sapiens
  Payload ID: 9753
  Gene Symbol: MFSD4
  Gene Name: major facilitator superfamily domain containing 4
  ENST ID: ENST00000489709
  CDS Start-End: 50-1135
gggcaccgggctcgccgggaccagatccgcgagcccgtcagcctgcgccatgggctgcgacggccgcgtgtcggggctgctccgccgcaacctgcagcccacgctcacctactggagcgtcttcttcagcttcggcctgtgcatcgccttcctggggcccacgctgctggacctgcgctgtcagacgcacagctcgctgccccagatctcctgggtcttcttctcgcagcagctctgcctcctgctgggcagcgccctcgggggcgtcttcaaaaggaccctggcccagtcactatgggccctgttcacctcctctctggccatctccctggtgtttgccgtcatccccttctgccgcgacgtgaaggtgctggcctcagtcatggcgctggcgggcttggccatgggctgcatcgacaccgtggccaacatgcagctggtaaggatgtaccagaaggactcggccgtcttcctccaggtgctccatttcttcgtgggctttggtgctctgctgagcccccttattgctgaccctttcctgtctgaggccaactgcttgcctgccaatagcacggccaacaccacctcccgaggccacctgttccatgtctccagggtgctgggccagcaccacgtagatgccaagccttggtccaaccagacgttcccagggctgactccaaaggacggggcagggacccgagtgtcctatgccttctggatcatggccctcatcaatgttggcgtggtggtgacgttcctggtgctgcttattttctcctacaacgtcgtcttcctgttcgtggggacggcaagcctgggcctgtttctcagcagcaccttccccagcatgctggcctacacggaggactcgctgcagtacaaaggctgtgcaaccacagtgctggtgacaggggcaggagttggcgagatggtgctgcagatgctggttggttcgatattccaggctcagggcagctatagtttcctggtctgtggcgtgatctttggttgtctggcttttaccttctatatcttgctcctgtttttccacaggatgcaccctggactcccatcagttcctacccaagacagatcaattggaatggaaaactctgagtgctaccagaggtaaa

SEQ ID NO: 150663 - DNA, 477 bp, Homo sapiens
  Payload ID: 9753
  Gene Symbol: MFSD4
  Gene Name: major facilitator superfamily domain containing 4
  ENST ID: ENST00000621216
  CDS Start-End: 100-477
aacttgcccacagctaataagtgagcagcttcttcctcagctctcttccttttctaccagagggggagaaatgtcttggctgcccagaccacccagtgaatggaggagaagggggaggggatgcttccagccccatcccctgacatcacccttccctcctgcagcctggcccagtcactatgggccctgttcacctcctctctggccatctccctggtgtttgccgtcatccccttctgccgcgacgtgaaggtgctggcctcagtcatggcgctggcgggcttggccatgggctgcatcgacaccgtggccaacatgcagctggtaaggatgtaccagaaggactcggccgtcttcctccagcttccagtgcccatggctgtgctgatgctgctgtccaaggagcggctgctgacctgctgtccccagaggaggcccctgcttctgtctgctgatgagcttgccttggagacacag

SEQ ID NO: 150664 - DNA, 1475 bp, Homo sapiens
  Payload ID: 9753
  Gene Symbol: MFSD4
  Gene Name: major facilitator superfamily domain containing 4
  ENST ID: ENST00000475956
  CDS Start-End: 186-452
gcccacccgccgcagaggcgcccccgccgccgcccgggcccaagggcggggcccctcgctggggcggcccctccccgcccctccctccccgccgcgggcctccccagcccggccggccctcccgcgggcggcactcgggcaccgggctcgccgggaccagatccgcgagcccgtcagcctgcgccatgggctgcgacggccgcgtgtcggggctgctccgccgcaacctgcagcccacgctcacctactggagcgtcttcttcagcttcggcctgtgcatcgccttcctggggcccacgctgctggacctgcgctgtcagacgcacagctcgctgccccagatctcctgggtcttcttctcgcagcagctctgcctcctgctgggcagcgccctcgggggcgtcttcaaaaggacgtgctccatttcttcgtgggctttggtgctctgctgagcccccttattgctgaccctttcctgtctgaggccaactgcttgcctgccaatagcacggccaacaccacctcccgaggccacctgttccatgtctccagggtgctgggccagcaccacgtagatgccaagccttggtccaaccagacgttcccagggctgactccaaaggacggggcagggacccgagtgtcctatgccttctggatcatggccctcatcaatcttccagtgcccatggctgtgctgatgctgctgtccaaggagcggctgctgacctgctgtccccagaggaggcccctgcttctgtctgctgatgagcttgccttggagacacagcctcctgagaaggaagatgcctcctcactgcccccaaagtttcagtcacacctagggcatgaggacctgttcagctgctgccaaaggaagaacctcagaggagccccttattccttctttgccatccacatcacgggcgccctggtactgttcatgacggatgggttgacgggtgcctattccgccttcgtgtacagctatgctgtggagaagcccctgtctgtgggacacaaggtggctggctacctccccagcctcttctggggcttcatcacactgggccggctcctctccattcccatatcctcaagaatgaagccggccaccatggttttcatcaacgtggttggcgtggtggtgacgttcctggtgctgcttattttctcctacaacgtcgtcttcctgttcgtggggacggcaagcctgggcctgtttctcagcagcaccttccccagcatgctggcctacacggaggactcgctgcagtacaaaggctgtgcaaccacagtgctggtgacaggggcaggagttggcgagatggtgctgcagatgctggttggttcgatattccaggctcagggcagctatagtttcctggtctgtggcgtgatctttggttgtctggcttttaccttctatatcttgctcctgtttttccacaggatgcaccctggactcccatcag

SEQ ID NO: 150665 - DNA, 542 bp, Homo sapiens
  Payload ID: 9753
  Gene Symbol: MFSD4
  Gene Name: major facilitator superfamily domain containing 4
  ENST ID: ENST00000616173
  CDS Start-End: 180-542
gtgaagtgtcctgcagccaccttgtgaggtagattgttatctgagcagactttgacaacttgcccacagctaataacctggcccagtcactatgggccctgttcacctcctctctggccatctccctggtgtttgccgtcatccccttctgccgcgacgtgaaggtgctggcctcagtcatggcgctggcgggcttggccatgggctgcatcgacaccgtggccaacatgcagctggtaaggatgtaccagaaggactcggccgtcttcctccaggtgctccatttcttcgtgggctttggtgctctgctgagcccccttattgctgaccctttcctgtctgaggccaactgcttgcctgccaatagcacggccaacaccacctcccgaggccacctgttccatgtctccagggtgctgggccagcaccacgtagatgccaagccttggtccaaccagacgttcccagggctgactccaaaggacggggcagggacccgagtgtcctatgccttctggatcatggccctcatcaatcttcca

SEQ ID NO: 150666 - DNA, 1760 bp, Homo sapiens
  Payload ID: 9754
  Gene Symbol: MFSD5
  Gene Name: major facilitator superfamily domain containing 5
  Uniprot ID: Q6N075
  ENST ID: ENST00000329548
  CDS Start-End: 192-1544
cgtgatgaagccatcatggcggcggccagaggcctgcccggctcccggaagcaggctgtgaggggcgggagcgctgctggaacccgagccggagccggagccacagcggggagggtggcctggcggcctggagccggacgtgtccggggcgtccccgcagaccggggcagcaggtcgtccgggggcccaccatgctggtgactgcctaccttgcttttgtaggcctcctggcctcctgcctggggctggaactgtcaagatgccgggctaaaccccctggaagggcctgcagcaatccctccttccttcggtttcaactggacttctatcaggtctacttcctggccctggcagctgattggcttcaggccccctacctctataaactctaccagcattactacttcctggaaggtcaaattgccatcctctatgtctgtggccttgcctctacagtcctctttggcctagtggcctcctcccttgtggattggctgggtcgcaagaattcttgtgtcctcttctccctgacttactcactatgctgcttaaccaaactctctcaagactactttgtgctgctagtggggcgagcacttggtgggctgtccacagccctgctcttctcagccttcgaggcctggtatatccatgagcacgtggaacggcatgacttccctgctgagtggatcccagctacctttgctcgagctgccttctggaaccatgtgctggctgtagtggcaggtgtggcagctgaggctgtagccagctggatagggctggggcctgtagcgccctttgtggctgccatccctctcctggctctggcaggggccttggcccttcgaaactggggggagaactatgaccggcagcgtgccttctcaaggacctgtgctggaggcctgcgctgcctcctgtcggaccgccgcgtgctgctgttgggcaccatacaagctctatttgagagtgtcatcttcatctttgtcttcctctggacacctgtgctggacccacacggggcccctctgggcattatcttctccagcttcatggcagccagcctgcttggctcttccctgtaccgtatcgccacctccaagaggtaccaccttcagcccatgcacctgctgtcccttgctgtgctcatcgtcgtcttctctctcttcatgttgactttctctaccagcccaggccaggagagtccggtggagtccttcatagcctttctacttattgagttggcttgtggattatactttcccagcatgagcttcctacggagaaaggtgatccctgagacagagcaggctggtgtactcaactggttccgggtacctctgcactcactggcttgcctagggctccttgtcctccatgacagtgatcgaaaaacaggcactcggaatatgttcagcatttgctctgctgtcatggtgatggctctgctggcagtggtgggactcttcaccgtggtaaggcatgatgctgagctgcgggtaccttcacctactgaggagccctatgcccctgagctgtaaccccactccaggacaagatagctgggacagactcttgaattccagctatccgggattgtacagatctctctgtgactgactttgtgactgtcctgtggtttctcctgccattgctttgtgtttgggaggacatgatgggggtgatggactggaaagaaggtgccaaaagttccctctgtgttactcccatttagaaaataaacacttttaaatgat

SEQ ID NO: 150667 - DNA, 2038 bp, Homo sapiens
  Payload ID: 9754
  Gene Symbol: MFSD5
  Gene Name: major facilitator superfamily domain containing 5
  Uniprot ID: Q6N075
  ENST ID: ENST00000534842
  CDS Start-End: 148-1821
actgggaagttatgcggcttgcccaaggccacacagctggtaagtgacaggggcaggactgcgccttagtctgtctgcagcccgactccaagttctttacaccacaccgcctccctcaggtgtctggaccatactggcttctcttgcatggaggtcactgcagtgggagaggaggcaaaccaaggagaccttctcggcttcgggcagcggtgctgttccttaggaagctccaacccttggctctaccggactgcgggcatctttcccgagcactgcacggaagaaaagaaaattggcacttatttcagggtggcccctcaggcatccaagagccagaggagcaggtgtcacgggatggcagcgagcgaggccaggccaggagaagcaaccgcagcctcctatggtcgccccttcccgacccaccccaggcgtcaggagttccgcgcccgggtcgtccgggggcccaccatgctggtgactgcctaccttgcttttgtaggcctcctggcctcctgcctggggctggaactgtcaagatgccgggctaaaccccctggaagggcctgcagcaatccctccttccttcggtttcaactggacttctatcaggtctacttcctggccctggcagctgattggcttcaggccccctacctctataaactctaccagcattactacttcctggaaggtcaaattgccatcctctatgtctgtggccttgcctctacagtcctctttggcctagtggcctcctcccttgtggattggctgggtcgcaagaattcttgtgtcctcttctccctgacttactcactatgctgcttaaccaaactctctcaagactactttgtgctgctagtggggcgagcacttggtgggctgtccacagccctgctcttctcagccttcgaggcctggtatatccatgagcacgtggaacggcatgacttccctgctgagtggatcccagctacctttgctcgagctgccttctggaaccatgtgctggctgtagtggcaggtgtggcagctgaggctgtagccagctggatagggctggggcctgtagcgccctttgtggctgccatccctctcctggctctggcaggggccttggcccttcgaaactggggggagaactatgaccggcagcgtgccttctcaaggacctgtgctggaggcctgcgctgcctcctgtcggaccgccgcgtgctgctgttgggcaccatacaagctctatttgagagtgtcatcttcatctttgtcttcctctggacacctgtgctggacccacacggggcccctctgggcattatcttctccagcttcatggcagccagcctgcttggctcttccctgtaccgtatcgccacctccaagaggtaccaccttcagcccatgcacctgctgtcccttgctgtgctcatcgtcgtcttctctctcttcatgttgactttctctaccagcccaggccaggagagtccggtggagtccttcatagcctttctacttattgagttggcttgtggattatactttcccagcatgagcttcctacggagaaaggtgatccctgagacagagcaggctggtgtactcaactggttccgggtacctctgcactcactggcttgcctagggctccttgtcctccatgacagtgatcgaaaaacaggcactcggaatatgttcagcatttgctctgctgtcatggtgatggctctgctggcagtggtgggactcttcaccgtggtaaggcatgatgctgagctgcgggtaccttcacctactgaggagccctatgcccctgagctgtaaccccactccaggacaagatagctgggacagactcttgaattccagctatccgggattgtacagatctctctgtgactgactttgtgactgtcctgtggtttctcctgccattgctttgtgtttgggaggacatgatgggggtgatggactggaaagaaggtgccaaaagttccctctgtgttactcccatttagaaaataaacacttttaaatgatc

SEQ ID NO: 150668 - DNA, 1318 bp, Homo sapiens
  Payload ID: 9754
  Gene Symbol: MFSD5
  Gene Name: major facilitator superfamily domain containing 5
  ENST ID: ENST00000551660
  CDS Start-End: 81-1318
agtctgtctgcagcccgactccaagttctttacaccacaccgcctccctcaggtgtctggaccatactggcttctcttgcatggaggtcactgcagtgggagaggaggcaaaccaaggagaccttctcggcttcgggcagcggtgctgttccttaggaagctccaacccttggctctaccggactgcgggcatctttcccgagcactgcacggaagaaaagaaaattggcacttatttcagggtggcccctcaggcatccaagagccagaggagcaggtgtcacgggatggcagcgagcgaggccaggccaggagaagcaaccgcagcctcctatggtcgccccttcccgacccaccccaggcgtcaggagttccgcgcccgggtcgtccgggggcccaccatgctggtgactgcctaccttgcttttgtaggcctcctggcctcctgcctggggctggaactgtcaagatgccgggctaaaccccctggaagggcctgcagcaatccctccttccttcggtttcaactggacttctatcaggtctacttcctggccctggcagctgattggcttcaggccccctacctctataaactctaccagcattactacttcctggaaggtcaaattgccatcctctatgtctgtggccttgcctctacagtcctctttggcctagtggcctcctcccttgtggattggctgggtcgcaagaattcttgtgtcctcttctccctgacttactcactatgctgcttaaccaaactctctcaagactactttgtgctgctagtggggcgagcacttggtgggctgtccacagccctgctcttctcagccttcgaggcctggtatatccatgagcacgtggaacggcatgacttccctgctgagtggatcccagctacctttgctcgagctgccttctggaaccatgtgctggctgtagtggcaggtgtggcagctgaggctgtagccagctggatagggctggggcctgtagcgccctttgtggctgccatccctctcctggctctggcaggggccttggcccttcgaaactggggggagaactatgaccggcagcgtgccttctcaaggacctgtgctggaggcctgcgctgcctcctgtcggaccgccgcgtgctgctgttgggcaccatacaagctctatttgagagtgtcatcttcatctttgtcttcctctggacacctgtgctggacccacacggggcccctctgggcattatcttctccagcttcatggcagccagcctgcttggctcttccctgtaccgtatcgccacctccaagag

SEQ ID NO: 150669 - DNA, 4608 bp, Homo sapiens
  Payload ID: 9755
  Gene Symbol: MFSD6
  Gene Name: major facilitator superfamily domain containing 6
  Uniprot ID: Q6ZSS7
  ENST ID: ENST00000281416
  CDS Start-End: 136-2511
cttaatttcctgcaagatgaagttctgtgtttacatgttatgattttcattactaagccatcttttaaattttactttacagatcaacagtacaaattctgaagtttgtaaacttgctgatggtggtggtaagccatggcagatgataaagttgctatcttaacggatgatgaagaggaacagaagagaaagtatgtgcttgcagatccctttaatggtatttccagggaaccagaaccaccttcgaatgaaacaccttcctccacagaaacatctgctattcctgaggaggaaatagactggatagagaaacattgtgttaagataaacaacgatcttctaatttccaaggtcttttattttttcttttactctgcctatggctctctctatccccttttgcctgtgtattacaaacagctgggaatgtctccaagccagagtggactactagtaggtattcgttacttcattgaattctgcagtgcccccttttggggtgtagttgcagaccgctttaaaaaaggcaaaattgtcctcctcttttctcttttgtgttgggttttattcaacctgggcattggatttgtcaaacctgctaccttgagatgtgtaccaaagattcgcccaacaactcaccccaccaatgcaagtcaccagttaactatcctgccaacaaattcttcctttacctctttcctcaccatatcaccaaaaatgcgtgagaaaagaaaccttttggaaacaaggctcaatgtctcagacaccgttactttgccaacagctccaaacatgaacagtgaacccactctgcagccccagacaggtgaaattactaaccgtatgatggacttgactttgaactcaagcacagcaacccctgtctccccaggaagcgtaaccaaggagacaaccactgttattgttaccaccaccaaatctttaccttctgaccaagtcatgcttgtttatgatcaacaagaagttgaagctatattcttggtgatcttggtagttgtcataataggagaatttttcagtgcctcttctgtcacaatcgtagacacggtcacactccagtatctgggaaaacacagagatcgctatgggttgcagcgcatgtggggctccctgggctggggcctggcgatgctgtctgtgggcatcgggatcgactacacccacatcgaagtgctcatcgatggaaaggggtgtaagccccccgagtacaggaattaccagatcgtcttcatcgtcttcggcgttctcatgaccatggccttgatcgttgccactcagttccggttccgctacaaccatttcaaaaacgatgattctaaagggaaagaggtggagatcccgcaggtggaaaggaacaactctacagagtcctctgaggagacaccaaccaccacaagccactcgcaggccttcaacttttgggacttaatcaagctgctctgcagcgtgcagtatggctcagtgctgtttgtggcttggttcatgggttttggatatggcttcgtgttcacctttctctactggcatttggaagacctcaatggaactacaaccctctttggggtctgttcagtcctgagtcatgtgtctgagctgacagcatatttttttagtcacaagcttattgaattgatcggccacatcagggttctgtacattggcctggcctgcaatacggctcgctatatttatatttcctacctggagaatgcctggactgttctccccatggaagttcttcaaggagtgacacacgcggccatctgggcagcatgcatttcttacctcagtgcagccgttccccctgagctgaggacatctgctcagggcatcctgcagggccttcacctgggtttgggaagaggatgtggtgccatgatcggaggcgtgttagtcaattattttggggctgctgcaaccttccgaggaattggcatggcctgcttggtgatcctactgctctttgccctgatccagtggctggcagtgccagatgaggaagaagacaagacaatgttggcagaaagaattcctgttccctccagtcccgttcctatagcaaccatcgacttggtacagcaacagacagaagatgtcatgccacgcattgagcccagacttccacccaagaaaactaagcaccaggaagaacaggaagatgtgaacaaaccagcctggggagtcagctcttctccctgggtgacctttgtctatgcactctaccaaattaaagagatgatgcaactcacaagagacaaccgtgcttctgagatacagcctttacaggggaccaatgagaatagggaaaattctcctgctggtagagcccagcctgtcccatgtgagactcactctgacccatctagaaaccagccatcccctgacgcagcagcatctcagacgcagaccagccccgctcaccccagtgtggacccgtgcacagaggagagtgaagagcagcaggctcagctggccgcgggaggacactgagggcatcctgctcatctcacaccctgcatggaatcaggctcctcagccaggacacagggtgaggccccccagccaggatatgcctcccctggaggagcacagcactgcatatgcttctaaatatctaaactcattaacatggaaacacacacacaggagctacagtacatattggcaggaaaaggtaaactttcgtaatctcattggaattacaacagggaaatggagttcaatgaggactttcagttctttgcttggttaggttaaggatgatagaatttctctgccagtgcagtaagagttgaaaccggcagttacactaagtaagtggagggaatgaaagtgtttcgaggtgaatgtggatataatttccctcttctgattatttattcttatttggttcctaacacaaactgggaagagatagaattcatctatactttcttttttcttggagagaaccgtttaaaaaattacaagatatatttaaaaagtaaccagataaaagtagcacatgtgcttttgttaaaaataaagttaaaagttaaagttaaaaaatgaagttaaaagtttcatcagaaactttacatatctttagcaaatatatttttatatgtgtatggcatataatggaaataattctttgagcaacagaagctattattaactactgcaagctaagccgagcttaaaaatgccttttgttttaaatgggctttgagaaaaaaaacagaaacaagcgattatttcaaatcaaccaaccaactcagtatcctgtgttttgatagacaagagtttactaaatatattgatactgtaaatagcctctctcgctatttactatcttatagtaattcaggctctaattagctgagggaatgaaacacacaaaaatcactgaattcctaagagttccttaaataagcagtactagttacaaatcacagtataagatttaagtgcctgggggaaggatacaatttttagaaattacatattgggtcagttttgttttgtttttggtgaggaaaaggtggtaaataggaaaccatgaatgggaaggatggcaataagtagcaactatactttccaatgactaaagaaagaaaatctcagtatattcgttctcatgaagacacagtcagacactggacaatgtaatgtatgcaactgcaaacgttacaactgcagccagaacaatggctgggtggatcgcacgtaaagcttgccactaaaaatcaaagcagaggttaacaggaaacctggggggagtgtggaaaagggaaaactgttttagctgaataaaggtgaattatataatttataatagctgtggatgagcacaggagagagaggaaagaaaagaacagtcgaaatgagcaactcaccttaccctctgaccctgattagacaggatcaattgtaaagtgagggcttctccatgacaccatagttctgcccaatactgcatttgggataagaaattctacacttggatgtctcgcttcacaataaaacacagcttaaaaataaaataactgaaagaaatagaattcagcaaatagttattttttgcacttgaactgaaacgtactgtactgtaaattatgactcattttaagtgacctttaaaatcagatgtatttattatgcttgtgtaattatagaaataaagaaatgggtgacaggcttaacctcacctatgaatgtacagtatgtggatttgtgaaactgactgtaggaagtcaaaaacttgtactgtatcttgtgtttacagttctgatttattcctttgaaaagcctgctgttttggaaatgcacagttgacatgttgaaataaaaatgaataccatttttaaatgtttcttaaatgataaagatgtgaccaaacaaaagtcctatactctaatgaatgagaccaaattcaacatgcctttgttatggaacatttactgtgacagcagaatcgataatgcagtcatttccagccttgtgagctgacaccttcatgggtttgtggactttgtgactttttcttcctgtccccaaagtgccatatgctaccttaaaaaatattaaagtgaattcaaattacat

SEQ ID NO: 150670 - DNA, 4797 bp, Homo sapiens
  Payload ID: 9755
  Gene Symbol: MFSD6
  Gene Name: major facilitator superfamily domain containing 6
  Uniprot ID: Q6ZSS7
  ENST ID: ENST00000392328
  CDS Start-End: 325-2700
gtcgcagccccggaggagcgcgcgagcagcccgggatggtgcgcgctgccccgacagccgccgccccggcgccccgagccgccgccccgtgctccggggacagggctccccgcgccccgcgcagctgagcgctgccgccgccgcagcagacaggatctctctcagttacccaggccggagtgcagtggcgtgatcctagctcactgcagccttgaacccctgggctcaagtgattctcctgccttggcctcctgaatagctagaactacagatcaacagtacaaattctgaagtttgtaaacttgctgatggtggtggtaagccatggcagatgataaagttgctatcttaacggatgatgaagaggaacagaagagaaagtatgtgcttgcagatccctttaatggtatttccagggaaccagaaccaccttcgaatgaaacaccttcctccacagaaacatctgctattcctgaggaggaaatagactggatagagaaacattgtgttaagataaacaacgatcttctaatttccaaggtcttttattttttcttttactctgcctatggctctctctatccccttttgcctgtgtattacaaacagctgggaatgtctccaagccagagtggactactagtaggtattcgttacttcattgaattctgcagtgcccccttttggggtgtagttgcagaccgctttaaaaaaggcaaaattgtcctcctcttttctcttttgtgttgggttttattcaacctgggcattggatttgtcaaacctgctaccttgagatgtgtaccaaagattcgcccaacaactcaccccaccaatgcaagtcaccagttaactatcctgccaacaaattcttcctttacctctttcctcaccatatcaccaaaaatgcgtgagaaaagaaaccttttggaaacaaggctcaatgtctcagacaccgttactttgccaacagctccaaacatgaacagtgaacccactctgcagccccagacaggtgaaattactaaccgtatgatggacttgactttgaactcaagcacagcaacccctgtctccccaggaagcgtaaccaaggagacaaccactgttattgttaccaccaccaaatctttaccttctgaccaagtcatgcttgtttatgatcaacaagaagttgaagctatattcttggtgatcttggtagttgtcataataggagaatttttcagtgcctcttctgtcacaatcgtagacacggtcacactccagtatctgggaaaacacagagatcgctatgggttgcagcgcatgtggggctccctgggctggggcctggcgatgctgtctgtgggcatcgggatcgactacacccacatcgaagtgctcatcgatggaaaggggtgtaagccccccgagtacaggaattaccagatcgtcttcatcgtcttcggcgttctcatgaccatggccttgatcgttgccactcagttccggttccgctacaaccatttcaaaaacgatgattctaaagggaaagaggtggagatcccgcaggtggaaaggaacaactctacagagtcctctgaggagacaccaaccaccacaagccactcgcaggccttcaacttttgggacttaatcaagctgctctgcagcgtgcagtatggctcagtgctgtttgtggcttggttcatgggttttggatatggcttcgtgttcacctttctctactggcatttggaagacctcaatggaactacaaccctctttggggtctgttcagtcctgagtcatgtgtctgagctgacagcatatttttttagtcacaagcttattgaattgatcggccacatcagggttctgtacattggcctggcctgcaatacggctcgctatatttatatttcctacctggagaatgcctggactgttctccccatggaagttcttcaaggagtgacacacgcggccatctgggcagcatgcatttcttacctcagtgcagccgttccccctgagctgaggacatctgctcagggcatcctgcagggccttcacctgggtttgggaagaggatgtggtgccatgatcggaggcgtgttagtcaattattttggggctgctgcaaccttccgaggaattggcatggcctgcttggtgatcctactgctctttgccctgatccagtggctggcagtgccagatgaggaagaagacaagacaatgttggcagaaagaattcctgttccctccagtcccgttcctatagcaaccatcgacttggtacagcaacagacagaagatgtcatgccacgcattgagcccagacttccacccaagaaaactaagcaccaggaagaacaggaagatgtgaacaaaccagcctggggagtcagctcttctccctgggtgacctttgtctatgcactctaccaaattaaagagatgatgcaactcacaagagacaaccgtgcttctgagatacagcctttacaggggaccaatgagaatagggaaaattctcctgctggtagagcccagcctgtcccatgtgagactcactctgacccatctagaaaccagccatcccctgacgcagcagcatctcagacgcagaccagccccgctcaccccagtgtggacccgtgcacagaggagagtgaagagcagcaggctcagctggccgcgggaggacactgagggcatcctgctcatctcacaccctgcatggaatcaggctcctcagccaggacacagggtgaggccccccagccaggatatgcctcccctggaggagcacagcactgcatatgcttctaaatatctaaactcattaacatggaaacacacacacaggagctacagtacatattggcaggaaaaggtaaactttcgtaatctcattggaattacaacagggaaatggagttcaatgaggactttcagttctttgcttggttaggttaaggatgatagaatttctctgccagtgcagtaagagttgaaaccggcagttacactaagtaagtggagggaatgaaagtgtttcgaggtgaatgtggatataatttccctcttctgattatttattcttatttggttcctaacacaaactgggaagagatagaattcatctatactttcttttttcttggagagaaccgtttaaaaaattacaagatatatttaaaaagtaaccagataaaagtagcacatgtgcttttgttaaaaataaagttaaaagttaaagttaaaaaatgaagttaaaagtttcatcagaaactttacatatctttagcaaatatatttttatatgtgtatggcatataatggaaataattctttgagcaacagaagctattattaactactgcaagctaagccgagcttaaaaatgccttttgttttaaatgggctttgagaaaaaaaacagaaacaagcgattatttcaaatcaaccaaccaactcagtatcctgtgttttgatagacaagagtttactaaatatattgatactgtaaatagcctctctcgctatttactatcttatagtaattcaggctctaattagctgagggaatgaaacacacaaaaatcactgaattcctaagagttccttaaataagcagtactagttacaaatcacagtataagatttaagtgcctgggggaaggatacaatttttagaaattacatattgggtcagttttgttttgtttttggtgaggaaaaggtggtaaataggaaaccatgaatgggaaggatggcaataagtagcaactatactttccaatgactaaagaaagaaaatctcagtatattcgttctcatgaagacacagtcagacactggacaatgtaatgtatgcaactgcaaacgttacaactgcagccagaacaatggctgggtggatcgcacgtaaagcttgccactaaaaatcaaagcagaggttaacaggaaacctggggggagtgtggaaaagggaaaactgttttagctgaataaaggtgaattatataatttataatagctgtggatgagcacaggagagagaggaaagaaaagaacagtcgaaatgagcaactcaccttaccctctgaccctgattagacaggatcaattgtaaagtgagggcttctccatgacaccatagttctgcccaatactgcatttgggataagaaattctacacttggatgtctcgcttcacaataaaacacagcttaaaaataaaataactgaaagaaatagaattcagcaaatagttattttttgcacttgaactgaaacgtactgtactgtaaattatgactcattttaagtgacctttaaaatcagatgtatttattatgcttgtgtaattatagaaataaagaaatgggtgacaggcttaacctcacctatgaatgtacagtatgtggatttgtgaaactgactgtaggaagtcaaaaacttgtactgtatcttgtgtttacagttctgatttattcctttgaaaagcctgctgttttggaaatgcacagttgacatgttgaaataaaaatgaataccatttttaaatgtttcttaaatgataaagatgtgaccaaacaaaagtcctatactctaatgaatgagaccaaattcaacatgcctttgttatggaacatttactgtgacagcagaatcgataatgcagtcatttccagccttgtgagctgacaccttcatgggtttgtggactttgtgactttttcttcctgtccccaaagtgccatatgctaccttaaaaaatattaaagtgaattcaaattacat

SEQ ID NO: 150671 - DNA, 2902 bp, Homo sapiens
  Payload ID: 9755
  Gene Symbol: MFSD6
  Gene Name: major facilitator superfamily domain containing 6
  ENST ID: ENST00000434582
  CDS Start-End: 1-814
cacctttctctactggcatttggaagacctcaatggaactacaaccctctttggggtctgttcagtcctgagtcatgtgtctgagctgacagcatatttttttagtcacaagcttattgaattgatcggccacatcagggttctgtacattggcctggcctgcaatacggctcgctatatttatatttcctacctggagaatgcctggactgttctccccatggaagttcttcaaggagtgacacacgcggccatctgggcagcatgcatttcttacctcagtgcagccgttccccctgagctgaggacatctgctcagggcatcctgcagggccttcacctgggtttgggaagaggatgtggtgccatgatcggaggcgtgttagtcaattattttggggctgctgcaaccttccgaggaattggcatggcctgcttggtgatcctactgctctttgccctgatccagtggctggcagtgccagatgaggaagaagacaagacaatgttggcagaaagaattcctgttccctccagtcccgttcctatagcaaccatcgacttggtacagcaacagacagaagatgtcatgccacgcattgagcccagacttccacccaagaaaactaagcaccaggaagaacaggaagatgtgaacaaaccagcctggggagtcagctcttctccctgggtgacctttgtctatgcactctaccaaattaaagagatgatgcaactcacaagagacaaccgtgcttctgagatacagcctttacagttgcacataggaaaggagatgaaaggggaccaatgagaatagggaaaattctcctgctggtagagcccagcctgtcccatgtgagactcactctgacccatctagaaaccagccatcccctgacgcagcagcatctcagacgcagaccagccccgctcaccccagtgtggacccgtgcacagaggagagtgaagagcagcaggctcagctggccgcgggaggacactgagggcatcctgctcatctcacaccctgcatggaatcaggctcctcagccaggacacagggtgaggccccccagccaggatatgcctcccctggaggagcacagcactgcatatgcttctaaatatctaaactcattaacatggaaacacacacacaggagctacagtacatattggcaggaaaaggtaaactttcgtaatctcattggaattacaacagggaaatggagttcaatgaggactttcagttctttgcttggttaggttaaggatgatagaatttctctgccagtgcagtaagagttgaaaccggcagttacactaagtaagtggagggaatgaaagtgtttcgaggtgaatgtggatataatttccctcttctgattatttattcttatttggttcctaacacaaactgggaagagatagaattcatctatactttcttttttcttggagagaaccgtttaaaaaattacaagatatatttaaaaagtaaccagataaaagtagcacatgtgcttttgttaaaaataaagttaaaagttaaagttaaaaaatgaagttaaaagtttcatcagaaactttacatatctttagcaaatatatttttatatgtgtatggcatataatggaaataattctttgagcaacagaagctattattaactactgcaagctaagccgagcttaaaaatgccttttgttttaaatgggctttgagaaaaaaaacagaaacaagcgattatttcaaatcaaccaaccaactcagtatcctgtgttttgatagacaagagtttactaaatatattgatactgtaaatagcctctctcgctatttactatcttatagtaattcaggctctaattagctgagggaatgaaacacacaaaaatcactgaattcctaagagttccttaaataagcagtactagttacaaatcacagtataagatttaagtgcctgggggaaggatacaatttttagaaattacatattgggtcagttttgttttgtttttggtgaggaaaaggtggtaaataggaaaccatgaatgggaaggatggcaataagtagcaactatactttccaatgactaaagaaagaaaatctcagtatattcgttctcatgaagacacagtcagacactggacaatgtaatgtatgcaactgcaaacgttacaactgcagccagaacaatggctgggtggatcgcacgtaaagcttgccactaaaaatcaaagcagaggttaacaggaaacctggggggagtgtggaaaagggaaaactgttttagctgaataaaggtgaattatataatttataatagctgtggatgagcacaggagagagaggaaagaaaagaacagtcgaaatgagcaactcaccttaccctctgaccctgattagacaggatcaattgtaaagtgagggcttctccatgacaccatagttctgcccaatactgcatttgggataagaaattctacacttggatgtctcgcttcacaataaaacacagcttaaaaataaaataactgaaagaaatagaattcagcaaatagttattttttgcacttgaactgaaacgtactgtactgtaaattatgactcattttaagtgacctttaaaatcagatgtatttattatgcttgtgtaattatagaaataaagaaatgggtgacaggcttaacctcacctatgaatgtacagtatgtggatttgtgaaactgactgtaggaagtcaaaaacttgtactgtatcttgtgtttacagttctgatttattcctttgaaaagcctgctgttttggaaatgcacagttgacatgttgaaataaaaatgaataccatttttaaatgtttcttaaatgataaagatgtgaccaaacaaaa

SEQ ID NO: 150672 - DNA, 517 bp, Homo sapiens
  Payload ID: 9755
  Gene Symbol: MFSD6
  Gene Name: major facilitator superfamily domain containing 6
  ENST ID: ENST00000417958
  CDS Start-End: 391-517
gtcgcagccccggaggagcgcgcgagcagcccgggatggtgcgcgctgccccgacagccgccgccccggcgccccgagccgccgccccgtgctccggggacagggctccccgcgccccgcgcagctgagcgctgccgccgccgcagcagacaggatctctctcagttacccaggccggagtgcagtggcgtgatcctagctcactgcagccttgaacccctgggctcaagtgattctcctgccttggcctcctgaatagctagaactacagatgatgaaatggaattggagccgctgagctggataggtgaaggcactaatgatgaaggaaaaatagatcaacagtacaaattctgaagtttgtaaacttgctgatggtggtggtaagccatggcagatgataaagttgctatcttaacggatgatgaagaggaacagaagagaaagtatgtgcttgcagatccctttaatggtatttccagggaaccagaaccaccttcgaatgaaacaccttcct

SEQ ID NO: 150673 - DNA, 546 bp, Homo sapiens
  Payload ID: 9755
  Gene Symbol: MFSD6
  Gene Name: major facilitator superfamily domain containing 6
  ENST ID: ENST00000432036
  CDS Start-End: 203-546
gtcgcagccccggaggagcgcgcgagcagcccgggatggtgcgcgctgccccgacagccgccgccccggcgccccgagccgccgccccgtgctccggggacagggctccccgcgccccgcgcagctgagcgctgccgccgccgcagcagatcaacagtacaaattctgaagtttgtaaacttgctgatggtggtggtaagccatggcagatgataaagttgctatcttaacggatgatgaagaggaacagaagagaaagtatgtgcttgcagatccctttaatggtatttccagggaaccagaaccaccttcgaatgaaacaccttcctccacagaaacatctgctattcctgaggaggaaatagactggatagagaaacattgtgttaagataaacaacgatcttctaatttccaaggtcttttattttttcttttactctgcctatggctctctctatccccttttgcctgtgtattacaaacagctgggaatgtctccaagccagagtggactactagtaggtattcgttacttcattgaatt

SEQ ID NO: 150674 - DNA, 551 bp, Homo sapiens
  Payload ID: 9755
  Gene Symbol: MFSD6
  Gene Name: major facilitator superfamily domain containing 6
  ENST ID: ENST00000445546
  CDS Start-End: 83-551
aatcttatctgatacagagtgctaaataaatcaacagtacaaattctgaagtttgtaaacttgctgatggtggtggtaagccatggcagatgataaagttgctatcttaacggatgatgaagaggaacagaagagaaagtatgtgcttgcagatccctttaatggtatttccagggaaccagaaccaccttcgaatgaaacaccttcctccacagaaacatctgctattcctgaggaggaaatagactggatagagaaacattgtgttaagataaacaacgatcttctaatttccaaggtcttttattttttcttttactctgcctatggctctctctatccccttttgcctgtgtattacaaacagctgggaatgtctccaagccagagtggactactagtaggtattcgttacttcattgaattctgcagtgcccccttttggggtgtagttgcagaccgctttaaaaaaggcaaaattgtcctcctcttttctcttttgtgttgggttttattcaacctgggcattggatttgtcaaacctgctacct

SEQ ID NO: 150675 - DNA, 502 bp, Homo sapiens
  Payload ID: 9755
  Gene Symbol: MFSD6
  Gene Name: major facilitator superfamily domain containing 6
  ENST ID: ENST00000412482
  CDS Start-End: 1-275
cactctaccaaattaaagagatgatgcaactcacaagagacaaccgtgcttctgagatacagcctttacaggggaccaatgagaatagggaaaattctcctgctggtagagcccagcctgtcccatgtgagactcactctgacccatctagaaaccagccatcccctgacgcagcagcatctcagacgcagaccagccccgctcaccccagtgtggacccgtgcacagaggagagtgaagagcagcaggctcagctggccgcgggaggacactgagggcatcctgctcatctcacaccctgcatggaatcaggctcctcagccaggacacaggtgtatcttacaaaagtattactagtgatgaactagagggaaactggtccatcaccccagacagtctgagaagcactgacaagagccgcagactacagtgtccattgctgcggggcacaaatgactgaatgaagtcaacttgaaggtcgcatgtcaggcagtactcgggt

SEQ ID NO: 150676 - DNA, 777 bp, Homo sapiens
  Payload ID: 9755
  Gene Symbol: MFSD6
  Gene Name: major facilitator superfamily domain containing 6
  ENST ID: ENST00000444317
  CDS Start-End: 240-777
acttttatattaacaagcattttgaaaaggctgagggcagatatgttagaagccatcttcttattcctaaattcatgcttaaatgtaattgtccttcagttttcccactcctgagtttggagtctgctggatgatgggtggtttggggaaggaaaagggttctgtacattggcctggcctgcaatacggctcgctatatttatatttcctacctggagaatgcctggactgttctccccatggaagttcttcaaggagtgacacacgcggccatctgggcagcatgcatttcttacctcagtgcagccgttccccctgagctgaggacatctgctcagggcatcctgcagggccttcacctgggtttgggaagaggatgtggtgccatgatcggaggcgtgttagtcaattattttggggctgctgcaaccttccgaggaattggcatggcctgcttggtgatcctactgctctttgccctgatccagtggctggcagtgccagatgaggaagaagacaagacaatgttggcagaaagaattcctgttccctccagtcccgttcctatagcaaccatcgacttggtacagcaacagacagaagatgtcatgccacgcattgagcccagacttccacccaagaaaactaagcaccaggaagaacaggaagatgtgaacaaaccagcctggggagtcagctcttctccctgggtgacctttgtctatgcactctaccaaattaaagagatgatgcaactcacaagagacaaccgtgctt

SEQ ID NO: 150677 - DNA, 2188 bp, Homo sapiens
  Payload ID: 9756
  Gene Symbol: MFSD6L
  Gene Name: major facilitator superfamily domain containing 6-like
  Uniprot ID: Q8IWD5
  ENST ID: ENST00000329805
  CDS Start-End: 230-1990
cgcctctccctccgggcggggcccctttcggtccaacggcaggacctgggggctgtggccgggggcggccgttgacctggtgaccgcggcgccgccccagaccgggggcgcagtcccactcgctccgagccccggtcccccaagcctccctcccgggtacctggggccgcgcccgccctgcgcccagctccgccctccgtcggcccaggcctgacagagcccggcagccatgagtgccaacccccggtgggacatcagcagggcgctgggggtggccaagctcttccacctggtgtgcggggtgcgggaagcctgcgtgaccccgttcctgaccctttacctgaggcagctgggcttggccgcgccctgggtgggcaccctaatgggaaccaagcacctaatcgctgccttctgggctcccgtctgtgccttcctggccaaaagctaccggaaaaggagagcgcttctgatcggctccctgctcggctcggtgggggccagcctgctgatggtcctggtcccaccggtagacaaaaatcgggtgcacttcccttgtaatggaagcagcggcctgaccagcacagacgcactcccgggggtcacgctacctgtgaacatcacctcggcccaagagtctgcctccagccacccagccaagaggactgcagaggtggaaatgcctggcttcagaaacccacctggtgaaagtgaccgagaaactttccgtgatctgcacgtctacttagcgccctccgttgaaggagctaggaccacatcccaagctctcctccatcctgtcacttcggggctgaaagatcatccctgggaagttacttttgaggtggtcaagacagccctccccttgcttcctggggggaaagggcccgggaatccagccaatttgtcagggaccaaggggaaagcctgggcttttgacctgtccttggaggcgttgcggcggacttttatcctctccttggggtccgtggcgttctgggagctgctgacagcgcctctggagcaggtggcagatgacagcctttatgagttcctggattttgtggatgccactgaccgatacagaagcctgtgggtctggaggttgctgggcatgtcggcaggcgtgtgtggcatcacagccttggtggggcagctggactgcttcctgatgaccagtggcccccgaggtgtggtccacttctatgggtactcggtggtcagcaccctggccttactggtgagcattgcctttcccattcccatctgtcagcagtgggagcccagctacaaaagggtcaaagcactgtccattgtggggggtgacccccacctcattctcctcgcctccaccactgttttggtaggagccatcgtcagtactgtccagaactttctgttctggcacatgaaggaccatgggagcggcgagctggtcatgggtttctcggtcgccctcagcttgctgggggaaattctgcttcatccgttcaaagctacattgcttaggaaactgtccaggacgggcctggtggggctggggctgagctgcctcgctgggcagctgctgtactactctttcctctggagctggtggtccgtcctccccattcagatcttgagtgccattagcaacagagctttgtggtgggctgtgggggcctcagtagaggacctggccactccccgcatggagagggctctgagtgccttgttccgaggccacttttacgggagtggctgtagcctgggcagctttgtcgggggcttcgtggtgatgcgcttcagcctggctgtgctctaccaggcctgctgtgtggccctgttgctctggttggccttgctcctgtccatacagcggaggctgccccgagagcggaaaatcaagtactcgaagctgctgtccatggaggtgagtgacaccagtgactctgagcaggggacagaacaggactggcttgtgaaggccatgagggaggaacactcagactgaaagggctgagaaatccagagtgtgctgatccagcaaggaacgaatggactgaacaaaactcagcctgctgaggacagaaacctgccctggactgctgggagccggggaagagaggatgggtctgtgctgaaggcccaacaggatcatctcattgcatgattttctttacttttgaagtaaaaggagatttaacttttt

SEQ ID NO: 150678 - DNA, 1599 bp, Homo sapiens
  Payload ID: 9757
  Gene Symbol: MFSD7
  Gene Name: major facilitator superfamily domain containing 7
  Uniprot ID: Q6UXD7
  ENST ID: ENST00000347950
  CDS Start-End: 145-1470
gtagtccttggggcggaactggccccccgtggcccggcccggcccggccccacctccgcccgcaggcggtcccggcccacgcgggaaggtccttaagcccgggcggccggcgggaccggcggagacccgtggaggccgccgacgatggcggggccgacggaggccgagacggggttggccgagccccgggccctgtgcgcgcagcggggccaccgcacctacgcgcgccgctgggtgttcctgctcgcgatcagcctgctcaactgctccaacgccacgatcaactggctgtcactggtctacctcgtggtatccaccccatttggcgtggcggccatctggatcctggactccgtcgggctccgtgcggcgctcggtgtctataccatccctgctggcgtcgtctgcctgctgtccaccatctgcctgtgggagagtgtgccccccaccccgccctctgccggggctgccagctccacctcagagaagttcctggatgggctcaagctgcagctcatgtggaacaaggcctatgtcatcctggctgtgtgcttggggggaatgatcgggatctctgccagcttctcagccctcctggagcagatcctctgtgcaagcggccactccagtgggttttccggcctctgtggcgctctcttcatcacgtttgggatcctgggggcactggctctcggcccctatgtggaccggaccaagcacttcactgaggccaccaagattggcctgtgcctgttctctctggcctgcgtgccctttgccctggtgtcccagctgcagggacagacccttgccctggctgccacctgctcgctgctcgggctgtttggcttctcggtgggccccgtggccatggagttggcggtcgagtgttccttccccgtgggggagggggctgccacaggcatgatctttgtgctggggcaggccgagggaatactcatcatgctggcaatgacggcactgactgtgcgacgctcggagccgtccttgtccacctgccagcagggggaggatccacttgactggacagtgtctctgctgctgatggccggcctgtgcaccttcttcagctgcatcctggcggtcttcttccacaccccataccggcgcctgcaggccgagtctggggagcccccctccacccgtaacgccgtgggcggcgcagactcagggccgggtgtggaccgagggggagcaggaagggctggggtcctggggcccagcacggcgactccggagtgcacggcgaggggggcctcgctagaggaccccagagggcccgggagcccccacccagcctgccaccgagcgactccccgtgcgcaaggcccagcagccaccgacgcgccctcccgccccggcagactcgcaggcagggtccaagcgtccaggtttattgacccggctgggtctcactcctccttctcctccccgtgggtgatcacgtagctgagcgccttgtagtccaggttgcccgccacatcgatggaggcgaactggaacatctggtccacctgcgggcgggggcgaaagggctccttgcgggctccgggagcgaattacaagcgcgcacctgca

SEQ ID NO: 150679 - DNA, 2123 bp, Homo sapiens
  Payload ID: 9757
  Gene Symbol: MFSD7
  Gene Name: major facilitator superfamily domain containing 7
  Uniprot ID: Q6UXD7
  ENST ID: ENST00000322224
  CDS Start-End: 315-1994
ctgagaagcacacaggctgtgaccggggcccttcccggaagggacattcggtttttgtggcagggacttccagcctgaggccgaaggaggagggtccaacttcacctttgcccgcccttcccccgcttttttgggtctcctttaactgggacggggcgggaccctcctccgtagtccttggggcggaactggccccccgtggcccggcccggcccggccccacctccgcccgcaggcggtcccggcccacgcgggaaggtccttaagcccgggcggccggcgggaccggcggagacccgtggaggccgccgacgatggcggggccgacggaggccgagacggggttggccgagccccgggccctgtgcgcgcagcggggccaccgcacctacgcgcgccgctgggtgttcctgctcgcgatcagcctgctcaactgctccaacgccacgctgtggctcagctttgcacctgtggctgacgtcattgctgaggacttggtcctgtccatggagcagatcaactggctgtcactggtctacctcgtggtatccaccccatttggcgtggcggccatctggatcctggactccgtcgggctccgtgcggcgaccatcctgggtgcgtggctgaactttgccgggagtgtgctacgcatggtgccctgcatggttgttgggacccaaaacccatttgccttcctcatgggtggccagagcctctgtgcccttgcccagagcctggtcatcttctctccagccaagctggctgccttgtggttcccagagcaccagcgagccacggccaacatgctcgccaccatgtcgaaccctctgggcgtccttgtggccaatgtgctgtcccctgtgctggtcaagaagggtgaggacattccgttaatgctcggtgtctataccatccctgctggcgtcgtctgcctgctgtccaccatctgcctgtgggagagtgtgccccccaccccgccctctgccggggctgccagctccacctcagagaagttcctggatgggctcaagctgctcatgtggaacaaggcctatgtcatcctggctgtgtgcttggggggaatgatcgggatctctgccagcttctcagccctcctggagcagatcctctgtgcaagcggccactccagtgggttttccggcctctgtggcgctctcttcatcacgtttgggatcctgggggcactggctctcggcccctatgtggaccggaccaagcacttcactgaggccaccaagattggcctgtgcctgttctctctggcctgcgtgccctttgccctggtgtcccagctgcagggacagacccttgccctggctgccacctgctcgctgctcgggctgtttggcttctcggtgggccccgtggccatggagttggcggtcgagtgttccttccccgtgggggagggggctgccacaggcatgatctttgtgctggggcaggccgagggaatactcatcatgctggcaatgacggcactgactgtgcgacgctcggagccgtccttgtccacctgccagcagggggaggatccacttgactggacagtgtctctgctgctgatggccggcctgtgcaccttcttcagctgcatcctggcggtcttcttccacaccccataccggcgcctgcaggccgagtctggggagcccccctccacccgtaacgccgtgggcggcgcagactcagggccgggtgtggaccgagggggagcaggaagggctggggtcctggggcccagcacggcgactccggagtgcacggcgaggggggcctcgctagaggaccccagagggcccgggagcccccacccagcctgccaccgagcgactccccgtgcgcaaggcccagcagccaccgacgcgccctcccgccccggcagactcgcaggcagggtccaagcgtccaggtttattgacccggctgggtctcactcctccttctcctccccgtgggtgatcacgtagctgagcgccttgtagtccaggttgcccgccacatcgatggaggcgaactggaacatctggtccacctgcgggcgggggcgaaagggctccttgcgggctccgggagcgaattacaagcgcgcacctgca

SEQ ID NO: 150680 - DNA, 1826 bp, Homo sapiens
  Payload ID: 9757
  Gene Symbol: MFSD7
  Gene Name: major facilitator superfamily domain containing 7
  Uniprot ID: Q6UXD7
  ENST ID: ENST00000404286
  CDS Start-End: 17-1699
gtggaggccgccgacgatggcggggccgacggaggccgagacggggttggccgagccccgggccctgtgcgcgcagcggggccaccgcacctacgcgcgccgctgggtgttcctgctcgcgatcagcctgctcaactgctccaacgccacgctgtggctcagctttgcacctgtggctgacgtcattgctgaggacttggtcctgtccatggagcagatcaactggctgtcactggtctacctcgtggtatccaccccatttggcgtggcggccatctggatcctggactccgtcgggctccgtgcggcgaccatcctgggtgcgtggctgaactttgccgggagtgtgctacgcatggtgccctgcatggttgttgggacccaaaacccatttgccttcctcatgggtggccagagcctctgtgcccttgcccagagcctggtcatcttctctccagccaagctggctgccttgtggttcccagagcaccagcgagccacggccaacatgctcgccaccatgtcgaaccctctgggcgtccttgtggccaatgtgctgtcccctgtgctggtcaagaagggtgaggacattccgttaatgctcggtgtctataccatccctgctggcgtcgtctgcctgctgtccaccatctgcctgtgggagagtgtgccccccaccccgccctctgccggggctgccagctccacctcagagaagttcctggatgggctcaagctgcagctcatgtggaacaaggcctatgtcatcctggctgtgtgcttggggggaatgatcgggatctctgccagcttctcagccctcctggagcagatcctctgtgcaagcggccactccagtgggttttccggcctctgtggcgctctcttcatcacgtttgggatcctgggggcactggctctcggcccctatgtggaccggaccaagcacttcactgaggccaccaagattggcctgtgcctgttctctctggcctgcgtgccctttgccctggtgtcccagctgcagggacagacccttgccctggctgccacctgctcgctgctcgggctgtttggcttctcggtgggccccgtggccatggagttggcggtcgagtgttccttccccgtgggggagggggctgccacaggcatgatctttgtgctggggcaggccgagggaatactcatcatgctggcaatgacggcactgactgtgcgacgctcggagccgtccttgtccacctgccagcagggggaggatccacttgactggacagtgtctctgctgctgatggccggcctgtgcaccttcttcagctgcatcctggcggtcttcttccacaccccataccggcgcctgcaggccgagtctggggagcccccctccacccgtaacgccgtgggcggcgcagactcagggccgggtgtggaccgagggggagcaggaagggctggggtcctggggcccagcacggcgactccggagtgcacggcgaggggggcctcgctagaggaccccagagggcccgggagcccccacccagcctgccaccgagcgactccccgtgcgcaaggcccagcagccaccgacgcgccctcccgccccggcagactcgcaggcagggtccaagcgtccaggtttattgacccggctgggtctcactcctccttctcctccccgtgggtgatcacgtagctgagcgccttgtagtccaggttgcccgccacatcgatggaggcgaactggaacatctggtccacctgcgggcgggggcgaaagggctccttgcgggctccgggagcgaattacaagcgcgcacctg

SEQ ID NO: 150681 - DNA, 1556 bp, Homo sapiens
  Payload ID: 9757
  Gene Symbol: MFSD7
  Gene Name: major facilitator superfamily domain containing 7
  ENST ID: ENST00000515118
  CDS Start-End: 65-1456
gcgggaaggtccttaagcccgggcggccggcgggaccggcggagacccgtggaggccgccgacgatggcggggccgacggaggccgagacggggttggccgagccccgggccctgtgcgcgcagcggggccaccgcacctacgcgcgccgctgggtgttcctgctcgcgatcagcctgctcaactgctccaacgccacgctgtggctcagctttgcacctgtggctgacgtcattgctgaggacttggtcctgtccatggagcagatcaactggctgtcactggtctacctcgtggtatccaccccatttggcgtggcggccatctggatcctggactccgtcgggctccgtgcggcgctcggtgtctataccatccctgctggcgtcgtctgcctgctgtccaccatctgcctgtgggagagtgtgccccccaccccgccctctgccggggctgccagctccacctcagagaagttcctggatgggctcaagctgcagctcatgtggaacaaggcctatgtcatcctggctgtgtgcttggggggaatgatcgggatctctgccagcttctcagccctcctggagcagatcctctgtgcaagcggccactccagtgggttttccggcctctgtggcgctctcttcatcacgtttgggatcctgggggcactggctctcggcccctatgtggaccggaccaagcacttcactgaggccaccaagattggcctgtgcctgttctctctggcctgcgtgccctttgccctggtgtcccagctgcagggacagacccttgccctggctgccacctgctcgctgctcgggctgtttggcttctcggtgggccccgtggccatggagttggcggtcgagtgttccttccccgtgggggagggggctgccacaggcatgatctttgtgctggggcaggccgagggaatactcatcatgctggcaatgacggcactgactgtgcgacgctcggagccgtccttgtccacctgccagcagggggaggatccacttgactggacagtgtctctgctgctgatggccggcctgtgcaccttcttcagctgcatcctggcggtcttcttccacaccccataccggcgcctgcaggccgagtctggggagcccccctccacccgtaacgccgtgggcggcgcagactcagggccgggtgtggaccgagggggagcaggaagggctggggtcctggggcccagcacggcgactccggagtgcacggcgaggggggcctcgctagaggaccccagagggcccgggagcccccacccagcctgccaccgagcgactccccgtgcgcaaggcccagcagccaccgacgcgccctcccgccccggcagactcgcaggcagggtccaagcgtccaggtttattgacccggctgggtctcactcctccttctcctccccgtgggtgatcacgtagctgagcgccttgtagtccaggttgcccgccacatcgatggaggcgaactggaacatctggtccacctgcgggcgggggcgaaagggctccttgcgggctc

SEQ ID NO: 150682 - DNA, 938 bp, Homo sapiens
  Payload ID: 9757
  Gene Symbol: MFSD7
  Gene Name: major facilitator superfamily domain containing 7
  ENST ID: ENST00000507165
  CDS Start-End: 288-938
gcggggacaggtggctccgggaccctcagtccctcggaccagccgggttttgttttcctgtggccacagcccgaggtgccaggtgtggggcgttccttggacagtcaagggcctcctgctgcagttcttcactgttttattaatatccacgagtcatcatggagcacacagaaatctcaccctgacaccaagagtcgtcatggtctctgcctgggtcaccacagtgagccctgtggctcagctttgcacctgtggctgacgtcattgctgaggacttggtcctgtccatggagcagatcaactggctgtcactggtctacctcgtggtatccaccccatttggcgtggcggccatctggatcctggactccgtcgggctccgtgcggcgaccatcctgggtgcgtggctgaactttgccgggagtgtgctacgcatggtgccctgcatggttgttgggacccaaaacccatttgccttcctcatgggtggccagagcctctgtgcccttgcccagagcctggtcatcttctctccagccaagctggctgccttgtggttcccagagcaccagcgagccacggccaacatgctcgccaccatgtcgaaccctctgggcgtccttgtggccaatgtgctgtcccctgtgctggtcaagaagggtgaggacattccgttaatgctcggtgtctataccatccctgctggcgtcgtctgcctgctgtccaccatctgcctgtgggagagtgtgccccccaccccgccctctgccggggctgccagctccacctcagagaagttcctggatgggctcaagctgcagctcatgtggaacaaggcctatgtcatcctggctgtgtgcttggggggaatgatcgggatctctgccagcttctcagccctcctggagcagatcctctgtgcaagcggccactccagt

SEQ ID NO: 150683 - DNA, 653 bp, Homo sapiens
  Payload ID: 9757
  Gene Symbol: MFSD7
  Gene Name: major facilitator superfamily domain containing 7
  ENST ID: ENST00000512249
  CDS Start-End: 57-653
gtccttaagcccgggcggccggcgggaccggcggagacccgtggaggccgccgacgatggcggggccgacggaggccgagacggggttggccgagccccgggccctgtgcgcgcagcggggccaccgcacctacgcgcgccgctgggtgttcctgctcgcgatcagcctgctcaactgctccaacgccacgctgtggctcagctttgcacctgtggctgacgtcattgctgaggacttggtcctgtccatggagcagatcaactggctgtcactggtctacctcgtggtatccaccccatttggcgtggcggccatctggatcctggactccgtcgggctccgtgcggcggggttttccggcctctgtggcgctctcttcatcacgtttgggatcctgggggcactggctctcggcccctatgtggaccggaccaagcacttcactgaggccaccaagattggcctgtgcctgttctctctggcctgcgtgccctttgccctggtgtcccagctgcagggacagacccttgccctggctgccacctgctcgctgctcgggctgtttggcttctcggtgggccccgtggccatggagttggcggtcgagtgttccttccccgtgggggagggggctgccacaggcatgatcttt

SEQ ID NO: 150684 - DNA, 1632 bp, Homo sapiens
  Payload ID: 9757
  Gene Symbol: MFSD7
  Gene Name: major facilitator superfamily domain containing 7
  ENST ID: ENST00000503156
  CDS Start-End: 89-1351
ccttgagtgacacggcctcctgcctcccggactgtggctcagctttgcacctgtggctgacgtcattgctgaggacttggtcctgtccatggagcagatcaactggctgtcactggtctacctcgtggtatccaccccatttggcgtggcggccatctggatcctggactccgtcgggctccgtgcggcgaccatcctgggtgcgtggctgaactttgccgggagtgtgctacgcatggtgccctgcatggttgttgggacccaaaacccatttgccttcctcatgggtggccagagcctctgtgcccttgcccagagcctggtcatcttctctccagccaagctggctgccttgtggttcccagagcaccagcgagccacggccaacatgctcgccaccatgtcgaaccctctgggcgtccttgtggccaatgtgctgtcccctgtgctggtcaagaagggtgaggacattccgttaatgctcggtgtctataccatccctgctggcgtcgtctgcctgctgtccaccatctgcctgtgggagagtgtgccccccaccccgccctctgccggggctgccagctccacctcagagaagttcctggatgggctcaagctgctcatgtggaacaaggcctatgtcatcctggctgtgtgcttggggggaatgatcgggatctctgccagcttctcagccctcctggagcagatcctctgtgcaagcggccactccagtgggttttccggcctctgtggcgctctcttcatcacgtttgggatcctgggggcactggctctcggcccctatgtggaccggaccaagcacttcactgaggccaccaagattggcctgtgcctgttctctctggcctgcgtgccctttgccctggtgtcccagctgcagggacagacccttgccctggctgccacctgctcgctgctcgggctgtttggcttctcggtgggccccgtggccatggagttggcggtcgagtgttccttccccgtgggggagggggctgccacaggcatgatctttgtgctggggcaggccgagggaatactcatcatgctggcaatgacggcactgactgtgcgacgctcggagccgtccttgtccacctgccagcagggggaggatccacttgactggacagctgcatcctggcggtcttcttccacaccccataccggcgcctgcaggccgagtctggggagcccccctccacccgtaacgccgtgggcggcgcagactcagggccgggtgtggaccgagggggagcaggaagggctggggtcctggggcccagcacggcgactccggagtgcacggcgaggggggcctcgctagaggaccccagagggcccgggagcccccacccagcctgccaccgagcgactccccgtgcgcaaggcccagcagccaccgacgcgccctcccgccccggcagactcgcaggcagggtccaagcgtccaggtttattgacccggctgggtctcactcctccttctcctccccgtgggtgatcacgtagctgagcgccttgtagtccaggttgcccgccacatcgatggaggcgaactggaacatctggtccacctgcgggcgggggcgaaagggctccttgcgg

SEQ ID NO: 150685 - DNA, 4510 bp, Homo sapiens
  Payload ID: 9758
  Gene Symbol: MFSD8
  Gene Name: major facilitator superfamily domain containing 8
  Uniprot ID: Q8NHS3
  ENST ID: ENST00000296468
  CDS Start-End: 129-1685
aggttacaagcagcagatcccaccttcagtcctggctctgacaagccctccagcttcacgccacccgggatgggagaaagcaggtgtcgcgagagttgggcgcaagacgccttgtagggagtgtaactatggccggcctgcggaacgaaagtgaacaggagccgctcttaggcgacacacctggaagcagagaatgggacattttagagactgaagagcattataagagccgatggagatctattaggattttatatcttactatgtttctcagcagtgtagggttttctgtagtgatgatgtccatatggccatatctccaaaagattgatccgacagctgatacaagttttttgggctgggttattgcttcatatagtcttggccaaatggtagcttcacctatatttggtttatggtctaattatagaccaagaaaagagcctcttattgtctccatcttgatttccgtggcagccaactgcctctatgcatatctccacatcccagcttctcataataaatactacatgctggttgctcgtggattgttgggaattggagcaggaaatgtagcagttgttagatcatatactgctggtgctacttcccttcaggaaagaacaagttccatggcaaacataagcatgtgtcaagcattaggttttattctaggtccagtttttcagacttgttttacattccttggagaaaaaggtgtgacatgggatgtgattaaactgcagataaacatgtatacaacaccagttttacttagcgccttcctgggaattttaaatattattctgatccttgccatactaagagaacatcgtgtggatgactcaggaagacagtgtaaaagtattaattttgaagaagcaagtacagatgaagctcaggttccccaaggaaatattgaccaggttgctgttgtggccatcaatgttctgttttttgtgactctatttatctttgccctttttgaaaccatcattactccattaacaatggatatgtatgcctggactcaagaacaagctgtgttatataatggcataatacttgctgctcttggggttgaagccgttgttattttcttaggagttaagttgctttccaaaaagattggcgagcgtgctattctactgggaggactcatcgttgtatgggttggcttctttatcttgttaccttggggaaatcaatttcccaaaatacagtgggaagatttgcacaataattcaatccctaataccacatttggggaaattattattggtctttggaagtctccaatggaagatgacaatgaaagaccaactggttgctcgattgaacaagcctggtgcctctacaccccggtgattcatctggcccagttccttacatcagctgtgctaataggattaggctatccagtctgcaatcttatgtcctatactctatattcaaaaattctaggaccaaaacctcagggtgtatacatgggctggttaacagcatctggaagtggagcccggattcttgggcctatgttcatcagccaagtgtatgctcactggggaccacgatgggcattcagcctggtgtgtggaataatagtgctcaccatcaccctcctgggagtggtttacaaaagactcattgctctttctgtaagatatgggaggattcaggaataaactagctaagactgtgatggaaactacttgctgtgtggcacttcctggtctaaagctctgctagacaattgcggtgagccagtctccaagaatcagactacagatattgcagattttgaagaacaagaacatatgttgaataacagagagaattctacatgtcattgtgaatagtaggttatataaaaacatactagatgataatttccttacctcagaaatgaaatattattcttataatacctttttgtggttgcatgaactaatgagtgaatggacaatgatgaataaatgtgaagctgtattcttaatacccactgcagaagtgtcattaaaataatatacagtggaaccagaaagagggttctgtaagaattagccatagcagaacaaaattatagaattttaaatacctctacccaagtagaggtatttttattcagacacctactttttatttataaaaaaatgcattttctattatcaagttcacttatgaaataaaaattataacacatattttccatttagcgtgcctaacatcctaccttgccttctatgagtctttcttctaatactacacctctgccttattttagttcagggtttcactaagtaacccctacattaataaatgagtatggataatgctaatatttgagcaatacagaggattaagagatcaagatacttcactgcctattagcctaatagggatacctactttctttcaaatgccaaaaattcacattagaaacataatccagatatgtgttattttatatatatatatacaaaacagtaaatggtttcttaaaattattgctatttttcaacccccttaaactggagaaaaacatttaattagtaaaacattaattaatttactttaatttttcccatctctcagtagtggcggggaggaacacaacagttttcaatctatgtctgcatagttgtgtagagctgcagaattttagttggatttttaatttggatgatccctgacagccccaaactagtcaggctaataagtatttgaggcaaaatggctttaatctaacaatttactgagtttacctgaagttggctaaataacactgtatgtttaacttctacctctacataagttgaatgctgataaaaggaactagtagataactatgtatattgataagcactgttaagaaaatgcaaaaatatttctaaacacttttccaaatgttttctactttaagttagaaatagtttcaaatctgagaataaacactatataatctgcactttataggttgggtgcagtgtctcatgcctgtaatcccagcactttggaaggccaaggcaggaggattgcttgaggccaggaattcaagaccagcctgggaaacaaagtgagaccctgtctttacaaaaaataaaaacaaaaatttaaaactgtataatctgcactttatgctaaactagctgtgctcttaaactcaattttttcagctctaataaagggcttaatttgatagaattattctacgattaaattttgaagactgttttcactctcctctgccgcccatagcaagactgcttccatagatttctcagaaccgtagccagttctggctatttggtcaagtctgggatccctcttacctgctattctgcagctgctttctctgtcttacattttttgggccacgtctaatcttaaagagtaaactctacccttggtttgcatagtgtgcatgacaaaaataacaagaataatggtaatgatgaaaatgataagagcaaaatttgtggagtgctttccacattccaggtaatgtgtaacatacaatttaattcttacagcagtcttatggagtgaaaatactattatgattcccgttttacagatgaaagaatggaggcacagaaaagttacttgtctaagtaacagtctatccttaaagtccacagtcttaaccacttgatttttcatagtgaggaaaatatcccagaaagttgcagtttcaattaatcactaattgtagggtaatttaactataccagtgagtcctactagcagaaatatttgggcaacataagcccactgactggagcttttgtcttagcataataacctgtttccagcaagaatataacagaaaaaagtttcccagctttcaaaggtttataatattgattaaaatttagataaacttaaccttacacaaatgactcttactttcctttttattgagagcattttctttggagcattttcttctttggaggattataccttgctcatcttggcacaaaagaaggcgaaaggaagtaacatgggattgggaaaagagcaaggagataaagtttgaggaaaaaaaatcaccatgttgatgtcttcttgagtaggccaagttgcgtataaagagaaaatgacaacaggagattttaaggtatgatatattgttaagagtagtacatatttaagaagagaaaatatgtttttgaaaacaaatttaaacttgaaaggatgattttcatattttgaagggatttataacttcacaaagcatctccattctatcttgttcagctttacatttaaaaataaactcttcttgttcatataaaccttatctcttacataaagtgaaatctgttaattttttgttttgacaaggataaactacttacctgcatctgtttaagaatagattaacttattttgagaagaaattctgggcaccatttttgaccattgaagacttatttgtaatttaatttctactttacattgtgaatgttcattttctaataaacaagattattttgcatatgta

SEQ ID NO: 150686 - DNA, 910 bp, Homo sapiens
  Payload ID: 9758
  Gene Symbol: MFSD8
  Gene Name: major facilitator superfamily domain containing 8
  Uniprot ID: Q8NHS3
  ENST ID: ENST00000509826
  CDS Start-End: 116-577
agcagatcccaccttcagtcctggctctgacaagccctccagagaatgggacattttagagactgaagagcattataagagccgatggagatctattaggattttatatcttactatgtttctcagcagtgtagggttttctgtagtgatgatgtccatatggccatatctccaaaagattgatccgacagctgatacaagttttttgggctgggttattgcttcatatagtcttggccaaatggtagcttcacctatatttggtttatggtctaattatagaccaagaaaagagcctcttattgtctccatcttgatttccgtggcagccaactgcctctatgcatatctccacatcccagcttctcataataaatactacatgctggttgctcgtggattgttgggaattggagcagtttttcagacttgttttacattccttggagaaaaaggtgtgacatgggatgtgattaaactgcagataaacatgtatacaacaccagttttacttagcgccttcctgggaattttaaatattattctgatccttgccatactaagcaagtacagatgaagctcaggttccccaaggaaatattgaccaggttgctgttgtggccatcaatgttctgttttttgtgactctatttatctttgccctttttgaaaccatcattactccattaacaatggatatgtatgcctggactcaagaacaagctgtgttatataatggcataatacttgctgctcttggggttgaagccgttgttattttcttaggagttaagttgctttccaaaaagattggcgagcgtgctattctactgggaggactcatcgttgtatgggttggcttctttatcttgttaccttggggaaatcaatttcccaaaatacagtggga

SEQ ID NO: 150687 - DNA, 1850 bp, Homo sapiens
  Payload ID: 9758
  Gene Symbol: MFSD8
  Gene Name: major facilitator superfamily domain containing 8
  ENST ID: ENST00000513559
  CDS Start-End: 141-1562
atccggggacctgcaggttacaagcagcagatcccaccttcagtcctggctctgacaagccctccagagaatgggacattttagagactgaagagcattataagagccgatggagatctattaggattttatatcttactatgtttctcagcagtgtagggttttctgtagtgatgatgtccatatggccatatctccaaaagattgatccgacagctgatacaagttttttgggctgggttattgcttcatatagtcttggccaaatggtagcttcacctatatttggtttatggtctaattatagaccaagaaaagagcctcttattgtctccatcttgatttccgtggcagccaactgcctctatgcatatctccacatcccagcttctcataataaatactacatgctggttgctcgtggattgttgggaattggagcaggaaatgtagcagttgttagatcatatactgctggtgctacttcccttcaggaaagaacaagttccatggcaaacataagcatgtgtcaagcattaggttttattctaggtccagtttttcagacttgttttacattccttggagaaaaaggtgtgacatgggatgtgattaaactgcagataaacatgtatacaacaccagttttacttagcgccttcctgggaattttaaatattattctgatccttgccatactaagagaacatcgtgtggatgactcaggaagacagtgtaaaagtattaattttgaagaagcaagtacagatgaagctcaggttccccaaggaaatattgaccaggttgctgttgtggccatcaatgttctgttttttgtgactctatttatctttgccctttttgaaaccatcattactccattaacaatggatatgtatgcctggactcaagaacaagctgtgttatataatggcataatacttgctgctcttggggttgaagccgttgttattttcttaggagttaagttgctttccaaaaagattggcgagcgtgctattctactgggaggactcatcgttgtatgggttggcttctttatcttgttaccttggggaaatcaatttcccaaaatacagtgggaagatttgcacaataattcaatccctaataccacatttggggaaattattattggtctttggaagtctccaatggaagatgacaatgaaagaccaactggttgctcgattgaacaagcctggtgcctctacaccccggtgattcatctggcccagttccttacatcagctgtgctaataggattaggctatccagtctgcaatcttatgtcctatactctatattcaaaaattctaggaccaaaacctcagggtgtatacatgggctggttaacagcatctggaagtggagcccggattcttgggcctatgttcatcagccaagtgtatgctcactggggaccacgatgggcattcagcctggtgtgtggaataatagtgctcaccatcaccctcctgggagtggtttacaaaagactcattgctctttctgtaagatatgggaggattcaggaataaactagctaagactgtgatggaaactacttgctgtgtggcacttcctggtctaaagctctgctagacaattgcggtgagccagtctccaagaatcagactacagatattgcagattttgaagaacaagaacatatgttgaataacagagagaattctacatgtcattgtgaatagtaggttatataaaaacatactagatgataatttccttacctcagaaatgaaatattattcttataatacctttttgtggttgcatgaactaatgagtgaatggacaatgatgaa

SEQ ID NO: 150688 - DNA, 4049 bp, Homo sapiens
  Payload ID: 9759
  Gene Symbol: MFSD9
  Gene Name: major facilitator superfamily domain containing 9
  Uniprot ID: Q8NBP5
  ENST ID: ENST00000258436
  CDS Start-End: 45-1469
aggtccgcggctgctgctgcgtccgacccccggccggcgcgggtatggagcttgggggtcactgggacatgaactcggccccgaggctggtctcggagaccgcagagcggaaacaggagcagaagacaggaaccgaggcggaggctgccgactccggtgccgtcggagcccgccgcttcctgctctgtctctacttggtgggcttcttggatttgtttggtgtcagcatggttgtgcctttattgagccttcatgtcaagtcccttggagcaagtccaacagttgctggaatagtaggctcctcctatggcattttgcaactcttttctagcacattggtgggctgctggagcgatgtagtgggaagacggtcttccttgctggcatgcattctactcagtgctctgggctatctccttctcggagcagccaccaatgtgtttctgtttgtcctggctagagtcccggcaggtatttttaaacacactctctccatctcaagggctctactttctgatgtggttccagagaaggaacggccgcttgtaatcggacacttcaacacagcctccggtgtgggcttcatcttgggccccgtggtcggtggctatctcactgaattagaggatgggttttatctcacagccttcatctgctttttggtcttcattctcaatgctggtctcgtttggttctttccatggagggaagcaaaaccgggcagtacagagaagggcctgccattgcgaaagacccatgtgctgttgggaaggagccatgacacagtgcaggaggcagccaccagccgcagagccagggccagcaagaagactgcccagccctgggtcgaagtagtgttggccttgcggaacatgaagaacctgctgttttccgaaatgtgggacatatttctggtgcgcttgctgatggccatggcagtcatgctgtactacagtaactttgtcctggccctggaggagcgctttggggtgcggcccaaggtgacaggctacctcatcagttacagcagcatgctgggggccgtggccggccttgccctggggccaatcctacggctgtacaagcacaactcgcaggcactgctgctgcattccagcatactcacctgcacactgctgctgctctactccttggcccccaccatgggtgcagttgtcctctcctccactctcctgtccttctccactgccattggcaggacgtgcatcacggacctccagctgactgtgggcggggcccaggccagcggcacccttattggcgtggggcagtctgtgactgcagtgggccgcatcatcgcccctctcctctcgggggttgcccaggaggtcagcccttgcggcccccccagcctgggcgctgtgttagccttagtggccattttcataatgtctctaaacaagcgacactctagtggtgatgggaatagtaaattaaaaagtgagtagatggatttggacaacataaagcaacaaaatttgagatggttgaatgagggccggaggccatgatgaaaagggcactttggaaagggttggggtggaagggaaatatttccgggtgggtgtgagctgttgggcttccaggtcagctcttggccatgcagccatgcctgcaggatgatcagaagtcacggcacctcatgggaaggttaagactggagcaaagcttttccaaggtgagcatattcagcgtttacctggaagtctcttcttcccacctgggctaatcaggttacaattttcaagggtaaacaaactaccagctacaggatagggaagtggtggtggaataagagaacatgatacctggaggaagggaagaaaccacaagcattttcctactgaaaaatagggtgacatgtcagtcaaattctgatcaactggaacttgagtttccagttaaattccatacactaggagggagttttctatcaaaatcctgcagattgaagaagctggtttattagaaccagcctgtcgcttttcaaagctgcttaaaaataagatactgacctcacccctagagatgattcagtgggcctgggtggggccaagaaatccgtggtgttttgtaagcactgctggcgatttctcatggcagtaaagaccacactgagactgcactgattttgattaaagtacataggcttggctgtttttacacagctaactaaatttggactcttaaaattgtgtttgtaatcacagtgtgttacacctttcccagctctcagcagttgtactgcatgatggagcagcgggcccctgggacctgttccctgtgctccctgcctctgagagcccagcttgctctgaagttggactaaaccacttagatgctggggttgccacagcctgctcctggaagcctgcattccagtcaggttgcatccttctggtgctgacagaacccagtggtgaagccaaagcacaggaatgctttaaaaatgaacagtttatgcagaataagggtcaggagtcatgccagaccagaacttgatgctactgtgtcttgtgttaagaatcatttcctggccaggctcggtggctcaggcctgtaatcccagcactttgggaggctgaggcaggtgaatcacttggtcaggagatggagaccattctggctaacatggtgaaaccccgtctctactaaaaatacaaaaaaaaaattagccgggcgtgatggcgggcgcctgcagtcccagctattcgggaggctgaggtagaatggcgtgaacctgggaggcggagcttgcggtgagccaagattgtgccactgctctccagcctgggcgacagagtgagactccgtctcaaaaaaaaaagaatcatttcctttatttttagtttcacgcctgcaaacacaagcattctgttgatcaacggaaatattttgatgtgccatttcttgtctaaacaagtttcatatacagcaccgagggggccacgagaggcagaggcccagacagaaggtgaacatagccttgcagggagacatatgccaggcaggatgaccattgggattgcatcaagtattaatcagttacttaagggcttcctgtcagacagttgaagttcacattccttttacttttcttaattagtccactaggatggtatgcctgttttcaacttaacacatgcatacttgtaaatattttagtatgctacagtaatttgtcatatctttaatatttattgtttgtaaagcagtaaacatttctgtattttagaagtcatggagtaaaatcaaatatttatgataaataattggaagtatgttttagtttgaagattgtcctttttcctatcttgctgcaaggaaaaatggacttctgattaggttttacaattgtgaacttttatgtaaatgttaagtgctttcgaggagaccaaactattattaatatataaaatggccttgcccttaaggagcaaattaaatctcatggagattagactcaaaaggcaataaataatcgagggtttatgcaatgaaatagaatttcagaagagtttggatctcaaagattgtccttcactctcagaaacaggcaagtttcttaaaagcccttatagtcgtgtttttattttaaaaatcgtagcactttatttttgaagtttaaaaagcccataaacttaatgagtctttataatcagacacatggaaatatagaaaaccaaagactgatcttagaatatagagtagagagacatgtttgttattctccactagtgactttagtattttgttatgtgatgttttttaggtgcaccttttctcatgactccttttactttatctaatgtcttcctctttaaagtgtgacccagagaccagtagcatcagcatcacctgagacctgtgaacactgaagctccagctcagacatgttggggaccattttaataagatacctagctgattttttgcacagcaaactttgaaaacccctggtctaaggggtagtatttgtatcacttatggaatataatctcagggaaattaaatctgctcaattgaca

SEQ ID NO: 150689 - DNA, 1183 bp, Homo sapiens
  Payload ID: 9759
  Gene Symbol: MFSD9
  Gene Name: major facilitator superfamily domain containing 9
  ENST ID: ENST00000411991
  CDS Start-End: 69-347
ggggcggggctgggctcccggggtaggtccgcggctgctgctgcgtccgacccccggccggcgcgggtatggagcttgggggtcactgggacatgaactcggccccgaggctggtctcggagaccgcagagcggaaacaggagcagaagacaggaaccgaggcggaggctgccgactccggtgccgtcggagcccgccgcttcctgctctgtctctacttggtgggcttcttggatttgtttggtgtcagcatggttgtgcctttattgagccttcatgtcaagtcccttggagcaagtccaacagttgctggaatagtagacgacgtatgttcaaagagattttgagatttgagcactataaccaagtcccatgccactagtggcaacaggtacttatggagcctctgcaaggagctggctgtgtgtataaaagggctcctcctatggcattttgcaactcttttctagcacattggtgggctgctggagcgatgtagtgggaagacggtcttccttgctggcatgcattctactcagtgctctgggctatctccttctcggagcagccaccaatgtgtttctgtttgtcctggctagagtcccggcagggctctactttctgatgtggttccagagaaggaacggccgcttgtaatcggacacttcaacacagcctccggtgtgggcttcatcttgggccccgtggtcggtggctatctcactgaattagaggatgggttttatctcacagccttcatctgctttttggtcttcattctcaatgctggtctcgtttggttctttccatggagggaagcaaaaccgggcagtacagagaagggcctgccattgcgaaagacccatgtgctgttgggaaggagccatgacacagtgcaggaggcagccaccagccgcagagccagggccagcaagaagactgcccagccctgggtcgaagtagtgttggccttgcggaacatgaagaacctgctgttttccgaaatgtgggacatatttctggtgcgcttgctgatggccatggcagtcatgctgtactacagtaactttgtcctggccctggaggagcgctttggggtgcggcccaaggtgacaggctacctcatcagttacagcagcatgctgggggccgtggccggccttgccctggggccaatcctacg

SEQ ID NO: 150690 - DNA, 548 bp, Homo sapiens
  Payload ID: 9759
  Gene Symbol: MFSD9
  Gene Name: major facilitator superfamily domain containing 9
  ENST ID: ENST00000421966
  CDS Start-End: 79-279
gcttccgctcggggcggggctgggctcccggggtaggtccgcggctgctgctgcgtccgacccccggccggcgcgggtatggagcttgggggtcactgggacatgaactcggccccgaggctggtctcggagaccgcagagcggaaacaggagcagaagacaggaaccgaggcggaggctgccgactccggtgccgtcggagcccgccgcttcctgctctgtctctacttggtgggcttcttggtgagtgcgagcgtgggggctgggagcaagtgctgactgtgttcgggcctggggacccaggcggttcttggagcttccggggagctcccagggagtgggaacccgcagtccgcctggatttgtttggtgtcagcatggttgtgcctttattgagccttcatgtcaagtcccttggagcaagtccaacagttgctggaatagtaggctcctcctatggcattttgcaactcttttctagcacattggtgggctgctggagcgatgtagtgggaagacggtcttccttgctggcatgcattctactc

SEQ ID NO: 150691 - DNA, 2990 bp, Homo sapiens
  Payload ID: 9759
  Gene Symbol: MFSD9
  Gene Name: major facilitator superfamily domain containing 9
  ENST ID: ENST00000438943
  CDS Start-End: 69-347
ggggcggggctgggctcccggggtaggtccgcggctgctgctgcgtccgacccccggccggcgcgggtatggagcttgggggtcactgggacatgaactcggccccgaggctggtctcggagaccgcagagcggaaacaggagcagaagacaggaaccgaggcggaggctgccgactccggtgccgtcggagcccgccgcttcctgctctgtctctacttggtgggcttcttggatttgtttggtgtcagcatggttgtgcctttattgagccttcatgtcaagtcccttggagcaagtccaacagttgctggaatagtagacgacgtatgttcaaagagattttgagatttgagcactataaccaagtcccatgccactagtggcaacaggtacttatggagcctctgcaaggagctggctgtgtgtataaaagggctcctcctatggcattttgcaactcttttctagcacattggtgggctgctggagcgatgtagtgggaagacggtcttccttgctggcatgcattctactcagtgctctgggctatctccttctcggagcagccaccaatgtgtttctgtttgtcctggctagagtcccggcaggtatttttaaacacactctctccatctcaagggctctactttctgatgtggttccagagaaggaacggccgcttgtaatcggacacttcaacacagcctccggtgtgggcttcatcttgggccccgtggtcggtggctatctcactgaattagaggatgggttttatctcacagccttcatctgctttttggtcttcattctcaatgctggtctcgtttggttctttccatggagggaagcaaaaccgggcagtacagagaagggcctgccattgcgaaagacccatgtgctgttgggaaggagccatgacacagtgcaggaggcagccaccagccgcagagccagggccagcaagaagactgcccagccctgggtcgaagtagtgttggccttgcggaacatgaagaacctgctgttttccgaaatgtgggacatatttctggtgcgcttgctgatggccatggcagtcatgctgtactacagtaactttgtcctggccctggaggagcgctttggggtgcggcccaaggtgacaggctacctcatcagttacagcagcatgctgggggccgtggccggccttgccctggggccaatcctacggctgtacaagcacaactcgcaggcactgctgctgcattccagcatactcacctgcacactgctgctgctctactccttggcccccaccatgggtgcagttgtcctctcctccactctcctgtccttctccactgccattggcaggacgtgcatcacggacctccagctgactgtgggcggggcccaggccagcggcacccttattggcgtggggcagtctgtgactgcagtgggccgcatcatcgcccctctcctctcgggggttgcccaggaggtcagcccttgcggcccccccagcctgggcgctgtgttagccttagtggccattttcataatgtctctaaacaagcgacactctagtggtgatgggaatagtaaattaaaaagtgagtagatggatttggacaacataaagcaacaaaatttgagatggttgaatgagggccggaggccatgatgaaaagggcactttggaaagggttggggtggaagggaaatatttccgggtgggtgtgagctgttgggcttccaggtcagctcttggccatgcagccatgcctgcaggatgatcagaagtcacggcacctcatgggaaggttaagactggagcaaagcttttccaaggtgagcatattcagcgtttacctggaagtctcttcttcccacctgggctaatcaggttacaattttcaagggtaaacaaactaccagctacaggatagggaagtggtggtggaataagagaacatgatacctggaggaagggaagaaaccacaagcattttcctactgaaaaatagggtgacatgtcagtcaaattctgatcaactggaacttgagtttccagttaaattccatacactaggagggagttttctatcaaaatcctgcagattgaagaagctggtttattagaaccagcctgtcgcttttcaaagctgcttaaaaataagatactgacctcacccctagagatgattcagtgggcctgggtggggccaagaaatccgtggtgttttgtaagcactgctggcgatttctcatggcagtaaagaccacactgagactgcactgattttgattaaagtacataggcttggctgtttttacacagctaactaaatttggactcttaaaattgtgtttgtaatcacagtgtgttacacctttcccagctctcagcagttgtactgcatgatggagcagcgggcccctgggacctgttccctgtgctccctgcctctgagagcccagcttgctctgaagttggactaaaccacttagatgctggggttgccacagcctgctcctggaagcctgcattccagtcaggttgcatccttctggtgctgacagaacccagtggtgaagccaaagcacaggaatgctttaaaaatgaacagtttatgcagaataagggtcaggagtcatgccagaccagaacttgatgctactgtgtcttgtgttaagaatcatttcctggccaggctcggtggctcaggcctgtaatcccagcactttgggaggctgaggcaggtgaatcacttggtcaggagatggagaccattctggctaacatggtgaaaccccgtctctactaaaaatacaaaaaaaaaattagccgggcgtgatggcgggcgcctgcagtcccagctattcgggaggctgaggtagaatggcgtgaacctgggaggcggagcttgcggtgagccaagattgtgccactgctctccagcctgggcgacagagtgagactccgtctcaaaaaaaaaagaa

SEQ ID NO: 150692 - DNA, 576 bp, Homo sapiens
  Payload ID: 9759
  Gene Symbol: MFSD9
  Gene Name: major facilitator superfamily domain containing 9
  ENST ID: ENST00000428085
  CDS Start-End: 1-240
acagttgctggaatagtaggctcctcctatggcattttgcaactcttttctagcacattggtgggctgctggagcgatgtagtgggaagacggtcttccttgctggcatgcattctactcagtgctctgggctatctccttctcggagcagccaccaatgtgtttctgtttgtcctggctagagtcccggcagggctctactttctgatgtggttccagagaaggaacggccgcttgtaatcggacacttcaacacagcctccggtgtgggcttcatcttgggccccgtggtcggtggctatctcactgaattagaggatgggttttatctcacagccttcatctgctttttggtcttcattctcaatgctggtctcgtttggttctttccatggagggaagcaaaaccgggcagtacagagaagggcctgccattgcgaaagacccatgtgctgttgggaaggagccatgacacagtgcaggaggcagccaccagccgcagagccagggccagcaagaagactgcccagccctgggtcgaagtagtgttggccttgcggaacatgaagaacctgc

SEQ ID NO: 150693 - DNA, 2440 bp, Homo sapiens
  Payload ID: 9759
  Gene Symbol: MFSD9
  Gene Name: major facilitator superfamily domain containing 9
  ENST ID: ENST00000437075
  CDS Start-End: 69-365
ggggcggggctgggctcccggggtaggtccgcggctgctgctgcgtccgacccccggccggcgcgggtatggagcttgggggtcactgggacatgaactcggccccgaggctggtctcggagaccgcagagcggaaacaggagcagaagacaggaaccgaggcggaggctgccgactccggtgccgtcggagcccgccgcttcctgctctgtctctacttggtgggcttcttgcatggttgtgcctttattgagccttcatgtcaagtcccttggagcaagtccaacagttgctggaatagtagacgacgtatgttcaaagagattttgagatttgagcactataaccaagtcccatgccactagtggcaacaggtacttatggagcctctgcaaggagctggctgtgtgtataaaagggctcctcctatggcattttgcaactcttttctagcacattggtgggctgctggagcgatgtagtgggaagacggtcttccttgctggcatgcattctactcagtgctctgggctatctccttctcggagcagccaccaatgtgtttctgtttgtcctggctagagtcccggcaggtatttttaaacacactctctccatctcaagggctctactttctgatgtggttccagagaaggaacggccgcttgtaatcggacacttcaacacagcctccggtgtgggcttcatcttgggccccgtggtcggtggctatctcactgaattagaggatgggttttatctcacagccttcatctgctttttggtcttcattctcaatgctggtctcgtttggttctttccatggagggaagcaaaaccgggcagtacagagaagggcctgccattgcgaaagacccatgtgctgttgggaaggagccatgacacagtgcaggaggcagccaccagccgcagagccagggccagcaagaagactgcccagccctgggtcgaagtagtgttggccttgcggaacatgaagaacctgctgttttccgaaatgtgggacatatttctggtgcgcttgctgatggccatggcagtcatgctgtactacagtaactttgtcctggccctggaggagcgctttggggtgcggcccaaggtgacaggctacctcatcagttacagcagcatgctgggggccgtggccggccttgccctggggccaatcctacggctgtacaagcacaactcgcaggcactgctgctgcattccagcatactcacctgcacactgctgctgctctactccttggcccccaccatgggtgcagttgtcctctcctccactctcctgtccttctccactgccattggcaggacgtgcatcacggacctccagctgactgtgggcggggcccaggccagcggcacccttattggcgtggggcagtctgtgactgcagtgggccgcatcatcgcccctctcctctcgggggttgcccaggaggtcagcccttgcggcccccccagcctgggcgctgtgttagccttagtggccattttcataatgtctctaaacaagcgacactctagtggtgatgggaatagtaaattaaaaagtgagtagatggatttggacaacataaagcaacaaaatttgagatggttgaatgagggccggaggccatgatgaaaagggcactttggaaagggttggggtggaagggaaatatttccgggtgggtgtgagctgttgggcttccaggtcagctcttggccatgcagccatgcctgcaggatgatcagaagtcacggcacctcatgggaaggttaagactggagcaaagcttttccaaggtgagcatattcagcgtttacctggaagtctcttcttcccacctgggctaatcaggttacaattttcaagggtaaacaaactaccagctacaggatagggaagtggtggtggaataagagaacatgatacctggaggaagggaagaaaccacaagcattttcctactgaaaaatagggtgacatgtcagtcaaattctgatcaactggaacttgagtttccagttaaattccatacactaggagggagttttctatcaaaatcctgcagattgaagaagctggtttattagaaccagcctgtcgcttttcaaagctgcttaaaaataagatactgacctcacccctagagatgattcagtgggcctgggtggggccaagaaatccgtggtgttttgtaagcactgctggcgatttctcatggcagtaaagaccacactgagactgcactgattttgattaaagtacataggcttggctgtttttacacagctaactaaatttggactcttaaaattgtgtttgtaatcacagtgtgttacacctttcccagctctcagcagttgtactgcatgatggagcagcgggcccctgggacctgttccctgtgctccctgcctc

SEQ ID NO: 150694 - DNA, 1334 bp, Homo sapiens
  Payload ID: 9760
  Gene Symbol: HLA-A
  Gene Name: major histocompatibility complex, class I, A
  ENST ID: ENST00000376802
  CDS Start-End: 6-905
cgaggatggccgtcatggcgccccgaaccctcctcctgctactctcgggggccctggccctgacccagacctgggcgggctcccactccatgaggtatttcttcacatccgtgtcccggcccggccgcggggagccccgcttcatcgccgtgggctacgtggacgacacgcagttcgtgcggttcgacagcgacgccgcgagccagaggatggagccgcgggcgccgtggatagagcaggaggggccggagtattgggaccaggagacacggaatgtgaaggcccagtcacagactgaccgagtggacctggggaccctgcgcggctactacaaccagagcgaggccggttctcacaccatccagataatgtatggctgcgacgtggggtcggacgggcgcttcctccgcgggtaccggcaggacgcctacgacggcaaggattacatcgccctgaacgaggacctgcgctcttggaccgcggcggacatggcggctcagatcaccaagcgcaagtgggaggcggcccatgaggcggagcagttgagagcctacctggatggcacgtgcgtggagtggctccgcagatacctggagaacgggaaggagacgctgcagcgcacggacccccccaagacacatatgacccaccaccccatctctgaccatgaggccaccctgaggtgctgggccctgggcttctaccctgcggagatcacactgacctggcagcgggatggggaggaccagacccaggacacggagctcgtggagaccaggcctgcaggggatggaaccttccagaagtgggcggctgtggtggtgccttctggagaggagcagagatacacctgccatgtgcagcatgagggtctgcccaagcccctcaccctgagatgggtgtgagacagctgccttgtgtgggactgagaggcaagagttgttcctgcccttccctttgtgacttgaagaaccctgactttgtttctgcaaaggcacctgcatgtgtctgtgttcgtgtaggcataatgtgaggaggtggggagaccaccccacccccatgtccaccatgaccctcttcccacgctgacctgtgctccctccccaatcatctttcctgttccagagaggtggggctgaggtgtctccatctctgtctcaacttcatggtgcactgagctgtaacttcttccttccctattaaaattagaaccttagtataaatttactttctcaaattcttgccatgagaggttgatgagttaattaaaggagaagattcctaaaatttgagagacaaaataaatggaagacatgagaaccttccagagtcca

SEQ ID NO: 150695 - DNA, 1854 bp, Homo sapiens
  Payload ID: 9760
  Gene Symbol: HLA-A
  Gene Name: major histocompatibility complex, class I, A
  ENST ID: ENST00000376806
  CDS Start-End: 310-1425
cgcttcgcacaggagcagaggggtcagggcgaagtcccagggccccaggcgtggctctcagagtctcaggccccgaaggcggtgtatggattggggagtcccagccttggggattccccaactccgcagtttcttttctccctctcccaacctacgtagggtccttcatcctggatactcacgacgcggacccagttctcactcccattgggtgtcgggtttccagagaagccaatcagtgtcgtcgcggtcgctgttctaaagcccgcacgcacccaccgggactcagattctccccagacgccgaggatggccgtcatggcgccccgaaccctcctcctgctactctcgggggccctggccctgacccagacctgggcgggctcccactccatgaggtatttcttcacatccgtgtcccggcccggccgcggggagccccgcttcatcgccgtgggctacgtggacgacacgcagttcgtgcggttcgacagcgacgccgcgagccagaggatggagccgcgggcgccgtggatagagcaggaggggccggagtattgggaccaggagacacggaatgtgaaggcccagtcacagactgaccgagtggacctggggaccctgcgcggctactacaaccagagcgaggccggttctcacaccatccagataatgtatggctgcgacgtggggtcggacgggcgcttcctccgcgggtaccggcaggacgcctacgacggcaaggattacatcgccctgaacgaggacctgcgctcttggaccgcggcggacatggcggctcagatcaccaagcgcaagtgggaggcggcccatgaggcggagcagttgagagcctacctggatggcacgtgcgtggagtggctccgcagatacctggagaacgggaaggagacgctgcagcgcacggacccccccaagacacatatgacccaccaccccatctctgaccatgaggccaccctgaggtgctgggccctgggcttctaccctgcggagatcacactgacctggcagcgggatggggaggaccagacccaggacacggagctcgtggagaccaggcctgcaggggatggaaccttccagaagtgggcggctgtggtggtgccttctggagaggagcagagatacacctgccatgtgcagcatgagggtctgcccaagcccctcaccctgagatgggagctgtcttcccagcccaccatccccatcgtgggcatcattgctggcctggttctccttggagctgtgatcactggagctgtggtcgctgccgtgatgtggaggaggaagagctcaggtggagaaggggtgaaggatagaaaaggagggagttacactcaggctgcaagcagtgacagtgcccagggctctgatgtgtccctcacagcttgtaaagtgtgagacagctgccttgtgtgggactgagaggcaagagttgttcctgcccttccctttgtgacttgaagaaccctgactttgtttctgcaaaggcacctgcatgtgtctgtgttcgtgtaggcataatgtgaggaggtggggagaccaccccacccccatgtccaccatgaccctcttcccacgctgacctgtgctccctccccaatcatctttcctgttccagagaggtggggctgaggtgtctccatctctgtctcaacttcatggtgcactgagctgtaacttcttccttccctattaaaattagaaccttagtataaatttactttctcaaattcttgccatgagaggttgatgagttaattaaaggagaagattcctaaaatttgagagacaaaataaatggaagacatgagaaccttccagagtcca

SEQ ID NO: 150696 - DNA, 1611 bp, Homo sapiens
  Payload ID: 9760
  Gene Symbol: HLA-A
  Gene Name: major histocompatibility complex, class I, A
  Uniprot ID: P04439
  ENST ID: ENST00000376809
  CDS Start-End: 85-1182
gagaagccaatcagtgtcgtcgcggtcgctgttctaaagcccgcacgcacccaccgggactcagattctccccagacgccgaggatggccgtcatggcgccccgaaccctcctcctgctactctcgggggccctggccctgacccagacctgggcgggctcccactccatgaggtatttcttcacatccgtgtcccggcccggccgcggggagccccgcttcatcgccgtgggctacgtggacgacacgcagttcgtgcggttcgacagcgacgccgcgagccagaggatggagccgcgggcgccgtggatagagcaggaggggccggagtattgggaccaggagacacggaatgtgaaggcccagtcacagactgaccgagtggacctggggaccctgcgcggctactacaaccagagcgaggccggttctcacaccatccagataatgtatggctgcgacgtggggtcggacgggcgcttcctccgcgggtaccggcaggacgcctacgacggcaaggattacatcgccctgaacgaggacctgcgctcttggaccgcggcggacatggcggctcagatcaccaagcgcaagtgggaggcggcccatgaggcggagcagttgagagcctacctggatggcacgtgcgtggagtggctccgcagatacctggagaacgggaaggagacgctgcagcgcacggacccccccaagacacatatgacccaccaccccatctctgaccatgaggccaccctgaggtgctgggccctgggcttctaccctgcggagatcacactgacctggcagcgggatggggaggaccagacccaggacacggagctcgtggagaccaggcctgcaggggatggaaccttccagaagtgggcggctgtggtggtgccttctggagaggagcagagatacacctgccatgtgcagcatgagggtctgcccaagcccctcaccctgagatgggagctgtcttcccagcccaccatccccatcgtgggcatcattgctggcctggttctccttggagctgtgatcactggagctgtggtcgctgccgtgatgtggaggaggaagagctcagatagaaaaggagggagttacactcaggctgcaagcagtgacagtgcccagggctctgatgtgtccctcacagcttgtaaagtgtgagacagctgccttgtgtgggactgagaggcaagagttgttcctgcccttccctttgtgacttgaagaaccctgactttgtttctgcaaaggcacctgcatgtgtctgtgttcgtgtaggcataatgtgaggaggtggggagaccaccccacccccatgtccaccatgaccctcttcccacgctgacctgtgctccctccccaatcatctttcctgttccagagaggtggggctgaggtgtctccatctctgtctcaacttcatggtgcactgagctgtaacttcttccttccctattaaaattagaaccttagtataaatttactttctcaaattcttgccatgagaggttgatgagttaattaaaggagaagattcctaaaatttgagagacaaaataaatggaagacatgagaaccttccagagtcca

SEQ ID NO: 150697 - DNA, 1334 bp, Homo sapiens
  Payload ID: 9760
  Gene Symbol: HLA-A
  Gene Name: major histocompatibility complex, class I, A
  ENST ID: ENST00000376822
  CDS Start-End: 6-905
cgaggatggccgtcatggcgccccgaaccctcgtcctgctactctcgggggccctggccctgacccagacctgggcgggctcccactccatgaggtatttctacacctccgtgtcccggcccggccgcggggagccccgcttcatcgccgtgggctacgtggacgacacgcagttcgtgcggttcgacagcgacgccgcgagccagaggatggagccgcgggcgccgtggatagagcaggaggggccggagtattgggaccggaacacacggaatgtgaaggcccactcacagactgaccgagcgaacctggggaccctgcgcggctactacaaccagagcgaggacggttctcacaccatccagaggatgtatggctgcgacgtggggccggacgggcgcttcctccgcgggtaccagcaggacgcttacgacggcaaggattacatcgccctgaacgaggacctgcgctcttggaccgcggcggacatggcggctcagatcacccagcgcaagtgggagacggcccatgaggcggagcagtggagagcctacctggagggccggtgcgtggagtggctccgcagatacctggagaacgggaaggagacgctgcagcgcacggacgcccccaagacgcatatgactcaccacgctgtctctgaccatgaggccaccctgaggtgctgggccctgagcttctaccctgcggagatcacactgacctggcagcgggatggggaggaccagacccaggacacggagctcgtggagaccaggcctgcaggggatgggaccttccagaagtgggcgtctgtggtggtgccttctggacaggagcagagatacacctgccatgtgcagcatgagggtctgcccaagcccctcaccctgagatgggtgtgagacagctgccttgtgtgggactgagaggcaagatttgttcctgcccttccctttgtgacttgaagaaccctgactttgtttctgcaaaggcacctgcatgtgtctgtgttcttgtaggcataatgtgaggaggtggggagaccaccccacccccatgtccaccatgaccctcttcccacgctgacctgtgctccctccccaatcatctttcctgttccagagaggtggggctgaggtgtctccatctctgcctcaacttcatggtgcactgagctgtaactttttccttccctattaaaattagaacctgagtataaatttactttctcaaattcttgccatgagaggttgatgagttaattaaaggagaagattcctaaaatttgagagacaaaataaatggaacacatgagaaccttccagagtcca

SEQ ID NO: 150698 - DNA, 1868 bp, Homo sapiens
  Payload ID: 9760
  Gene Symbol: HLA-A
  Gene Name: major histocompatibility complex, class I, A
  Uniprot ID: P18462
  ENST ID: ENST00000383605
  CDS Start-End: 342-1439
aaggggagaggagggcctgaaggatgagaaggacggagggaagggctggagaagcaggaggcgcaactcttcccgattaaaaacaaaaacaacaacaacaaaaatctacacctccattcccagagcaagcttactctctggcaccaaactccatgggatgatttttcttctagaagagtccaggtggacagggtccttcttcctggatactcacgacgcggacccagttctcactcccattgggtgtcgggtttccagagaagccaatcagtgtcgtcgcggtcgcggttctaaagtccgcacgcacccaccgggactcagattctccccagacgccgaggatggccgtcatggcgccccgaaccctcgtcctgctactctcgggggccctggccctgacccagacctgggcgggctcccactccatgaggtatttctacacctccgtgtcccggcccggccgcggggagccccgcttcatcgccgtgggctacgtggacgacacgcagttcgtgcggttcgacagcgacgccgcgagccagaggatggagccgcgggcgccgtggatagagcaggaggggccggagtattgggaccggaacacacggaatgtgaaggcccactcacagactgaccgagcgaacctggggaccctgcgcggctactacaaccagagcgaggacggttctcacaccatccagaggatgtatggctgcgacgtggggccggacgggcgcttcctccgcgggtaccagcaggacgcttacgacggcaaggattacatcgccctgaacgaggacctgcgctcttggaccgcggcggacatggcggctcagatcacccagcgcaagtgggagacggcccatgaggcggagcagtggagagcctacctggagggccggtgcgtggagtggctccgcagatacctggagaacgggaaggagacgctgcagcgcacggacgcccccaagacgcatatgactcaccacgctgtctctgaccatgaggccaccctgaggtgctgggccctgagcttctaccctgcggagatcacactgacctggcagcgggatggggaggaccagacccaggacacggagctcgtggagaccaggcctgcaggggatgggaccttccagaagtgggcgtctgtggtggtgccttctggacaggagcagagatacacctgccatgtgcagcatgagggtctgcccaagcccctcaccctgagatgggagccgtcttcccagcccaccatccccatcgtgggcatcattgctggcctggttctctttggagctgtgatcgctggagctgtggtcgctgctgtgatgtggaggaggaagagctcagatagaaaaggagggagctactctcaggctgcaagcagtgacagtgcccagggctctgatatgtctctcacagcttgtaaagtgtgagacagctgccttgtgtgggactgagaggcaagatttgttcctgcccttccctttgtgacttgaagaaccctgactttgtttctgcaaaggcacctgcatgtgtctgtgttcttgtaggcataatgtgaggaggtggggagaccaccccacccccatgtccaccatgaccctcttcccacgctgacctgtgctccctccccaatcatctttcctgttccagagaggtggggctgaggtgtctccatctctgcctcaacttcatggtgcactgagctgtaactttttccttccctattaaaattagaacctgagtataaatttactttctcaaattcttgccatgagaggttgatgagttaattaaaggagaagattcctaaaatttgagagacaaaataaatggaacacatgagaaccttccagagtcca

SEQ ID NO: 150699 - DNA, 1854 bp, Homo sapiens
  Payload ID: 9760
  Gene Symbol: HLA-A
  Gene Name: major histocompatibility complex, class I, A
  ENST ID: ENST00000383619
  CDS Start-End: 310-1425
cgcttggcacaggagcagaggggtcagggcgaagtcccagggccccaggcgtggctctcagggtctcaggccccgaaggcggtatatggattggggagtcccagccttggggattccccaactccgcagtttcttttctccctctcccaacctatgtagggtccttcttcctggatactcacgacgcggacccagttctcactcccattgggtgtcgggtttccagagaagccaatcagtgtcgtcgcggtcgcggttctaaagtccgcacgcacccaccgggactcagattctccccagacgccgaggatggccgtcatggcgccccgaaccctcgtcctgctactctcgggggccctggccctgacccagacctgggcgggctcccactccatgaggtatttctacacctccgtgtcccggcccggccgcggggagccccgcttcatcgccgtgggctacgtggacgacacgcagttcgtgcggttcgacagcgacgccgcgagccagaggatggagccgcgggcgccgtggatagagcaggaggggccggagtattgggaccggaacacacggaatgtgaaggcccactcacagactgaccgagcgaacctggggaccctgcgcggctactacaaccagagcgaggacggttctcacaccatccagaggatgtatggctgcgacgtggggccggacgggcgcttcctccgcgggtaccagcaggacgcttacgacggcaaggattacatcgccctgaacgaggacctgcgctcttggaccgcggcggacatggcggctcagatcacccagcgcaagtgggagacggcccatgaggcggagcagtggagagcctacctggagggccggtgcgtggagtggctccgcagatacctggagaacgggaaggagacgctgcagcgcacggacgcccccaagacgcatatgactcaccacgctgtctctgaccatgaggccaccctgaggtgctgggccctgagcttctaccctgcggagatcacactgacctggcagcgggatggggaggaccagacccaggacacggagctcgtggagaccaggcctgcaggggatgggaccttccagaagtgggcgtctgtggtggtgccttctggacaggagcagagatacacctgccatgtgcagcatgagggtctgcccaagcccctcaccctgagatgggagccgtcttcccagcccaccatccccatcgtgggcatcattgctggcctggttctctttggagctgtgatcgctggagctgtggtcgctgctgtgatgtggaggaggaagagctcaggtggggaagggatgaaggatagaaaaggagggagctactctcaggctgcaagcagtgacagtgcccagggctctgatatgtctctcacagcttgtaaagtgtgagacagctgccttgtgtgggactgagaggcaagatttgttcctgcccttccctttgtgacttgaagaaccctgactttgtttctgcaaaggcacctgcatgtgtctgtgttcttgtaggcataatgtgaggaggtggggagaccaccccacccccatgtccaccatgaccctcttcccacgctgacctgtgctccctccccaatcatctttcctgttccagagaggtggggctgaggtgtctccatctctgcctcaacttcatggtgcactgagctgtaactttttccttccctattaaaattagaacctgagtataaatttactttctcaaattcttgccatgagaggttgatgagttaattaaaggagaagattcctaaaatttgagagacaaaataaatggaacacatgagaaccttccagagtcca

SEQ ID NO: 150700 - DNA, 1868 bp, Homo sapiens
  Payload ID: 9760
  Gene Symbol: HLA-A
  Gene Name: major histocompatibility complex, class I, A
  Uniprot ID: P04439
  ENST ID: ENST00000396634
  CDS Start-End: 342-1439
aaggggagaggagggcctgaaggatgagaaggatggagggaagggctggagaagcaggaggcacaacttttccggattaaaaacaaaaacaacaacaacaaaaatctacacctccattcccagatcaagcttactctctggcaccaaactccatggggtgatttttcttctagaagagtccaggtggacagggtccttcatcctggatactcacgacgcggacccagttctcactcccattgggtgtcgggtttccagagaagccaatcagtgtcgtcgcggtcgctgttctaaagcccgcacgcacccaccgggactcagattctccccagacgccgaggatggccgtcatggcgccccgaaccctcctcctgctactctcgggggccctggccctgacccagacctgggcgggctcccactccatgaggtatttcttcacatccgtgtcccggcccggccgcggggagccccgcttcatcgccgtgggctacgtggacgacacgcagttcgtgcggttcgacagcgacgccgcgagccagaggatggagccgcgggcgccgtggatagagcaggaggggccggagtattgggaccaggagacacggaatgtgaaggcccagtcacagactgaccgagtggacctggggaccctgcgcggctactacaaccagagcgaggccggttctcacaccatccagataatgtatggctgcgacgtggggtcggacgggcgcttcctccgcgggtaccggcaggacgcctacgacggcaaggattacatcgccctgaacgaggacctgcgctcttggaccgcggcggacatggcggctcagatcaccaagcgcaagtgggaggcggcccatgaggcggagcagttgagagcctacctggatggcacgtgcgtggagtggctccgcagatacctggagaacgggaaggagacgctgcagcgcacggacccccccaagacacatatgacccaccaccccatctctgaccatgaggccaccctgaggtgctgggccctgggcttctaccctgcggagatcacactgacctggcagcgggatggggaggaccagacccaggacacggagctcgtggagaccaggcctgcaggggatggaaccttccagaagtgggcggctgtggtggtgccttctggagaggagcagagatacacctgccatgtgcagcatgagggtctgcccaagcccctcaccctgagatgggagctgtcttcccagcccaccatccccatcgtgggcatcattgctggcctggttctccttggagctgtgatcactggagctgtggtcgctgccgtgatgtggaggaggaagagctcagatagaaaaggagggagttacactcaggctgcaagcagtgacagtgcccagggctctgatgtgtccctcacagcttgtaaagtgtgagacagctgccttgtgtgggactgagaggcaagagttgttcctgcccttccctttgtgacttgaagaaccctgactttgtttctgcaaaggcacctgcatgtgtctgtgttcgtgtaggcataatgtgaggaggtggggagaccaccccacccccatgtccaccatgaccctcttcccacgctgacctgtgctccctccccaatcatctttcctgttccagagaggtggggctgaggtgtctccatctctgtctcaacttcatggtgcactgagctgtaacttcttccttccctattaaaattagaaccttagtataaatttactttctcaaattcttgccatgagaggttgatgagttaattaaaggagaagattcctaaaatttgagagacaaaataaatggaagacatgagaaccttccagagtcca

SEQ ID NO: 150701 - DNA, 1854 bp, Homo sapiens
  Payload ID: 9760
  Gene Symbol: HLA-A
  Gene Name: major histocompatibility complex, class I, A
  ENST ID: ENST00000438861
  CDS Start-End: 310-1425
cgcttggcacagaagcagaggggtcagggcgaagtcccagggccccaggcgtggctctcagggtctcaggccccgaaggcggtgtatggattggggagtcccagccttggggattccccaactccgcagtttcttttctccctctcccaacctatgtagggtccttcttcctggatactcacgacgcggacccagttctcactcccattgggtgtcgggtttccagagaagccaatcagtgtcgtcgcggtcgcggttctaaagtccgcacgcacccaccgggactcagattctccccagacgccgaggatggccgtcatggcgccccgaaccctcgtcctgctactctcgggggctctggccctgacccagacctgggcgggctctcactccatgaggtatttcttcacatccgtgtcccggcccggccgcggggagccccgcttcatcgcagtgggctacgtggacgacacgcagttcgtgcggttcgacagcgacgccgcgagccagaggatggagccgcgggcgccgtggatagagcaggagggtccggagtattgggacggggagacacggaaagtgaaggcccactcacagactcaccgagtggacctggggaccctgcgcggctactacaaccagagcgaggccggttctcacaccgtccagaggatgtatggctgcgacgtggggtcggactggcgcttcctccgcgggtaccaccagtacgcctacgacggcaaggattacatcgccctgaaagaggacctgcgctcttggaccgcggcggacatggcagctcagaccaccaagcacaagtgggaggcggcccatgtggcggagcagttgagagcctacctggagggcacgtgcgtggagtggctccgcagatacctggagaacgggaaggagacgctgcagcgcacggacgcccccaaaacgcatatgactcaccacgctgtctctgaccatgaagccaccctgaggtgctgggccctgagcttctaccctgcggagatcacactgacctggcagcgggatggggaggaccagacccaggacacggagctcgtggagaccaggcctgcaggggatggaaccttccagaagtgggcggctgtggtggtgccttctggacaggagcagagatacacctgccatgtgcagcatgagggtttgcccaagcccctcaccctgagatgggagccgtcttcccagcccaccatccccatcgtgggcatcattgctggcctggttctctttggagctgtgatcactggagctgtggtcgctgctgtgatgtggaggaggaagagctcaggtggggaaggggtgaaggatagaaaaggagggagctactctcaggctgcaagcagtgacagtgcccagggctctgatgtgtctctcacagcttgtaaagtgtgagacagctgccttgtgtgggactgagaggcaagagttgttcctgcccttccctttgtgacttgaagaaccctgactttgtttctgcaaaggcacctgcatgtgtctgtgttcgtgtaggcataatgtgaggaggtggggagaccaccccacccccatgtccaccatgaccctcttcccacgctgacctgtgctccctccccaatcatctttcctgttccagagaggtggggctgaggtgtctccatctctgtctcaacttcatggtgcactgagctgtaacttcttccttccctattaaaattagaacctgagtataaatttactttctcaaattcttgccatgagaggttgatgagttaattaaaggagaagattcctaaaatttgagagacaaaataaatggaacacatgagaaccttccagagtcca

SEQ ID NO: 150702 - DNA, 1854 bp, Homo sapiens
  Payload ID: 9760
  Gene Symbol: HLA-A
  Gene Name: major histocompatibility complex, class I, A
  ENST ID: ENST00000417978
  CDS Start-End: 310-1425
cgcttcgcacaggagcagaggggtcagggcgaagtcccagggccccaggcgtggctctcagggtctcaggccccgaaggcggtgtatggattggggagtcccagccttggggattccccaactccgcagtttcttttctccctctcccaacctacgtagggtccttcatcctggatactcacgacgcggacccagttctcactcccattgggtgtcgggtttccagagaagccaatcagtgtcgtcgcggtcgctgttctaaagtccgcacgcacccaccgggactcagattctccccagacgccgaggatggccgtcatggcgccccgaaccctcctcctgctactctcgggggccctggccctgacccagacctgggcgggctcccactccatgaggtatttcttcacatccgtgtcccggcccggccgcggggagccccgcttcatcgccgtgggctacgtggacgacacgcagttcgtgcggttcgacagcgacgccgcgagccagaagatggagccgcgggcgccgtggatagagcaggaggggccggagtattgggaccaggagacacggaatatgaaggcccactcacagactgaccgagcgaacctggggaccctgcgcggctactacaaccagagcgaggacggttctcacaccatccagataatgtatggctgcgacgtggggccggacgggcgcttcctccgcgggtaccggcaggacgcctacgacggcaaggattacatcgccctgaacgaggacctgcgctcttggaccgcggcggacatggcagctcagatcaccaagcgcaagtgggaggcggtccatgcggcggagcagcggagagtctacctggagggccggtgcgtggacgggctccgcagatacctggagaacgggaaggagacgctgcagcgcacggacccccccaagacacatatgacccaccaccccatctctgaccatgaggccaccctgaggtgctgggccctgggcttctaccctgcggagatcacactgacctggcagcgggatggggaggaccagacccaggacacggagctcgtggagaccaggcctgcaggggatggaaccttccagaagtgggcggctgtggtggtgccttctggagaggagcagagatacacctgccatgtgcagcatgagggtctgcccaagcccctcaccctgagatgggagctgtcttcccagcccaccatccccatcgtgggcatcattgctggcctggttctccttggagctgtgatcactggagctgtggtcgctgccgtgatgtggaggaggaagagctcaggtggagaaggggtgaaggatagaaaaggagggagttacactcaggctgcaagcagtgacagtgcccagggctctgatgtgtctctcacagcttgtaaagtgtgagacagctgccttgtgtgggactgagaggcaagagttgttcctgcccttccctttgtgacttgaagaaccctgactttgtttctgcaaaggcacctgcatgtgtctgtgttcgtgtaggcataatgtgaggaggtggggagagcaccccacccccatgtccaccatgaccctcttcccacgctgacctgtgctccctctccaatcatctttcctgttccagagaggtggggctgaggtgtctccatctctgtctcaacttcatggtgcactgagctgtaacttcttccttccctattaaaattagaacctgagtataaatttactttctcaaattcttgccatgagaggttgatgagttaattaaaggagaagattcctaaaatttgagagacaaaattaatggaacgcatgagaaccttccagagtcca

SEQ ID NO: 150703 - DNA, 1327 bp, Homo sapiens
  Payload ID: 9760
  Gene Symbol: HLA-A
  Gene Name: major histocompatibility complex, class I, A
  ENST ID: ENST00000413609
  CDS Start-End: 1-898
ggccgtcatggcgccccgaaccctcgtcctgctactctcgggggctctggccctgacccagacctgggcgggctctcactccatgaggtatttcttcacatccgtgtcccggcccggccgcggggagccccgcttcatcgcagtgggctacgtggacgacacgcagttcgtgcggttcgacagcgacgccgcgagccagaggatggagccgcgggcgccgtggatagagcaggagggtccggagtattgggacggggagacacggaaagtgaaggcccactcacagactcaccgagtggacctggggaccctgcgcggctactacaaccagagcgaggccggttctcacaccgtccagaggatgtatggctgcgacgtggggtcggactggcgcttcctccgcgggtaccaccagtacgcctacgacggcaaggattacatcgccctgaaagaggacctgcgctcttggaccgcggcggacatggcagctcagaccaccaagcacaagtgggaggcggcccatgtggcggagcagttgagagcctacctggagggcacgtgcgtggagtggctccgcagatacctggagaacgggaaggagacgctgcagcgcacggacgcccccaaaacgcatatgactcaccacgctgtctctgaccatgaagccaccctgaggtgctgggccctgagcttctaccctgcggagatcacactgacctggcagcgggatggggaggaccagacccaggacacggagctcgtggagaccaggcctgcaggggatggaaccttccagaagtgggcggctgtggtggtgccttctggacaggagcagagatacacctgccatgtgcagcatgagggtttgcccaagcccctcaccctgagatgggtgtgagacagctgccttgtgtgggactgagaggcaagagttgttcctgcccttccctttgtgacttgaagaaccctgactttgtttctgcaaaggcacctgcatgtgtctgtgttcgtgtaggcataatgtgaggaggtggggagaccaccccacccccatgtccaccatgaccctcttcccacgctgacctgtgctccctccccaatcatctttcctgttccagagaggtggggctgaggtgtctccatctctgtctcaacttcatggtgcactgagctgtaacttcttccttccctattaaaattagaacctgagtataaatttactttctcaaattcttgccatgagaggttgatgagttaattaaaggagaagattcctaaaatttgagagacaaaataaatggaacacatgagaaccttccagagtcca

SEQ ID NO: 150704 - DNA, 1334 bp, Homo sapiens
  Payload ID: 9760
  Gene Symbol: HLA-A
  Gene Name: major histocompatibility complex, class I, A
  ENST ID: ENST00000450342
  CDS Start-End: 6-905
cgaggatggccgtcatggcgccccgaaccctcctcctgctactcttgggggccctggccctgacccagacctgggcgggctcccactccatgaggtatttcaccacatccgtgtcccggcccggccgcggggagccccgcttcatcgccgtgggctacgtggacgacacgcagttcgtgcggtttgacagcgacgccgcgagccagaggatggagccgcgggcaccgtggatagagcaggaggggccggagtattgggacctgcagacacggaatgtgaaggcccagtcacagactgaccgagcgaacctggggaccctgcgcggctactacaaccagagcgaggccggttctcacaccatccagatgatgtatggctgcgacgtggggtcggacgggcgcttcctccgcgggtaccggcaggacgcctacgacggcaaggattacatcgccttgaacgaggacctgcgctcttggaccgcggcggacatggcggctcagatcacccagcgcaagtgggaggcggcccgtgtggcggagcagttgagagcctacctggagggcacgtgcgtggagtggctccgcagatacctggagaacgggaaggagacgctgcagcgcacggacgcccccaagacgcatatgactcaccacgctgtctctgaccatgaggccaccctgaggtgctgggccctgagcttctaccctgcggagatcacactgacctggcagcgggatggggaggaccagacccaggacacggagcttgtggagaccaggcctgcaggggatggaaccttccagaagtgggcgtctgtggtggtgccttctggacaggagcagagatacacctgccatgtgcagcatgagggtctgcccaagcccctcaccctgagatgggtgtgagacagctgccttgtgtgggactgagaggcaagatttgttcctgcccttccctttgtgacttgaagaaccctgactttgtttctgcaaaggcacctgcatgtgtctgtgttcttgtaggcataatgtgaggaggtggggagaccaccccacccccatgtccaccatgaccctcttcccacgctgacctgtgctccctccccaatcatctttcctgttccagagaggtggggctgaggtgtctccatctctgcctcaacttcatggtgcactgagctgtaacttcttccttccctattaaaattagaacctgagtataaatttactttctcaaattcttgccatgagaggttgatgagttaattaaaggagaagattcctaaaatttgagagacaaaataaatggaacacatgagaaccttccagagtcca

SEQ ID NO: 150705 - DNA, 1334 bp, Homo sapiens
  Payload ID: 9760
  Gene Symbol: HLA-A
  Gene Name: major histocompatibility complex, class I, A
  ENST ID: ENST00000453975
  CDS Start-End: 6-905
cgaggatggccgtcatggcgccccgaaccctcgtcctgctactctcgggggctctggccctgacccagacctgggcgggctctcactccatgaggtatttcttcacatccgtgtcccggcccggccgcggggagccccgcttcatcgcagtgggctacgtggacgacacgcagttcgtgcggttcgacagcgacgccgcgagccagaggatggagccgcgggcgccgtggatagagcaggagggtccggagtattgggacggggagacacggaaagtgaaggcccactcacagactcaccgagtggacctggggaccctgcgcggctactacaaccagagcgaggccggttctcacaccgtccagaggatgtatggctgcgacgtggggtcggactggcgcttcctccgcgggtaccaccagtacgcctacgacggcaaggattacatcgccctgaaagaggacctgcgctcttggaccgcggcggacatggcagctcagaccaccaagcacaagtgggaggcggcccatgtggcggagcagttgagagcctacctggagggcacgtgcgtggagtggctccgcagatacctggagaacgggaaggagacgctgcagcgcacggacgcccccaaaacgcatatgactcaccacgctgtctctgaccatgaagccaccctgaggtgctgggccctgagcttctaccctgcggagatcacactgacctggcagcgggatggggaggaccagacccaggacacggagctcgtggagaccaggcctgcaggggatggaaccttccagaagtgggcggctgtggtggtgccttctggacaggagcagagatacacctgccatgtgcagcatgagggtttgcccaagcccctcaccctgagatgggtgtgagacagctgccttgtgtgggactgagaggcaagagttgttcctgcccttccctttgtgacttgaagaaccctgactttgtttctgcaaaggcacctgcatgtgtctgtgttcgtgtaggcataatgtgaggaggtggggagaccaccccacccccatgtccaccatgaccctcttcccacgctgacctgtgctccctccccaatcatctttcctgttccagagaggtggggctgaggtgtctccatctctgtctcaacttcatggtgcactgagctgtaacttcttccttccctattaaaattagaacctgagtataaatttactttctcaaattcttgccatgagaggttgatgagttaattaaaggagaagattcctaaaatttgagagacaaaataaatggaacacatgagaaccttccagagtcca

SEQ ID NO: 150706 - DNA, 1334 bp, Homo sapiens
  Payload ID: 9760
  Gene Symbol: HLA-A
  Gene Name: major histocompatibility complex, class I, A
  ENST ID: ENST00000414592
  CDS Start-End: 6-905
cgaggatggccgtcatggcgccccgaaccctcctcctgctactcttgggggccctggccctgacccagacctgggcgggctcccactccatgaggtatttcttcacatccgtgtcccggcccggccgcggggagccccgcttcatcgccgtgggctacgtggacgacacgcagttcgtgcggtttgacagcgacgccgcgagccagaggatggagccgcgggcgccgtggatagagcaggaggggccggagtattgggaccaggagacacggaatgtgaaggcccactcacagactgaccgagagagcctgcggatcgcgctccgctactacaaccagagcgaggccggttctcacaccatccagatgatgtatggctgcgacgtggggccggacgggcgcctcctccgcgggtaccagcaggacgcctacgacggcaaggattacatcgccttgaacgaggacctgcgctcttggaccgcggcggacatggcggctcagatcacccagcgcaagtgggaggcggcccgtgtggcggagcagttgagagcctacctggagggcacgtgcgtggagtggctccgcagatacctggagaacgggaaggagacgctgcagcgcacggacgcccccaagacgcatatgactcaccacgctgtctctgaccatgaggccaccctgaggtgctgggccctgagcttctaccctgcggagatcacactgacctggcagcgggatggggaggaccagacccaggacacggagcttgtggagaccaggcctgcaggggatggaaccttccagaagtgggcgtctgtggtggtgccttctggacaggagcagagatacacctgccatgtgcagcatgagggtctgcccaagcccctcaccctgagatgggtgtgagacagctgccttgtgtgggactgagaggcaagatttgttcctgcccttccctttgtgacttgaagaaccctgactttgtttctgcaaaggcacctgcatgtgtctgtgttcttgtaggcataatgtgaggaggtggggagaccaccccacccccatgtccaccatgaccctcttcccacgctgacctgtgctccctccccaatcatctttcctgttccagagaggtggggctgaggtgtctccatctctgcctcaacttcatggtgcactgagctgtaacttcttccttccctattaaaattagaacctgagtataaatttactttctcaaattcttgccatgagaggttgatgagttaattaaaggagaagattcctaaaatttgagagacaaaataaatggaacacatgagaaccttccagagtcca

SEQ ID NO: 150707 - DNA, 1334 bp, Homo sapiens
  Payload ID: 9760
  Gene Symbol: HLA-A
  Gene Name: major histocompatibility complex, class I, A
  ENST ID: ENST00000416096
  CDS Start-End: 6-905
cgaggatggccgtcatggcgccccgaaccctcctcctgctactctcgggggccctggccctgacccagacctgggcgggctcccactccatgaggtatttcttcacatccgtgtcccggcccggccgcggggagccccgcttcatcgccgtgggctacgtggacgacacgcagttcgtgcggttcgacagcgacgccgcgagccagaagatggagccgcgggcgccgtggatagagcaggaggggccggagtattgggaccaggagacacggaatatgaaggcccactcacagactgaccgagcgaacctggggaccctgcgcggctactacaaccagagcgaggacggttctcacaccatccagataatgtatggctgcgacgtggggccggacgggcgcttcctccgcgggtaccggcaggacgcctacgacggcaaggattacatcgccctgaacgaggacctgcgctcttggaccgcggcggacatggcagctcagatcaccaagcgcaagtgggaggcggtccatgcggcggagcagcggagagtctacctggagggccggtgcgtggacgggctccgcagatacctggagaacgggaaggagacgctgcagcgcacggacccccccaagacacatatgacccaccaccccatctctgaccatgaggccaccctgaggtgctgggccctgggcttctaccctgcggagatcacactgacctggcagcgggatggggaggaccagacccaggacacggagctcgtggagaccaggcctgcaggggatggaaccttccagaagtgggcggctgtggtggtgccttctggagaggagcagagatacacctgccatgtgcagcatgagggtctgcccaagcccctcaccctgagatgggtgtgagacagctgccttgtgtgggactgagaggcaagagttgttcctgcccttccctttgtgacttgaagaaccctgactttgtttctgcaaaggcacctgcatgtgtctgtgttcgtgtaggcataatgtgaggaggtggggagagcaccccacccccatgtccaccatgaccctcttcccacgctgacctgtgctccctctccaatcatctttcctgttccagagaggtggggctgaggtgtctccatctctgtctcaacttcatggtgcactgagctgtaacttcttccttccctattaaaattagaacctgagtataaatttactttctcaaattcttgccatgagaggttgatgagttaattaaaggagaagattcctaaaatttgagagacaaaattaatggaacgcatgagaaccttccagagtcca

SEQ ID NO: 150708 - DNA, 1334 bp, Homo sapiens; identical to SEQ ID NO: 150707
  Payload ID: 9760
  Gene Symbol: HLA-A
  Gene Name: major histocompatibility complex, class I, A
  ENST ID: ENST00000442939
  CDS Start-End: 6-905

SEQ ID NO: 150709 - DNA, 1854 bp, Homo sapiens; identical to SEQ ID NO: 150702
  Payload ID: 9760
  Gene Symbol: HLA-A
  Gene Name: major histocompatibility complex, class I, A
  ENST ID: ENST00000444289
  CDS Start-End: 310-1425

SEQ ID NO: 150710 - DNA, 1868 bp, Homo sapiens
  Payload ID: 9760
  Gene Symbol: HLA-A
  Gene Name: major histocompatibility complex, class I, A
  Uniprot ID: P01892
  ENST ID: ENST00000457879
  CDS Start-End: 342-1439
aaggggacaggagggcctgaaggatgagaaggacggagggaagggctggagaagcaggaggcgcaactcttcccgattaaaaacaaaaacaacaacaacaaaaatctacacctccattcccagagcaagcttactctctggcaccaaactccatgggatgatttttcttctagaagagtccaggtggacagggtccttcttcctggatactcacgacgcggacccagttctcactcccattgggtgtcgggtttccagagaagccaatcagtgtcgtcgcggtcgcggttctaaagtccgcacgcacccaccgggactcagattctccccagacgccgaggatggccgtcatggcgccccgaaccctcgtcctgctactctcgggggctctggccctgacccagacctgggcgggctctcactccatgaggtatttcttcacatccgtgtcccggcccggccgcggggagccccgcttcatcgcagtgggctacgtggacgacacgcagttcgtgcggttcgacagcgacgccgcgagccagaggatggagccgcgggcgccgtggatagagcaggagggtccggagtattgggacggggagacacggaaagtgaaggcccactcacagactcaccgagtggacctggggaccctgcgcggctactacaaccagagcgaggccggttctcacaccgtccagaggatgtatggctgcgacgtggggtcggactggcgcttcctccgcgggtaccaccagtacgcctacgacggcaaggattacatcgccctgaaagaggacctgcgctcttggaccgcggcggacatggcagctcagaccaccaagcacaagtgggaggcggcccatgtggcggagcagttgagagcctacctggagggcacgtgcgtggagtggctccgcagatacctggagaacgggaaggagacgctgcagcgcacggacgcccccaaaacgcatatgactcaccacgctgtctctgaccatgaagccaccctgaggtgctgggccctgagcttctaccctgcggagatcacactgacctggcagcgggatggggaggaccagacccaggacacggagctcgtggagaccaggcctgcaggggatggaaccttccagaagtgggcggctgtggtggtgccttctggacaggagcagagatacacctgccatgtgcagcatgagggtttgcccaagcccctcaccctgagatgggagccgtcttcccagcccaccatccccatcgtgggcatcattgctggcctggttctctttggagctgtgatcactggagctgtggtcgctgctgtgatgtggaggaggaagagctcagatagaaaaggagggagctactctcaggctgcaagcagtgacagtgcccagggctctgatgtgtctctcacagcttgtaaagtgtgagacagctgccttgtgtgggactgagaggcaagagttgttcctgcccttccctttgtgacttgaagaaccctgactttgtttctgcaaaggcacctgcatgtgtctgtgttcgtgtaggcataatgtgaggaggtggggagaccaccccacccccatgtccaccatgaccctcttcccacgctgacctgtgctccctccccaatcatctttcctgttccagagaggtggggctgaggtgtctccatctctgtctcaacttcatggtgcactgagctgtaacttcttccttccctattaaaattagaacctgagtataaatttactttctcaaattcttgccatgagaggttgatgagttaattaaaggagaagattcctaaaatttgagagacaaaataaatggaacacatgagaaccttccagagtcca

SEQ ID NO: 150711 - DNA, 1525 bp, Homo sapiens
  Payload ID: 9760
  Gene Symbol: HLA-A
  Gene Name: major histocompatibility complex, class I, A
  ENST ID: ENST00000453057
  CDS Start-End: 1-1096
ggccgtcatggcgccccgaaccctcgtcctgctactctcgggggctctggccctgacccagacctgggcgggctctcactccatgaggtatttcttcacatccgtgtcccggcccggccgcggggagccccgcttcatcgcagtgggctacgtggacgacacgcagttcgtgcggttcgacagcgacgccgcgagccagaggatggagccgcgggcgccgtggatagagcaggagggtccggagtattgggacggggagacacggaaagtgaaggcccactcacagactcaccgagtggacctggggaccctgcgcggctactacaaccagagcgaggccggttctcacaccgtccagaggatgtatggctgcgacgtggggtcggactggcgcttcctccgcgggtaccaccagtacgcctacgacggcaaggattacatcgccctgaaagaggacctgcgctcttggaccgcggcggacatggcagctcagaccaccaagcacaagtgggaggcggcccatgtggcggagcagttgagagcctacctggagggcacgtgcgtggagtggctccgcagatacctggagaacgggaaggagacgctgcagcgcacggacgcccccaaaacgcatatgactcaccacgctgtctctgaccatgaagccaccctgaggtgctgggccctgagcttctaccctgcggagatcacactgacctggcagcgggatggggaggaccagacccaggacacggagctcgtggagaccaggcctgcaggggatggaaccttccagaagtgggcggctgtggtggtgccttctggacaggagcagagatacacctgccatgtgcagcatgagggtttgcccaagcccctcaccctgagatgggagccgtcttcccagcccaccatccccatcgtgggcatcattgctggcctggttctctttggagctgtgatcactggagctgtggtcgctgctgtgatgtggaggaggaagagctcagatagaaaaggagggagctactctcaggctgcaagcagtgacagtgcccagggctctgatgtgtctctcacagcttgtaaagtgtgagacagctgccttgtgtgggactgagaggcaagagttgttcctgcccttccctttgtgacttgaagaaccctgactttgtttctgcaaaggcacctgcatgtgtctgtgttcgtgtaggcataatgtgaggaggtggggagaccaccccacccccatgtccaccatgaccctcttcccacgctgacctgtgctccctccccaatcatctttcctgttccagagaggtggggctgaggtgtctccatctctgtctcaacttcatggtgcactgagctgtaacttcttccttccctattaaaattagaacctgagtataaatttactttctcaaattcttgccatgagaggttgatgagttaattaaaggagaagattcctaaaatttgagagacaaaataaatggaacacatgagaaccttccagagtcca

SEQ ID NO: 150712 - DNA, 1865 bp, Homo sapiens
  Payload ID: 9760
  Gene Symbol: HLA-A
  Gene Name: major histocompatibility complex, class I, A
  Uniprot ID: P30443
  ENST ID: ENST00000443552
  CDS Start-End: 339-1436
aaggggagaggagggcctgaaggatgagaaggatagagggaagggctggagaagcaggaggcacaacttttccggattaaaaacaaaaacaacaacaaaaatctacacctctattcccagagcaagcttactctctggcaccaaactccatggggtgatttttcttctagaagagtccaggtggacagggtccttcatcctggatactcacgacgcggacccagttctcactcccattgggtgtcgggtttccagagaagccaatcagtgtcgtcgcggtcgctgttctaaagtccgcacgcacccaccgggactcagattctccccagacgccgaggatggccgtcatggcgccccgaaccctcctcctgctactctcgggggccctggccctgacccagacctgggcgggctcccactccatgaggtatttcttcacatccgtgtcccggcccggccgcggggagccccgcttcatcgccgtgggctacgtggacgacacgcagttcgtgcggttcgacagcgacgccgcgagccagaagatggagccgcgggcgccgtggatagagcaggaggggccggagtattgggaccaggagacacggaatatgaaggcccactcacagactgaccgagcgaacctggggaccctgcgcggctactacaaccagagcgaggacggttctcacaccatccagataatgtatggctgcgacgtggggccggacgggcgcttcctccgcgggtaccggcaggacgcctacgacggcaaggattacatcgccctgaacgaggacctgcgctcttggaccgcggcggacatggcagctcagatcaccaagcgcaagtgggaggcggtccatgcggcggagcagcggagagtctacctggagggccggtgcgtggacgggctccgcagatacctggagaacgggaaggagacgctgcagcgcacggacccccccaagacacatatgacccaccaccccatctctgaccatgaggccaccctgaggtgctgggccctgggcttctaccctgcggagatcacactgacctggcagcgggatggggaggaccagacccaggacacggagctcgtggagaccaggcctgcaggggatggaaccttccagaagtgggcggctgtggtggtgccttctggagaggagcagagatacacctgccatgtgcagcatgagggtctgcccaagcccctcaccctgagatgggagctgtcttcccagcccaccatccccatcgtgggcatcattgctggcctggttctccttggagctgtgatcactggagctgtggtcgctgccgtgatgtggaggaggaagagctcagatagaaaaggagggagttacactcaggctgcaagcagtgacagtgcccagggctctgatgtgtctctcacagcttgtaaagtgtgagacagctgccttgtgtgggactgagaggcaagagttgttcctgcccttccctttgtgacttgaagaaccctgactttgtttctgcaaaggcacctgcatgtgtctgtgttcgtgtaggcataatgtgaggaggtggggagagcaccccacccccatgtccaccatgaccctcttcccacgctgacctgtgctccctctccaatcatctttcctgttccagagaggtggggctgaggtgtctccatctctgtctcaacttcatggtgcactgagctgtaacttcttccttccctattaaaattagaacctgagtataaatttactttctcaaattcttgccatgagaggttgatgagttaattaaaggagaagattcctaaaatttgagagacaaaattaatggaacgcatgagaaccttccagagtcca

SEQ ID NO: 150713 - DNA, 1865 bp, Homo sapiens; identical to SEQ ID NO: 150712
  Payload ID: 9760
  Gene Symbol: HLA-A
  Gene Name: major histocompatibility complex, class I, A
  Uniprot ID: P30443
  ENST ID: ENST00000431930
  CDS Start-End: 339-1436

SEQ ID NO: 150714 - DNA, 1868 bp, Homo sapiens
  Payload ID: 9760
  Gene Symbol: HLA-A
  Gene Name: major histocompatibility complex, class I, A
  Uniprot ID: P30512
  ENST ID: ENST00000456012
  CDS Start-End: 342-1439
aaggggagaggagggcctgaaggatgagaaggatggagggaagggctggagaagcaggaggcgcaacttttcccgattaaaaacaaaaacaacaacaacaaaaatctacacctccattcccagagcaagcttactctctggcaccaaactccatggggtgatttttcttctagaagagtccaggtggacagggtccttcttcctggatactcacgacgcggacccagttctcactcccattgggtgtcgggtttccagagaagccaatcagtgtcgtcgcggtcgcggttctaaagtccgcacgcacccaccgggactcagattctccccagacgccgaggatggccgtcatggcgccccgaaccctcctcctgctactcttgggggccctggccctgacccagacctgggcgggctcccactccatgaggtatttcaccacatccgtgtcccggcccggccgcggggagccccgcttcatcgccgtgggctacgtggacgacacgcagttcgtgcggtttgacagcgacgccgcgagccagaggatggagccgcgggcaccgtggatagagcaggaggggccggagtattgggacctgcagacacggaatgtgaaggcccagtcacagactgaccgagcgaacctggggaccctgcgcggctactacaaccagagcgaggccggttctcacaccatccagatgatgtatggctgcgacgtggggtcggacgggcgcttcctccgcgggtaccggcaggacgcctacgacggcaaggattacatcgccttgaacgaggacctgcgctcttggaccgcggcggacatggcggctcagatcacccagcgcaagtgggaggcggcccgtgtggcggagcagttgagagcctacctggagggcacgtgcgtggagtggctccgcagatacctggagaacgggaaggagacgctgcagcgcacggacgcccccaagacgcatatgactcaccacgctgtctctgaccatgaggccaccctgaggtgctgggccctgagcttctaccctgcggagatcacactgacctggcagcgggatggggaggaccagacccaggacacggagcttgtggagaccaggcctgcaggggatggaaccttccagaagtgggcgtctgtggtggtgccttctggacaggagcagagatacacctgccatgtgcagcatgagggtctgcccaagcccctcaccctgagatgggagccgtcttcccagcccaccatccccatcgtgggcatcattgctggcctagttctctttggagctgtgttcgctggagctgtggtcgctgctgtgaggtggaggaggaagagctcagatagaaaaggagggagctactctcaggctgcaagcagtgacagtgcccagggctctgatatgtctctcacagcttgtaaagtgtgagacagctgccttgtgtgggactgagaggcaagatttgttcctgcccttccctttgtgacttgaagaaccctgactttgtttctgcaaaggcacctgcatgtgtctgtgttcttgtaggcataatgtgaggaggtggggagaccaccccacccccatgtccaccatgaccctcttcccacgctgacctgtgctccctccccaatcatctttcctgttccagagaggtggggctgaggtgtctccatctctgcctcaacttcatggtgcactgagctgtaacttcttccttccctattaaaattagaacctgagtataaatttactttctcaaattcttgccatgagaggttgatgagttaattaaaggagaagattcctaaaatttgagagacaaaataaatggaacacatgagaaccttccagagtcca

SEQ ID NO: 150715 - DNA, 1868 bp, Homo sapiens
  Payload ID: 9760
  Gene Symbol: HLA-A
  Gene Name: major histocompatibility complex, class I, A
  Uniprot ID: P30447
  ENST ID: ENST00000454091
  CDS Start-End: 342-1439
aaggggagaggagggcctgaaggatgagaaggatggagggaagggctggagaagcaggaggcgcaacttttcccgattaaaaacaaaaacaacaacaacaaaaatctacacctccattcccagagcaagcttactctctggcaccaaactccatggggtgatttttcttctagaagagtccaggtggacagggtccttcttcctggatactcacgacgcggacccagttctcactcccattgggtgtcgggtttccagagaagccaatcagtgtcgtcgcggtcgcggttctaaagtccgcacgcacccaccgggactcagattctccccagacgccgaggatggccgtcatggcgccccgaaccctcctcctgctactcttgggggccctggccctgacccagacctgggcgggctcccactccatgaggtatttcttcacatccgtgtcccggcccggccgcggggagccccgcttcatcgccgtgggctacgtggacgacacgcagttcgtgcggtttgacagcgacgccgcgagccagaggatggagccgcgggcgccgtggatagagcaggaggggccggagtattgggaccaggagacacggaatgtgaaggcccactcacagactgaccgagagagcctgcggatcgcgctccgctactacaaccagagcgaggccggttctcacaccatccagatgatgtatggctgcgacgtggggccggacgggcgcctcctccgcgggtaccagcaggacgcctacgacggcaaggattacatcgccttgaacgaggacctgcgctcttggaccgcggcggacatggcggctcagatcacccagcgcaagtgggaggcggcccgtgtggcggagcagttgagagcctacctggagggcacgtgcgtggagtggctccgcagatacctggagaacgggaaggagacgctgcagcgcacggacgcccccaagacgcatatgactcaccacgctgtctctgaccatgaggccaccctgaggtgctgggccctgagcttctaccctgcggagatcacactgacctggcagcgggatggggaggaccagacccaggacacggagcttgtggagaccaggcctgcaggggatggaaccttccagaagtgggcgtctgtggtggtgccttctggacaggagcagagatacacctgccatgtgcagcatgagggtctgcccaagcccctcaccctgagatgggagccgtcttcccagcccaccatccccatcgtgggcatcattgctggcctagttctctttggagctatgttcgctggagctgtggtcgctgctgtgaggtggaggaggaagagctcagatagaaaaggagggagctactctcaggctgcaagcagtgacagtgcccagggctctgatatgtctctcacagcttgtaaagtgtgagacagctgccttgtgtgggactgagaggcaagatttgttcctgcccttccctttgtgacttgaagaaccctgactttgtttctgcaaaggcacctgcatgtgtctgtgttcttgtaggcataatgtgaggaggtggggagaccaccccacccccatgtccaccatgaccctcttcccacgctgacctgtgctccctccccaatcatctttcctgttccagagaggtggggctgaggtgtctccatctctgcctcaacttcatggtgcactgagctgtaacttcttccttccctattaaaattagaacctgagtataaatttactttctcaaattcttgccatgagaggttgatgagttaattaaaggagaagattcctaaaatttgagagacaaaataaatggaacacatgagaaccttccagagtcca

SEQ ID NO: 150716 - DNA, 1543 bp, Homo sapiens
  Payload ID: 9760
  Gene Symbol: HLA-A
  Gene Name: major histocompatibility complex, class I, A
  ENST ID: ENST00000455882
  CDS Start-End: 1-1114
ggccgtcatggcgccccgaaccctcgtcctgctactctcgggggctctggccctgacccagacctgggcgggctctcactccatgaggtatttcttcacatccgtgtcccggcccggccgcggggagccccgcttcatcgcagtgggctacgtggacgacacgcagttcgtgcggttcgacagcgacgccgcgagccagaggatggagccgcgggcgccgtggatagagcaggagggtccggagtattgggacggggagacacggaaagtgaaggcccactcacagactcaccgagtggacctggggaccctgcgcggctactacaaccagagcgaggccggttctcacaccgtccagaggatgtatggctgcgacgtggggtcggactggcgcttcctccgcgggtaccaccagtacgcctacgacggcaaggattacatcgccctgaaagaggacctgcgctcttggaccgcggcggacatggcagctcagaccaccaagcacaagtgggaggcggcccatgtggcggagcagttgagagcctacctggagggcacgtgcgtggagtggctccgcagatacctggagaacgggaaggagacgctgcagcgcacggacgcccccaaaacgcatatgactcaccacgctgtctctgaccatgaagccaccctgaggtgctgggccctgagcttctaccctgcggagatcacactgacctggcagcgggatggggaggaccagacccaggacacggagctcgtggagaccaggcctgcaggggatggaaccttccagaagtgggcggctgtggtggtgccttctggacaggagcagagatacacctgccatgtgcagcatgagggtttgcccaagcccctcaccctgagatgggagccgtcttcccagcccaccatccccatcgtgggcatcattgctggcctggttctctttggagctgtgatcactggagctgtggtcgctgctgtgatgtggaggaggaagagctcaggtggggaaggggtgaaggatagaaaaggagggagctactctcaggctgcaagcagtgacagtgcccagggctctgatgtgtctctcacagcttgtaaagtgtgagacagctgccttgtgtgggactgagaggcaagagttgttcctgcccttccctttgtgacttgaagaaccctgactttgtttctgcaaaggcacctgcatgtgtctgtgttcgtgtaggcataatgtgaggaggtggggagaccaccccacccccatgtccaccatgaccctcttcccacgctgacctgtgctccctccccaatcatctttcctgttccagagaggtggggctgaggtgtctccatctctgtctcaacttcatggtgcactgagctgtaacttcttccttccctattaaaattagaacctgagtataaatttactttctcaaattcttgccatgagaggttgatgagttaattaaaggagaagattcctaaaatttgagagacaaaataaatggaacacatgagaaccttccagagtcca

SEQ ID NO: 150717 - DNA, 1856 bp, Homo sapiens
  Payload ID: 9760
  Gene Symbol: HLA-A
  Gene Name: major histocompatibility complex, class I, A
  ENST ID: ENST00000470780
  CDS Start-End: 310-1338
agcttggcacaggagcagaggggtcagggcgaagtcccagggccccaggcgtggctctcagggtctcaggccccgaaggcggtgtatggattggggagtcccagccttggggattccccaactccgcagtttcttttctccctctgccaacctatgtagggtccttcttcctggatactcacgacgcggacccagttctcactcccattgggtgtcgggtttccagagaagccaatcagtgtcgtcgcggtcgcggttctaaagtccgcacgcacccaccgggactcagattctccccagacgccgaggatggccgtcatggcgccccgaaccctcctcctgctactcttgggggccctggccctgacccagacctgggcgggctcccactccatgaggtatttcaccacatccgtgtcccggcccggccgcggggagccccgcttcatcgccgtgggctacgtggacgacacgcagttcgtgcggtttgacagcgacgccgcgagccagaggatggagccgcgggcaccgtggatagagcaggaggggccggagtattgggacctgcagacacggaatgtgaaggcccagtcacagactgaccgagcgaacctggggaccctgcgcggctactacaaccagagcgaggccggttctcacaccatccagatgatgtatggctgcgacgtggggtcggacgggcgcttcctccgcgggtaccggcaggacgcctacgacggcaaggattacatcgccttgaacgaggacctgcgctcttggaccgcggcggacatggcggctcagatcacccagcgcaagtgggaggcggcccgtgtggcggagcagttgagagcctacctggagggcacgtgcgtggagtggctccgcagatacctggagaacgggaaggagacgctgcagcgcacggacgcccccaagacgcatatgactcaccacgctgtctctgaccatgaggccaccctgaggtgctgggccctgagcttctaccctgcggagatcacactgacctggcagcgggatggggaggaccagacccaggacacggagcttgtggagaccaggcctgcaggggatggaaccttccagaagtgggcgtctgtggtggtgccttctggacaggagcagagatacacctgccatgtgcagcatgagggtctgcccaagcccctcaccctgagatgggagccgtcttcccagcccaccatccccatcgtgggcatcattgctggcctagttctctttggagctgtgttcgctggagctgtggtcgctgctgtgaggtggaggaggaagagctcaggtggggtgaagggatgaaggatagaaaaggagggagctactctcaggctgcaagcagtgacagtgcccagggctctgatatgtctctcacagcttgtaaagtgtgagacagctgccttgtgtgggactgagaggcaagatttgttcctgcccttccctttgtgacttgaagaaccctgactttgtttctgcaaaggcacctgcatgtgtctgtgttcttgtaggcataatgtgaggaggtggggagaccaccccacccccatgtccaccatgaccctcttcccacgctgacctgtgctccctccccaatcatctttcctgttccagagaggtggggctgaggtgtctccatctctgcctcaacttcatggtgcactgagctgtaacttcttccttccctattaaaattagaacctgagtataaatttactttctcaaattcttgccatgagaggttgatgagttaattaaaggagaagattcctaaaatttgagagacaaaataaatggaacacatgagaaccttccagagtcca

SEQ ID NO: 150718 - DNA, 1611 bp, Homo sapiens
  Payload ID: 9760
  Gene Symbol: HLA-A
  Gene Name: major histocompatibility complex, class I, A
  Uniprot ID: P30443
  ENST ID: ENST00000552193
  CDS Start-End: 85-1182
gagaagccaatcagtgtcgtcgcggtcgctgttctaaagtccgcacgcacccaccgggactcagattctccccagacgccgaggatggccgtcatggcgccccgaaccctcctcctgctactctcgggggccctggccctgacccagacctgggcgggctcccactccatgaggtatttcttcacatccgtgtcccggcccggccgcggggagccccgcttcatcgccgtgggctacgtggacgacacgcagttcgtgcggttcgacagcgacgccgcgagccagaagatggagccgcgggcgccgtggatagagcaggaggggccggagtattgggaccaggagacacggaatatgaaggcccactcacagactgaccgagcgaacctggggaccctgcgcggctactacaaccagagcgaggacggttctcacaccatccagataatgtatggctgcgacgtggggccggacgggcgcttcctccgcgggtaccggcaggacgcctacgacggcaaggattacatcgccctgaacgaggacctgcgctcttggaccgcggcggacatggcagctcagatcaccaagcgcaagtgggaggcggtccatgcggcggagcagcggagagtctacctggagggccggtgcgtggacgggctccgcagatacctggagaacgggaaggagacgctgcagcgcacggacccccccaagacacatatgacccaccaccccatctctgaccatgaggccaccctgaggtgctgggccctgggcttctaccctgcggagatcacactgacctggcagcgggatggggaggaccagacccaggacacggagctcgtggagaccaggcctgcaggggatggaaccttccagaagtgggcggctgtggtggtgccttctggagaggagcagagatacacctgccatgtgcagcatgagggtctgcccaagcccctcaccctgagatgggagctgtcttcccagcccaccatccccatcgtgggcatcattgctggcctggttctccttggagctgtgatcactggagctgtggtcgctgccgtgatgtggaggaggaagagctcagatagaaaaggagggagttacactcaggctgcaagcagtgacagtgcccagggctctgatgtgtctctcacagcttgtaaagtgtgagacagctgccttgtgtgggactgagaggcaagagttgttcctgcccttccctttgtgacttgaagaaccctgactttgtttctgcaaaggcacctgcatgtgtctgtgttcgtgtaggcataatgtgaggaggtggggagagcaccccacccccatgtccaccatgaccctcttcccacgctgacctgtgctccctctccaatcatctttcctgttccagagaggtggggctgaggtgtctccatctctgtctcaacttcatggtgcactgagctgtaacttcttccttccctattaaaattagaacctgagtataaatttactttctcaaattcttgccatgagaggttgatgagttaattaaaggagaagattcctaaaatttgagagacaaaattaatggaacgcatgagaaccttccagagtcca

SEQ ID NO: 150719 - DNA, 1611 bp, Homo sapiens; identical to SEQ ID NO: 150718
  Payload ID: 9760
  Gene Symbol: HLA-A
  Gene Name: major histocompatibility complex, class I, A
  Uniprot ID: P30443
  ENST ID: ENST00000549869
  CDS Start-End: 85-1182

SEQ ID NO: 150720 - DNA, 1611 bp, Homo sapiens
  Payload ID: 9760
  Gene Symbol: HLA-A
  Gene Name: major histocompatibility complex, class I, A
  Uniprot ID: P01892
  ENST ID: ENST00000547271
  CDS Start-End: 85-1182
gagaagccaatcagtgtcgtcgcggtcgcggttctaaagtccgcacgcacccaccgggactcagattctccccagacgccgaggatggccgtcatggcgccccgaaccctcgtcctgctactctcgggggctctggccctgacccagacctgggcgggctctcactccatgaggtatttcttcacatccgtgtcccggcccggccgcggggagccccgcttcatcgcagtgggctacgtggacgacacgcagttcgtgcggttcgacagcgacgccgcgagccagaggatggagccgcgggcgccgtggatagagcaggagggtccggagtattgggacggggagacacggaaagtgaaggcccactcacagactcaccgagtggacctggggaccctgcgcggctactacaaccagagcgaggccggttctcacaccgtccagaggatgtatggctgcgacgtggggtcggactggcgcttcctccgcgggtaccaccagtacgcctacgacggcaaggattacatcgccctgaaagaggacctgcgctcttggaccgcggcggacatggcagctcagaccaccaagcacaagtgggaggcggcccatgtggcggagcagttgagagcctacctggagggcacgtgcgtggagtggctccgcagatacctggagaacgggaaggagacgctgcagcgcacggacgcccccaaaacgcatatgactcaccacgctgtctctgaccatgaagccaccctgaggtgctgggccctgagcttctaccctgcggagatcacactgacctggcagcgggatggggaggaccagacccaggacacggagctcgtggagaccaggcctgcaggggatggaaccttccagaagtgggcggctgtggtggtgccttctggacaggagcagagatacacctgccatgtgcagcatgagggtttgcccaagcccctcaccctgagatgggagccgtcttcccagcccaccatccccatcgtgggcatcattgctggcctggttctctttggagctgtgatcactggagctgtggtcgctgctgtgatgtggaggaggaagagctcagatagaaaaggagggagctactctcaggctgcaagcagtgacagtgcccagggctctgatgtgtctctcacagcttgtaaagtgtgagacagctgccttgtgtgggactgagaggcaagagttgttcctgcccttccctttgtgacttgaagaaccctgactttgtttctgcaaaggcacctgcatgtgtctgtgttcgtgtaggcataatgtgaggaggtggggagaccaccccacccccatgtccaccatgaccctcttcccacgctgacctgtgctccctccccaatcatctttcctgttccagagaggtggggctgaggtgtctccatctctgtctcaacttcatggtgcactgagctgtaacttcttccttccctattaaaattagaacctgagtataaatttactttctcaaattcttgccatgagaggttgatgagttaattaaaggagaagattcctaaaatttgagagacaaaataaatggaacacatgagaaccttccagagtcca

SEQ ID NO: 150721 - DNA, 1611 bp, Homo sapiens
  Payload ID: 9760
  Gene Symbol: HLA-A
  Gene Name: major histocompatibility complex, class I, A
  Uniprot ID: P30450
  ENST ID: ENST00000549224
  CDS Start-End: 85-1182
gagaagccaatcagtgtcgtcgcggtcgcggttctaaagtccgcacgcacccaccgggactcagattctccccagacgccgaggatggccgtcatggcgccccgaaccctcgtcctgctactctcgggggccctggccctgacccagacctgggcgggctcccactccatgaggtatttctacacctccgtgtcccggcccggccgcggggagccccgcttcatcgccgtgggctacgtggacgacacgcagttcgtgcggttcgacagcgacgccgcgagccagaggatggagccgcgggcgccgtggatagagcaggaggggccggagtattgggaccggaacacacggaatgtgaaggcccactcacagactgaccgagcgaacctggggaccctgcgcggctactacaaccagagcgaggacggttctcacaccatccagaggatgtatggctgcgacgtggggccggacgggcgcttcctccgcgggtaccagcaggacgcttacgacggcaaggattacatcgccctgaacgaggacctgcgctcttggaccgcggcggacatggcggctcagatcacccagcgcaagtgggagacggcccatgaggcggagcagtggagagcctacctggagggccggtgcgtggagtggctccgcagatacctggagaacgggaaggagacgctgcagcgcacggacgcccccaagacgcatatgactcaccacgctgtctctgaccatgaggccaccctgaggtgctgggccctgagcttctaccctgcggagatcacactgacctggcagcgggatggggaggaccagacccaggacacggagctcgtggagaccaggcctgcaggggatgggaccttccagaagtgggcgtctgtggtggtgccttctggacaggagcagagatacacctgccatgtgcagcatgagggtctgcccaagcccctcaccctgagatgggagccgtcttcccagcccaccatccccatcgtgggcatcattgctggcctggttctctttggagctgtgatcgctggagctgtggtcgctgctgtgatgtggaggaggaagagctcagatagaaaaggagggagctactctcaggctgcaagcagtgacagtgcccagggctctgatatgtctctcacagcttgtaaagtgtgagacagctgccttgtgtgggactgagaggcaagatttgttcctgcccttccctttgtgacttgaagaaccctgactttgtttctgcaaaggcacctgcatgtgtctgtgttcttgtaggcataatgtgaggaggtggggagaccaccccacccccatgtccaccatgaccctcttcccacgctgacctgtgctccctccccaatcatctttcctgttccagagaggtggggctgaggtgtctccatctctgcctcaacttcatggtgcactgagctgtaactttttccttccctattaaaattagaacctgagtataaatttactttctcaaattcttgccatgagaggttgatgagttaattaaaggagaagattcctaaaatttgagagacaaaataaatggaacacatgagaaccttccagagtcca

SEQ ID NO: 150722 - DNA, 1611 bp, Homo sapiens
  Payload ID: 9760
  Gene Symbol: HLA-A
  Gene Name: major histocompatibility complex, class I, A
  Uniprot ID: P01892
  ENST ID: ENST00000547522
  CDS Start-End: 85-1182
gagaagccaatcggtgccgccgcggtcccggttctaaagtccccacgcacccaccgggactcagattctccccagacgccgaggatggccgtcatggcgccccgaaccctcgtcctgctactctcgggggctctggccctgacccagacctgggcgggctctcactccatgaggtatttcttcacatccgtgtcccggcccggccgcggggagccccgcttcatcgcagtgggctacgtggacgacacgcagttcgtgcggttcgacagcgacgccgcgagccagaggatggagccgcgggcgccgtggatagagcaggagggtccggagtattgggacggggagacacggaaagtgaaggcccactcacagactcaccgagtggacctggggaccctgcgcggctactacaaccagagcgaggccggttctcacaccgtccagaggatgtatggctgcgacgtggggtcggactggcgcttcctccgcgggtaccaccagtacgcctacgacggcaaggattacatcgccctgaaagaggacctgcgctcttggaccgcggcggacatggcagctcagaccaccaagcacaagtgggaggcggcccatgtggcggagcagttgagagcctacctggagggcacgtgcgtggagtggctccgcagatacctggagaacgggaaggagacgctgcagcgcacggacgcccccaaaacgcatatgactcaccacgctgtctctgaccatgaagccaccctgaggtgctgggccctgagcttctaccctgcggagatcacactgacctggcagcgggatggggaggaccagacccaggacacggagctcgtggagaccaggcctgcaggggatggaaccttccagaagtgggcggctgtggtggtgccttctggacaggagcagagatacacctgccatgtgcagcatgagggtttgcccaagcccctcaccctgagatgggagccgtcttcccagcccaccatccccatcgtgggcatcattgctggcctggttctctttggagctgtgatcactggagctgtggtcgctgctgtgatgtggaggaggaagagctcagatagaaaaggagggagctactctcaggctgcaagcagtgacagtgcccagggctctgatgtgtctctcacagcttgtaaagtgtgagacagctgccttgtgtgggactgagaggcaagagttgttcctgcccttccctttgtgacttgaagaaccctgactttgtttctgcaaaggcacctgcatgtgtctgtgttcgtgtaggcataatgtgaggaggtggggagaccaccccacccccatgtccaccatgaccctcttcccacgctgacctgtgctccctccccaatcatctttcctgttccagagaggtggggctgaggtgtctccatctctgtctcaacttcatggtgcactgagctgtaacttcttccttccctattaaaattagaacctgagtataaatttactttctcaaattcttgccatgagaggttgatgagttaattaaaggagaagattcctaaaatttgagagacaaaataaatggaacacatgagaaccttccagagtcca

SEQ ID NO: 150723 - DNA, 5422 bp, Homo sapiens
  Payload ID: 9760
  Gene Symbol: HLA-A
  Gene Name: major histocompatibility complex, class I, A
  ENST ID: ENST00000552498
  CDS Start-End: 1-1185
atggccgtcatggcgccccgaaccctcctcctgctactctcgggggccctggccctgacccagacctgggcgggctcccactccatgaggtatttcttcacatccgtgtcccggcccggccgcggggagccccgcttcatcgccgtgggctacgtggacgacacgcagttcgtgcggttcgacagcgacgccgcgagccagaagatggagccgcgggcgccgtggatagagcaggaggggccggagtattgggaccaggagacacggaatatgaaggcccactcacagactgaccgagcgaacctggggaccctgcgcggctactacaaccagagcgaggacggttctcacaccatccagataatgtatggctgcgacgtggggccggacgggcgcttcctccgcgggtaccggcaggacgcctacgacggcaaggattacatcgccctgaacgaggacctgcgctcttggaccgcggcggacatggcagctcagatcaccaagcgcaagtgggaggcggtccatgcggcggagcagcggagagtctacctggagggccggtgcgtggacgggctccgcagatacctggagaacgggaaggagacgctgcagcgcacggacccccccaagacacatatgacccaccaccccatctctgaccatgaggccaccctgaggtgctgggccctgggcttctaccctgcggagatcacactgacctggcagcgggatggggaggaccagacccaggacacggagctcgtggagaccaggcctgcaggggatggaaccttccagaagtgggcggctgtggtggtgccttctggagaggagcagagatacacctgccatgtgcagcatgagggtctgcccaagcccctcaccctgagatgggagctgtcttcccagcccaccatccccatcgtgggcatcattgctggcctggttctccttggagctgtgatcactggagctgtggtcgctgccgtgatgtggaggaggaagagctcagatagaaaaggagggagttacactcaggctgcaagcagtgacagtgcccagggctctgatgtgtctctcacagcttgtaaaggtgagagcttggagggcctgatgtgtgttgggtgttgggtggaacagtggacacagctgtgctatggggtttctttgcgttggatgtattgagcatgcgatgggctgtttaaggtgtgacccctcactgtgatggatatgaatttgttcatgaatatttttttctatagtgtgagacagctgccttgtgtgggactgagaggcaagagttgttcctgcccttccctttgtgacttgaagaaccctgactttgtttctgcaaaggcacctgcatgtgtctgtgttcgtgtaggcataatgtgaggaggtggggagagcaccccacccccatgtccaccatgaccctcttcccacgctgacctgtgctccctctccaatcatctttcctgttccagagaggtggggctgaggtgtctccatctctgtctcaacttcatggtgcactgagctgtaacttcttccttccctattaaaattagaacctgagtataaatttactttctcaaattcttgccatgagaggttgatgagttaattaaaggagaagattcctaaaatttgagagacaaaattaatggaacgcatgagaaccttccagagtccacgtgttgcttatgctgatttgttgcaggggaggagagtagatggggctgtgcccagtttctgttccggccaccatgggctttatgtggtcacagctcacctgggtcatctttgctgctccattgtccttggcccttcagtagaaccttgtcccaccaagacctgtgatcacagggagttggatgtcacctagggtggtccctgcatacaaatctccttgtggtatcaagagacaaattttcagacctgtccaggtcttgccttcctcccagggctttttccttaacggtattttcgatttttctccaatctttttaaaggaaccagattgtgacatttgcagagaggaggggtcccatagtttctcatcatggttaactttctgttggaactcctcttctgccctcctactcttcttcctgctctgagttgtagtaatcctagtgctggctccaatccaaactcatagatttataaagcagagtctaatttagattcatatgtggttggaaaattgtacccataaggctagggttattgttcctgaagagaaatatatggttttgtgctgaagtgtgcaggagggttggtgtgggaggagggaggacacacaagcagccctggtgagaaaagcactggcggcatggatgtccacgtgaacttatgttctttagctgccacaaaacagcatttgccctgtggctacattaataaagatatgggctttagaatagggaggtgctctacagtgatcattcattcaactgacatttgttgtctgctagggatatgactgcttttgcatttagaaagcatccttaaagtaaaaacagaaaaatgtctggggttatggtgcatacgttctagatgcaagcttgtccaacccgcggctcgtgggctgcatgtggcccaggacaattttgaatgtgaggacttttttgcttatctgtggtgaacctgagtcctggagtgagtgcacccacctccctcagggtcaggagtgaatgctttaggaaccctccttttcagtgacctacaaaagatagagggcacatttactgtgataacccagagtatcagccaagggggcttgaccttcaaggagtcgtggggaaggttaataaagggtggtgtcccagggtcagaaaagatgggcagacagcaagggcactgcttgatatctatgataagcatgtggaattgaggagcaagcttcagattcagaatccagtgactaaggacatatctatatccctaagagaaagaaccttgggacacgatgatggttatatgctgggacaattccatcagcccttctgcaaaggagcctatagccatttaatcaggagatgggataagtattaacattgggtgtgagctgacattgctgcccagattcctacagcaccattatgtcccccatcacactggggcttacagaagccagggaataaacctagacacattatgccccatggtggaatcaccagttccataaatcctgtcctggttatctccccattctctgagtgcataattggccttgatgcactggcaactggagtcaccccacactgtgtccctagtctggagagtaagggatctcactgtgctgaagcccaaagggaaacatccctcatccaagccaaaccagaagcaatattgtgcctcagggtgggtcttgtggagggtactgcaggtattataggggtggcactgccattacagacctgaacgatgcggggtggtgttgggattgcctgttatctccatataactcagcaatctgtacctgcagaagcctgatatggctaaagaatgaatggaattactccagacttgaccaagtaggagtcctgattgcagctgccatgctggctggatatcactgcctggggagattaataaggcctcaggcacatggcaagcagctgtggatttggtgagtgcattccctcccatttcatttagaagatggatatggaatgattcacattcacatgggatttataatacatttattgatagcttgcatcagggctaccttaactcctcaaccttctataaatatcaccttaagagacctggacgaatcagacatcccacagaatactaaatctcttcatttcattggcaatatcacataaattgggaaggatgaacaacagcaggaaagtacgctgaattccctggcaaaacatgtgcactacagaaggtgaagataaaacttacagagcttcaagagtggccactgcagtgaagtgttatgggtccagtggttaggggcatgcagagctcccccccgccacacacacacacaaagtaaaagacaaacttgcatcttgcatcctcaccagaaggaaggaagcacactacttgatgagcctctctgggttctggcaacaccacattccacatctaagtttattgctttggctgacactctgggtgatataggaggaggccagctttgagtggggcctggactggaaaggacactgcagcagacccaggctgtggtgcagtcagtcaccatccctcacacccctggtgctggaggtggcggtctggggaaagaagcaggatggagctgaaccaagcatcagtgggaaagtcagaatgcagggcctgggatcaggagtaaggccatggagtccacagcagagaaacatgctccatgttagaagcaacttttagcatgttactgtccctgataagatagaatgcttgagcataggacaccaagcaaccatgtgattccaagtgcccgtgtgtattggcttctatgtgacccatagagtcattcactggacaggcccagcggcatctatcatgagacgaaaacggtccatgtcggttgagcctcaattccatgttaacacccacagaaaacacccagtcctgatgtggccctgaataaccaaacaaattgaagacaaattgaagttagccagtctacatcatggatcagcccaggcctgataggaaggacccgtgagtggagcaaccacagtggcagggatgaagctacaaatgagtccagcagcactgtctctccactaccaaggcccacccagctactgcttcctctgaatactctgctcgtgagcattgcagaccaatgataggcaccaatagggcaccatttcttaaagtaactgactagcccctaagtgacaagttgaatagcttgaacaccatccatcctggaaggggcagaagtttatcctcacagggataggctcacagggatgcgatgtggtgtggttttcctctctgctctcagaccctcagtcaacaacactattggcattcctgatccactggctcagaatttcagtacattatctgcctgggggacacacctgttggggaaggggatgaagtgtgggccctgaccatgggatcccctggtcgtatcaccacctgcgcctctcaagtgctgccaggcacacagagtcatggacaggactctacaggcacaactcagtaccagcttggatgaaaccctctgaggaatgggtgccatctttcaggatgtgatgcatgtattgaatcaaagacgtctctaaggcactgttttcagaaggaagaatacgcgggtccaaaaaccaagaagtcaaagcaggtgtgtctcattccttatattcacccccagggtgatttacttataagtaaataaataaatacataacatgaatacttaaataaatttatttatgcatgt

SEQ ID NO: 150724 - DNA, 1611 bp, Homo sapiens
  Payload ID: 9760
  Gene Symbol: HLA-A
  Gene Name: major histocompatibility complex, class I, A
  Uniprot ID: P10314
  ENST ID: ENST00000552493
  CDS Start-End: 85-1182
gagaagccaatcagtgtcgtcgcggtcgcggttctaaagtccgcacgcacccaccgggactcagattctccccagacgccgaggatggccgtcatggcgccccgaaccctcctcctgctactcttgggggccctggccctgacccagacctgggcgggctcccactccatgaggtatttcttcacatccgtgtcccggcccggccgcggggagccccgcttcatcgccgtgggctacgtggacgacacgcagttcgtgcggtttgacagcgacgccgcgagccagaggatggagccgcgggcgccgtggatagagcaggaggggccggagtattgggaccaggagacacggaatgtgaaggcccactcacagactgaccgagagagcctgcggatcgcgctccgctactacaaccagagcgaggccggttctcacaccatccagatgatgtatggctgcgacgtggggccggacgggcgcctcctccgcgggtaccagcaggacgcctacgacggcaaggattacatcgccttgaacgaggacctgcgctcttggaccgcggcggacatggcggctcagatcacccagcgcaagtgggaggcggcccgtgtggcggagcagttgagagcctacctggagggcacgtgcgtggagtggctccgcagatacctggagaacgggaaggagacgctgcagcgcacggacgcccccaagacgcatatgactcaccacgctgtctctgaccatgaggccaccctgaggtgctgggccctgagcttctaccctgcggagatcacactgacctggcagcgggatggggaggaccagacccaggacacggagcttgtggagaccaggcctgcaggggatggaaccttccagaagtgggcgtctgtggtggtgccttctggacaggagcagagatacacctgccatgtgcagcatgagggtctgcccaagcccctcaccctgagatgggagccgtcttcccagcccaccatccccatcgtgggcatcattgctggcctagttctctttggagctatgttcgctggagctgtggtcgctgctgtgaggtggaggaggaagagctcagatagaaaaggagggagctactctcaggctgcaagcagtgacagtgcccagggctctgatatgtctctcacagcttgtaaagtgtgagacagctgccttgtgtgggactgagaggcaagatttgttcctgcccttccctttgtgacttgaagaaccctgactttgtttctgcaaaggcacctgcatgtgtctgtgttcttgtaggcataatgtgaggaggtggggagaccaccccacccccatgtccaccatgaccctcttcccacgctgacctgtgctccctccccaatcatctttcctgttccagagaggtggggctgaggtgtctccatctctgcctcaacttcatggtgcactgagctgtaacttcttccttccctattaaaattagaacctgagtataaatttactttctcaaattcttgccatgagaggttgatgagttaattaaaggagaagattcctaaaatttgagagacaaaataaatggaacacatgagaaccttccagagtcca

SEQ ID NO: 150725 - DNA, 5422 bp, Homo sapiens; identical to SEQ ID NO: 150723
  Payload ID: 9760
  Gene Symbol: HLA-A
  Gene Name: major histocompatibility complex, class I, A
  ENST ID: ENST00000551120
  CDS Start-End: 1-1185

SEQ ID NO: 150726 - DNA, 1611 bp, Homo sapiens
  Payload ID: 9760
  Gene Symbol: HLA-A
  Gene Name: major histocompatibility complex, class I, A
  ENST ID: ENST00000550728
  CDS Start-End: 85-1182
gagaagccaatcagtgtcgtcgcggtcgcggttctaaagtccgcacgcacccaccgggactcagattctccccagacgccgaggatggccgtcatggcgccccgaaccctcctcctgctactcttgggggccctggccctgacccagacctgggcgggctcccactccatgaggtatttcaccacatccgtgtcccggcccggccgcggggagccccgcttcatcgccgtgggctacgtggacgacacgcagttcgtgcggtttgacagcgacgccgcgagccagaggatggagccgcgggcaccgtggatagagcaggaggggccggagtattgggacctgcagacacggaatgtgaaggcccagtcacagactgaccgagcgaacctggggaccctgcgcggctactacaaccagagcgaggccggttctcacaccatccagatgatgtatggctgcgacgtggggtcggacgggcgcttcctccgcgggtaccggcaggacgcctacgacggcaaggattacatcgccttgaacgaggacctgcgctcttggaccgcggcggacatggcggctcagatcacccagcgcaagtgggaggcggcccgtgtggcggagcagttgagagcctacctggagggcacgtgcgtggagtggctccgcagatacctggagaacgggaaggagacgctgcagcgcacggacgcccccaagacgcatatgactcaccacgctgtctctgaccatgaggccaccctgaggtgctgggccctgagcttctaccctgcggagatcacactgacctggcagcgggatggggaggaccagacccaggacacggagcttgtggagaccaggcctgcaggggatggaaccttccagaagtgggcgtctgtggtggtgccttctggacaggagcagagatacacctgccatgtgcagcatgagggtctgcccaagcccctcaccctgagatgggagccgtcttcccagcccaccatccccatcgtgggcatcattgctggcctagttctctttggagctgtgttcgctggagctgtggtcgctgctgtgaggtggaggaggaagagctcagatagaaaaggagggagctactctcaggctgcaagcagtgacagtgcccagggctctgatatgtctctcacagcttgtaaagtgtgagacagctgccttgtgtgggactgagaggcaagatttgttcctgcccttccctttgtgacttgaagaaccctgactttgtttctgcaaaggcacctgcatgtgtctgtgttcttgtaggcataatgtgaggaggtggggagaccaccccacccccatgtccaccatgaccctcttcccacgctgacctgtgctccctccccaatcatctttcctgttccagagaggtggggctgaggtgtctccatctctgcctcaacttcatggtgcactgagctgtaacttcttccttccctattaaaattagaacctgagtataaatttactttctcaaattcttgccatgagaggttgatgagttaattaaaggagaagattcctaaaatttgagagacaaaataaatggaacacatgagaaccttccagagtcca

SEQ ID NO: 150727 - DNA, 1494 bp, Homo sapiens
  Payload ID: 9760
  Gene Symbol: HLA-A
  Gene Name: major histocompatibility complex, class I, A
  ENST ID: ENST00000612644
  CDS Start-End: 85-1065
gagaagccaatcagtgtcgtcgcggtcgcggttctaaagtccgcacgcacccaccgggactcagattctccccagacgccgaggatggccgtcatggcgccccgaaccctcctcctgctactcttgggggccctggccctgacccagacctgggcgggctcccactccatgaggtatttcttcacatccgtgtcccggcccggccgcggggagccccgcttcatcgccgtgggctacgtggacgacacgcagttcgtgcggtttgacagcgacgccgcgagccagaggatggagccgcgggcgccgtggatagagcaggaggggccggagtattgggaccaggagacacggaatgtgaaggcccactcacagactgaccgagagagcctgcggatcgcgctccgctactacaaccagagcgaggccggttctcacaccatccagatgatgtatggctgcgacgtggggccggacgggcgcctcctccgcgggtaccagcaggacgcctacgacggcaaggattacatcgccttgaacgaggacctgcgctcttggaccgcggcggacatggcggctcagatcacccagcgcaagtgggaggcggcccgtgtggcggagcagttgagagcctacctggagggcacgtgcgtggagtggctccgcagatacctggagaacgggaaggagacgctgcagcgcacggacgcccccaagacgcatatgactcaccacgctgtctctgaccatgaggccaccctgaggtgctgggccctgagcttctaccctgcggagatcacactgacctggcagcgggatggggaggaccagacccaggacacggagcttgtggagaccaggcctgcaggggatggaaccttccagaagtgggcgtctgtggtggtgccttctggacaggagcagagatacacctgccatgtgcagcatgagggtctgcccaagcccctcaccctgagatgggatagaaaaggagggagctactctcaggctgcaagcagtgacagtgcccagggctctgatatgtctctcacagcttgtaaagtgtgagacagctgccttgtgtgggactgagaggcaagatttgttcctgcccttccctttgtgacttgaagaaccctgactttgtttctgcaaaggcacctgcatgtgtctgtgttcttgtaggcataatgtgaggaggtggggagaccaccccacccccatgtccaccatgaccctcttcccacgctgacctgtgctccctccccaatcatctttcctgttccagagaggtggggctgaggtgtctccatctctgcctcaacttcatggtgcactgagctgtaacttcttccttccctattaaaattagaacctgagtataaatttactttctcaaattcttgccatgagaggttgatgagttaattaaaggagaagattcctaaaatttgagagacaaaataaatggaacacatgagaaccttccagagtcca

SEQ ID NO: 150728 - DNA, 1550 bp, Homo sapiens
  Payload ID: 9760
  Gene Symbol: HLA-A
  Gene Name: major histocompatibility complex, class I, A
  ENST ID: ENST00000611149
  CDS Start-End: 144-1160
tttcctggatactcaggaagcgggcacagttctcattcccactaggtgtcgggtttctagagaagccaatcggtgccgccgcggtcccggttctaaagtccccacgcacccaccgggactcagattctccccagacgccgaggatggtgctcatggcgccccgaaccctcctcctgctgctctcaggggccctggccctgacccagacctgggcgcgctctcactccatgaggtatttcttcacatccgtgtcccggcccggccgcggggagccccgcttcatcgcagtgggctacgtggacgacacgcagttcgtgcggttcgacagcgacgccgcgagccagaggatggagccgcgggcgccgtggatagagcaggagggtccggagtattgggacggggagacacggaaagtgaaggcccactcacagactcaccgagtggacctggggaccctgcgcggctactacaaccagagcgaggccggttctcacaccgtccagaggatgtatggctgcgacgtggggtcggactggcgcttcctccgcgggtaccaccagtacgcctacgacggcaaggattacatcgccctgaaagaggacctgcgctcttggaccgcggcggacatggcagctcagaccaccaagcacaagtgggaggcggcccatgtggcggagcagttgagagcctacctggagggcacgtgcgtggagtggctccgcagatacctggagaacgggaaggagacgctgcagcgcacggacgcccccaaaacgcatatgactcaccacgctgtctctgaccatgaagccaccctgaggtgctgggccctgagcttctaccctgcggagatcacactgacctggcagcgggatggggaggaccagacccaggacacggagctcgtggagaccaggcctgcaggggatggaaccttccagaagtgggcggctgtggtggtgccttctggacaggagcagagatacacctgccatgtgcagcatgagggtttgcccaagcccctcaccctgagatgggagccgtcttcccagcccaccatccccatcgtgggcatcattgctggcctggttctctttggagctgtgatcactggagctgtggtcgctgctgtgatgtggaggaggaagagctcagatagaaaaggagggagctactctcaggctgcaatgtgacttcaagggcctctgtcttctctttctgccaagtccctttgtgacttcaagaaccctgacttctctttctgcaaagaccagcccacacccgtgtccaccatgaccctgttccccacactgacctacattccttccccgatcacctttcctgttccagagaagtggtgctgggatgtctccatctctgtctcaacttcatggtgcactgagctgtaacttcttacttccctattaaaattagaatctgagtataaatttacttttttcaaattatttccatgacgggttgatgggttaattaaaggagaagattcctaaaatttgagagacaaaataaatggaagacatgagaacctt

SEQ ID NO: 150729 - DNA, 5436 bp, Homo sapiens
  Payload ID: 9760
  Gene Symbol: HLA-A
  Gene Name: major histocompatibility complex, class I, A
  ENST ID: ENST00000616730
  CDS Start-End: 1-1185
atggccgtcatggcgccccgaaccctcgtcctgctactctcgggggccctggccctgacccagacctgggcgggctcccactccatgaggtatttctacacctccgtgtcccggcccggccgcggggagccccgcttcatcgccgtgggctacgtggacgacacgcagttcgtgcggttcgacagcgacgccgcgagccagaggatggagccgcgggcgccgtggatagagcaggaggggccggagtattgggaccggaacacacggaatgtgaaggcccactcacagactgaccgagcgaacctggggaccctgcgcggctactacaaccagagcgaggacggttctcacaccatccagaggatgtatggctgcgacgtggggccggacgggcgcttcctccgcgggtaccagcaggacgcttacgacggcaaggattacatcgccctgaacgaggacctgcgctcttggaccgcggcggacatggcggctcagatcacccagcgcaagtgggagacggcccatgaggcggagcagtggagagcctacctggagggccggtgcgtggagtggctccgcagatacctggagaacgggaaggagacgctgcagcgcacggacgcccccaagacgcatatgactcaccacgctgtctctgaccatgaggccaccctgaggtgctgggccctgagcttctaccctgcggagatcacactgacctggcagcgggatggggaggaccagacccaggacacggagctcgtggagaccaggcctgcaggggatgggaccttccagaagtgggcgtctgtggtggtgccttctggacaggagcagagatacacctgccatgtgcagcatgagggtctgcccaagcccctcaccctgagatgggagccgtcttcccagcccaccatccccatcgtgggcatcattgctggcctggttctctttggagctgtgatcgctggagctgtggtcgctgctgtgatgtggaggaggaagagctcagatagaaaaggagggagctactctcaggctgcaagcagtgacagtgcccagggctctgatatgtctctcacagcttgtaaaggtgagagcctggagggcctgatgtgtgttgggtgttgggcggaacagtggacgcagctgtgctatggggtttctttgcattggatgtattgagcatgcgatgggctgtttaaagtgtgactcctcactgtgacagatacgaatttgttcatgaatatttttttctatagtgtgagacagctgccttgtgtgggactgagaggcaagatttgttcctgcccttccctttgtgacttgaagaaccctgactttgtttctgcaaaggcacctgcatgtgtctgtgttcttgtaggcataatgtgaggaggtggggagaccaccccacccccatgtccaccatgaccctcttcccacgctgacctgtgctccctccccaatcatctttcctgttccagagaggtggggctgaggtgtctccatctctgcctcaacttcatggtgcactgagctgtaactttttccttccctattaaaattagaacctgagtataaatttactttctcaaattcttgccatgagaggttgatgagttaattaaaggagaagattcctaaaatttgagagacaaaataaatggaacacatgagaaccttccagagtccacgtgttgcttatgctgatttgttgcaggggaggagagtagatggggctgtgcccagtttctgttccggccaccatgggctttatgtggtcactgcttggctgggtcatctttgctgctccattgtccttggcccttcagtagaaacttgtcccaccaagacctgtgatcacagggagttggatgtcacctacggtggtccctgcatacaaatctccttgtggtatcaagagacaaattttcagacctgtccaggtcttgccttcctcccagggctttttcctcaattgtatttttgatttttctccagtctttttaaaggaaccagattgtgacatttgcagagaggaggggtcccatagtttctcatcatgattaactttctgttggaactcctcttctgccctcctactcttcttcctgctctgagttgtagtaatcctaatgctggctccaatccaaactcatagatttataaagcagagtctaatttagattcatatgtggttggaaaattgtacccataaggctagggttattgttcctgaagagaaatatatggttttgtgctgaagtgtgcaggagggttggtgtgggaggagggaggacacacaagcagccctggtgagaaaagcactggcggcatggatgtccatgtgaacttatgttctttagctgccacaaaacagcatttgccctgtggctacattaataaaggtatgggctttagaatagggaggtgctctacagtgatcattcattcaactgacatttgttgtctgctagggatatgactgcttttgcatttagaaagcatccttaaagtaaaaacagaaaaatttctggggttatggtgcatacgttctagatgcaggcttgtccaacccgtggctcgtgggctgcatgtggcccaggacaattttgaatgtgaggacttttttgcttatctgtggtgcacctgagtcctggagtgagtgcacccacctccctcagggtcaggagtgaatgctttaggaaccctccttttcagtgacctgccaaagataaagggcacatttactgtgataacccagagtatcagccaagggggcttgaccttcaaggagttgtggggaaggttaataaagggtggtgtcccagggtcagaaaagatgggcagacagcaagggcacttcttgatatctatgataagcatgtggaattgagtagcaagcttcagattcagaatccagtgactaaggacatatctgtatccctaagagaaagaaccttgggacacgatgatggttacatgctgggacaattccatcagcccttctgcaaaggagcctatagccatttaatcaggagatgggataagtattaacactgggtgtgagctgacattgctgcccagattcccacagcaccattatgtcccccatcacactggggcttacagaggccagggaataaacctagacacattatgccccatggtggaatcaccagttccataaatcctgtcctgattatctccccattctcttagtgcataattggccttgatgcactggcaactggagtcaccccacactgtgtccctagtctggagagtaagggatctcattgtgctgaagcccaaagggaaacatccctcatccaagccaaaccagaagcaatattgtgccccagggtgggtcttgtggagggtactgcaggtattataggggtggcactgccattacagacctgaacaatgcggggtggtgttgggattgcctgttatctccatataactcagcaatctgtacctgcagaagcctgatacggctaaagaatgaatggaattactccagacttgaccaagtaggagtcctgattgcagctgccatgctggctggatatcactgcctggggagattaataaggcctcaggcacatggcaagcagctgtggatttggtgagtgcattccctcccatttcatttagaagatggatatggaatgattcacattcacatgggatttataatacatttattgatagcttgcatcagggctaccttaactcctcaaccttctataaataccaccttaagagacctggacgaatcagacatctcacagaatactaaatctcttcatttcattggcaatatcacataaattgggaaggatgaacaagagcaggaaagtacgctgaattccctggcaaaacatgtgcactacagaaggtgaagataaaccttacagagcttcaagagtggccactgcagtgaagtgttacgggtccagtggttaggggcatgcagagctccccccaccccccacccccgcccccccgtgccaaagtaaaagacaaacttgcatcttgcatcctcaccagaaggaaggaagtacactacttggtgagcctctctgggttctggcaacaccacattccacatctaagtatattgctttggctgacactctgggtgatataggaggaggccagctttgagtggggcctggactggaaaggacactgcagcagacccaggctgtggtgcagtcagtcaccatccctcagacccctggtgctggaggtggcggtctgcggaaagaagcaggatggagctgaaccaagcatcagtgggaaagtcagaatgcagggcctgggatcaggagtaaggccatggagtccacagcagagaaacatgctccatgttagaagcaacttttagcatgttactggccctgataagatagaatgcttgagcataggacaccaagcaaccatgtgattccaagtgcccgtgtgtattggcttctatgtgacccatagagtcattcgttggacaggcccaacggcatctatcatgagacgaaaatggtccatgtcggttgagcctcaattccatgttaacacccacagaaaacacccagtcctgatgtggccctgaataaccaaacaaattgaagacaaattgaagttagccagtctgcatcatggatcagcccaggcctgataggaaggacccgtgagtggagcaaccacagtggcagggatgaagctacaaatgagtccagcagcactgtctctccactaccaaggcccacccagctactgcttcctctgaatactctgctcgtgagcattgcagaccaatgataggcaccgatagggcactatttcttaaagtaactgactagcccctaagtgacaagttgaatagcttgaacaccatccatcctggaaggggcagaagttcatcctcacagggataggctcacagggattcgatgtggtgtggttttcctctctgctctcagaccctcagtcaacaacactattggcattcctgatccactggctcagaatttcagtacattatctgcctgggggacacacctcttggggaaggggatgaagtatgggccctgaccatgggatcccctggtcatatcaccacctgcgcctctcaagtgctgccaggcacacagagtcatggacaggactctacaggcacaactcagtaccagcttggatgaaatcctctgaggaatgggtgccatctttcaggatgtgatgcatgtattgaatcaaagacatctctaaggcactgttttcagaaggaagaatacgtgggtccaaaaaccaagaagtcaaagcaggtgtgtctcattccttatattcacccccagggtgatttacttataagtaaataaataaatacataaataacatgagtacacaaataaatttatttatgcatgt

SEQ ID NO: 150730 - DNA, 1561 bp, Homo sapiens
  Payload ID: 9761
  Gene Symbol: HLA-B
  Gene Name: major histocompatibility complex, class I, B
  Uniprot ID: P30466
  ENST ID: ENST00000359635
  CDS Start-End: 44-1132
ccccacgcacccacccggactcagaatctcctcagacgccgagatgcgggtcacggcgccccgaaccctcctcctgctgctctggggggcagtggccctgaccgagacctgggctggctcccactccatgaggtatttccacacctccgtgtcccggcccggccgcggggagccccgcttcatctcagtgggctacgtggacggcacccagttcgtgaggttcgacagcgacgccgcgagtccgaggacggagccccgggcgccgtggatagagcaagaggggccggagtattgggaccggaacacacagatctccaagaccaacacacagacttaccgagagagcctgcggaacctgcgcggctactacaaccagagcgaggccgggtctcacaccctccagaggatgtacggctgcgacgtggggccggacgggcgcctcctccgcgggcatgaccagtccgcctacgacggcaaggattacatcgccctgaacgaggacctgagctcctggaccgcggcggacaccgcggctcagatcacccagcgcaagtgggaggcggcccgtgtggcggagcagctgagagcctacctggagggcacgtgcgtggagtggctccgcagacacctggagaacgggaaggagacgctgcagcgcgcggaccccccaaagacacatgtgacccaccaccccatctctgaccatgaggccaccctgaggtgctgggccctgggcttctaccctgcggagatcacactgacctggcagcgggatggcgaggaccaaactcaggacaccgagcttgtggagaccagaccagcaggagatagaaccttccagaagtgggcagctgtggtggtgccttctggagaagagcagagatacacatgccatgtacagcatgaggggctgccgaagcccctcaccctgagatgggagccatcttcccagtccaccatccccatcgtgggcattgttgctggcctggctgtcctagcagttgtggtcatcggagctgtggtcgctactgtgatgtgtaggaggaagagctcaggtggaaaaggagggagctactctcaggctgcgtccagcgacagtgcccagggctctgatgtgtctctcacagcttgaaaagcctgagacagctgtcttgtgagggaccgagatgcaggatttcttcacgcctcccctttgtgacttcaagagcctctggcatctctttctgcaaaggcacctgaatgtgtctgcgtccctgttagcataatgtgaggaggtggagagacagctcacccccgtgtccaccgtgacccctgttcccatgctgacctgtgtttcctccccagtcatctttcttgttccagagaggtggggctggatgtctccatctctgtctcaactttatgtgcactgagctgcaacttcttacttccctactgaaaataagaatctgaatataaatttgttttctcaaatatttgctatgagaggttgatggattaattaaataagtcaattcctggaatttgagagagcaaataaagacctgagaaccttccagaa

SEQ ID NO: 150731 - DNA, 1605 bp, Homo sapiens
  Payload ID: 9761
  Gene Symbol: HLA-B
  Gene Name: major histocompatibility complex, class I, B
  Uniprot ID: P30464
  ENST ID: ENST00000450871
  CDS Start-End: 88-1176
tctagagaagccaatcagtgtcgccggggtcccagttctaaagtccccacgcacccacccggactcaaaatctcctcagacgccgagatgcgggtcacggcgccccgaaccgtcctcctgctgctctcgggagccctggccctgaccgagacctgggccggctcccactccatgaggtatttctacaccgccatgtcccggcccggccgcggggagccccgcttcatcgcagtgggctacgtggacgacacccagttcgtgaggttcgacagcgacgccgcgagtccgaggatggcgccccgggcgccatggatagagcaggaggggccggagtattgggaccgggagacacagatctccaagaccaacacacagacttaccgagagagcctgcggaacctgcgcggctactacaaccagagcgaggccgggtctcacaccctccagaggatgtacggctgcgacgtggggccggacgggcgcctcctccgcgggcatgaccagtccgcctacgacggcaaggattacatcgccctgaacgaggacctgagctcctggaccgcggcggacacggcggctcagatcacccagcgcaagtgggaggcggcccgtgaggcggagcagtggagagcctacctggagggcctgtgcgtggagtggctccgcagatacctggagaacgggaaggagacgctgcagcgcgcggaccccccaaagacacatgtgacccaccaccccatctctgaccatgaggccaccctgaggtgctgggccctgggcttctaccctgcggagatcacactgacctggcagcgggatggcgaggaccaaactcaggacaccgagcttgtggagaccagaccagcaggagatagaaccttccagaagtgggcagctgtggtggtgccttctggagaagagcagagatacacatgccatgtacagcatgaggggctgccgaagcccctcaccctgagatgggagccatcttcccagtccaccatccccatcgtgggcattgttgctggcctggctgtcctagcagttgtggtcatcggagctgtggtcgctactgtgatgtgtaggaggaagagctcaggtggaaaaggagggagctactctcaggctgcgtccagcgacagtgcccagggctctgatgtgtctctcacagcttgaaaagcctgagacagctgtcttgtgagggaccgagatgcaggatttcttcacgcctcccctttgtgacttcaagagcctctggcatctctttctgcaaaggcacctgaatgtgtctgcgtccctgttagcataatgtgaggaggtggagagacagcccacccttgtgtccactgtgacccctgttcccatgctgatctgtgtttcctccccagtcatctttcttgttccagagaggtggggctggatgtctccatctctgtctcaactttatgtgcactgagctgcaacttcttacttccctactgaaaataagaatctgaatataaatttgttttctcaaatatttgctatgagaggttgatggattaattaaataagtcaattcctggaatttgaaagagcaaataaagacctgagaaccttccagaa

SEQ ID NO: 150732 - DNA, 1154 bp, Homo sapiens
  Payload ID: 9761
  Gene Symbol: HLA-B
  Gene Name: major histocompatibility complex, class I, B
  ENST ID: ENST00000416726
  CDS Start-End: 1-725
ggccggacgggcgcctcctccgcgggcataaccagtacgcctacgacggcaaggattacatcgccctgaacgaggacctgcgctcctggaccgcggcggacaccgcggctcagatcacccagcgcaagtgggaggcggcccgtgtggcggagcaggacagagcctacctggagggcacgtgcgtggagtggctccgcagatacctggagaacgggaaggacacgctggagcgcgcggaccccccaaagacacacgtgacccaccaccccatctctgaccatgaggccaccctgaggtgctgggccctgggcttctaccctgcggagatcacactgacctggcagcgggatggcgaggaccaaactcaggacactgagcttgtggagaccagaccagcaggagatagaaccttccagaagtgggcagctgtggtggtgccttctggagaagagcagagatacacatgccatgtacagcatgaggggctgccgaagcccctcaccctgagatgggagccgtcttcccagtccaccgtccccatcgtgggcattgttgctggcctggctgtcctagcagttgtggtcatcggagctgtggtcgctgctgtgatgtgtaggaggaagagctcagggcattttcttcccacaggtggaaaaggagggagctactctcaggctgcgtgcagcgacagtgcccagggctctgatgtgtctctcacagcttgaaaagcctgagacagctgtcttgtgagggactgagatgcaggatttcttcacgcctcccctttgtgacttcaagagcctctggcatctctttctgcaaaggcacctgaatgtgtctgcgtccctgttagcataatgtgaggaggtggagagacagcccacccttgtgtccactgtgacccctgttcccatgctgacctgtgtttcctccccagtcatctttcttgttccagagaggtggggctggatgtctccatctctgtctcaactttacgtgcactgagctgcaacttcttacttccctactgaaaataagaatctgaatataaatttgttttctcaaatatttgctatgagaggttgatggattaattaaataagtcaattcctggaatttgagagagcaaataaagacctgagaaccttccagaa

SEQ ID NO: 150733 - DNA, 864 bp, Homo sapiens
  Payload ID: 9761
  Gene Symbol: HLA-B
  Gene Name: major histocompatibility complex, class I, B
  ENST ID: ENST00000437866
  CDS Start-End: 127-864
cccggactcaaaatctcctcagacgccgagatgcgggtcacggcgccccgaaccgtcctcctgctgctctcgggagccctggccctgaccgagacctgggccggtgagtgcggggtcggcagggaaatggcctctgtggggaggagcgaggggaccgcaggcgggggcgcaggacccggggagccgcgccgggaggagggtcgggcgggtctcagcccctcctcgcccccaggctcccactccatgaggtatttctacaccgccatgtcccggcccggccgcggggagccccgcttcatcgcagtgggctacgtggacgacacccagttcgtgaggttcgacagcgacgccgcgagtccgaggatggcgccccgggcgccatggatagagcaggaggggccggagtattgggaccgggagacacagatctccaagaccaacacacagacttaccgagagagcctgcggaacctgcgcggctactacaaccagagcgaggccgggtctcacaccctccagaggatgtacggctgcgacgtggggccggacgggcgcctcctccgcgggcatgaccagtccgcctacgacggcaaggattacatcgccctgaacgaggacctgagctcctggaccgcggcggacacggcggctcagatcacccagcgcaagtgggaggcggcccgtgaggcggagcagtggagagcctacctggagggcctgtgcgtggagtggctccgcagatacctggagaacgggaaggagacgctgcagcgcgcggaccccccaaagacacatgtgacccaccaccccatctctgaccatgaggccaccctgaggtgctgggccctgggcttctaccctgcg

SEQ ID NO: 150734 - DNA, 738 bp, Homo sapiens
  Payload ID: 9761
  Gene Symbol: HLA-B
  Gene Name: major histocompatibility complex, class I, B
  ENST ID: ENST00000445610
  CDS Start-End: 1-738
atggcctctgtggggaggagagaggggaccgcaggcgggggcgcaggacccggggagccgcgccgggaggagggtcgggcgggtctcagcccctcctcgcccccaggctcccactccatgaggtatttctacaccgccatgtcccggcccggccgcggggagccccgcttcatcaccgtgggctacgtggacgacacgctgttcgtgaggttcgacagcgacgccacgagtccgaggaaggagccgcgggcgccatggatagagcaggaggggccggagtattgggaccgggagacacagatctccaagaccaacacacagacttaccgagagaacctgcgcaccgcgctccgctactacaaccagagcgaggccgggtctcacatcatccagaggatgtacggctgcgacgtggggccggacgggcgcctcctccgcgggtatgaccaggacgcctacgacggcaaggattacatcgccctgaacgaggacctgagctcctggaccgcggcggacaccgcggctcagatcacccagcgcaagtgggaggcggcccgtgtggcggagcaggacagagcctacctggagggcctgtgcgtggagtcgctccgcagatacctggagaacgggaaggagacgctgcagcgcgcggaccccccaaagacacatgtgacccaccaccccatctctgaccatgaggtcaccctgaggtgctgggccctgggcttctaccctgcg

SEQ ID NO: 150735 - DNA, 1154 bp, Homo sapiens
  Payload ID: 9761
  Gene Symbol: HLA-B
  Gene Name: major histocompatibility complex, class I, B
  ENST ID: ENST00000437265
  CDS Start-End: 1-725
ggccggacgggcgcctcctccgcgggtatgaccaggacgcctacgacggcaaggattacatcgccctgaacgaggacctgagctcctggaccgcggcggacaccgcggctcagatcacccagcgcaagtgggaggcggcccgtgtggcggagcaggacagagcctacctggagggcctgtgcgtggagtcgctccgcagatacctggagaacgggaaggagacgctgcagcgcgcggaccccccaaagacacatgtgacccaccaccccatctctgaccatgaggtcaccctgaggtgctgggccctgggcttctaccctgcggagatcacactgacctggcagcgggatggcgaggaccaaactcaggacaccgagcttgtggagaccagaccagcaggagatagaaccttccagaagtgggcagctgtggtggtgccttctggagaagagcagagatacacatgccatgtacagcatgaggggctgccgaagcccctcaccctgagatgggagccgtcttcccagtccaccgtccccatcgtgggcattgttgctggcctggctgtcctagcagttgtggtcatcggagctgtggtcgctgctgtgatgtgtaggaggaagagctcagggcattttcttcccacaggtggaaaaggagggagctactctcaggctgcgtgcagcgacagtgcccagggctctgatgtgtctctcacagcttgaaaagcctgagacagctgtcttgtgagggactgagatgcaggatttcttcacgcctcccctttgtgacttcaagagcctctggcatctctttctgcaaaggcacctgaatgtgtctgcgtccctgttagcataatgtgaggaggtggagagacagcccacccccgtgtccaccgtgacccctgttcccatgctgacttgtgtttcctccccagtcatctttcctgttccagagaggtggggctggatgtctccatctctgtctcaactttatgtgcactgagctgcaacttcttacttccctactgaaaataagaatctgaatataaatttgttttctcaaatatttgctatgagaggttgatggattaattaaataagtcaattcctggaatttgagagagcaaataaagacctgagaaccttccagaa

SEQ ID NO: 150736 - DNA, 1547 bp, Homo sapiens
  Payload ID: 9761
  Gene Symbol: HLA-B
  Gene Name: major histocompatibility complex, class I, B
  Uniprot ID: P01889
  ENST ID: ENST00000412585
  CDS Start-End: 30-1118
ccggactcagagtctcctcagacgccgagatgctggtcatggcgccccgaaccgtcctcctgctgctctcggcggccctggccctgaccgagacctgggccggctcccactccatgaggtatttctacacctccgtgtcccggcccggccgcggggagccccgcttcatctcagtgggctacgtggacgacacccagttcgtgaggttcgacagcgacgccgcgagtccgagagaggagccgcgggcgccgtggatagagcaggaggggccggagtattgggaccggaacacacagatctacaaggcccaggcacagactgaccgagagagcctgcggaacctgcgcggctactacaaccagagcgaggccgggtctcacaccctccagagcatgtacggctgcgacgtggggccggacgggcgcctcctccgcgggcatgaccagtacgcctacgacggcaaggattacatcgccctgaacgaggacctgcgctcctggaccgccgcggacacggcggctcagatcacccagcgcaagtgggaggcggcccgtgaggcggagcagcggagagcctacctggagggcgagtgcgtggagtggctccgcagatacctggagaacgggaaggacaagctggagcgcgctgaccccccaaagacacacgtgacccaccaccccatctctgaccatgaggccaccctgaggtgctgggccctgggtttctaccctgcggagatcacactgacctggcagcgggatggcgaggaccaaactcaggacactgagcttgtggagaccagaccagcaggagatagaaccttccagaagtgggcagctgtggtggtgccttctggagaagagcagagatacacatgccatgtacagcatgaggggctgccgaagcccctcaccctgagatgggagccgtcttcccagtccaccgtccccatcgtgggcattgttgctggcctggctgtcctagcagttgtggtcatcggagctgtggtcgctgctgtgatgtgtaggaggaagagttcaggtggaaaaggagggagctactctcaggctgcgtgcagcgacagtgcccagggctctgatgtgtctctcacagcttgaaaagcctgagacagctgtcttgtgagggactgagatgcaggatttcttcacgcctcccctttgtgacttcaagagcctctggcatctctttctgcaaaggcacctgaatgtgtctgcgtccctgttagcataatgtgaggaggtggagagacagcccacccttgtgtccactgtgacccctgttcccatgctgacctgtgtttcctccccagtcatctttcttgttccagagaggtggggctggatgtctccatctctgtctcaactttacgtgcactgagctgcaacttcttacttccctactgaaaataagaatctgaatataaatttgttttctcaaatatttgctatgagaggttgatggattaattaaataagtcaattcctggaatttgagagagcaaataaagacctgagaaccttccagaa

SEQ ID NO: 150737 - DNA, 863 bp, Homo sapiens
  Payload ID: 9761
  Gene Symbol: HLA-B
  Gene Name: major histocompatibility complex, class I, B
  ENST ID: ENST00000445222
  CDS Start-End: 126-863
cccggactcagagtctcctcagacgccgagatgctggtcatggcgccccgaaccgtcctcctgctgctctcggcggccctggccctgaccgagacctgggccggtgagtgcgggtcgggagggaaatggcctctgccgggaggagcgaggggaccgcaggcgggggcgcaggacctgaggagccgcgccgggaggagggtcgggcgggtctcagcccctcctcgcccccaggctcccactccatgaggtatttcgacaccgccatgtcccggcccggccgcggggagccccgcttcatctcagtgggctacgtggacgacacgcagttcgtgaggttcgacagcgacgccgcgagtccgagagaggagccgcgggcgccgtggatagagcaggaggggccggagtattgggaccggaacacacagatcttcaagaccaacacacagactgaccgagagagcctgcggaacctgcgcggctactacaaccagagcgaggccgggtctcacaccctccagagcatgtacggctgcgacgtggggccggacgggcgcctcctccgcgggcataaccagtacgcctacgacggcaaggattacatcgccctgaacgaggacctgcgctcctggaccgcggcggacaccgcggctcagatcacccagcgcaagtgggaggcggcccgtgtggcggagcaggacagagcctacctggagggcacgtgcgtggagtggctccgcagatacctggagaacgggaaggacacgctggagcgcgcggaccccccaaagacacacgtgacccaccaccccatctctgaccatgaggccaccctgaggtgctgggccctgggcttctaccctgcg

SEQ ID NO: 150738 - DNA, 1605 bp, Homo sapiens
  Payload ID: 9761
  Gene Symbol: HLA-B
  Gene Name: major histocompatibility complex, class I, B
  Uniprot ID: P30460
  ENST ID: ENST00000425848
  CDS Start-End: 88-1176
tctagagaagccaatcagcgtcgccggggtcccagttctaaagtccccacgcacccacccggactcagagtctcctcagacgccgagatgctggtcatggcgccccgaaccgtcctcctgctgctctcggcggccctggccctgaccgagacctgggccggctcccactccatgaggtatttcgacaccgccatgtcccggcccggccgcggggagccccgcttcatctcagtgggctacgtggacgacacgcagttcgtgaggttcgacagcgacgccgcgagtccgagagaggagccgcgggcgccgtggatagagcaggaggggccggagtattgggaccggaacacacagatcttcaagaccaacacacagactgaccgagagagcctgcggaacctgcgcggctactacaaccagagcgaggccgggtctcacaccctccagagcatgtacggctgcgacgtggggccggacgggcgcctcctccgcgggcataaccagtacgcctacgacggcaaggattacatcgccctgaacgaggacctgcgctcctggaccgcggcggacaccgcggctcagatcacccagcgcaagtgggaggcggcccgtgtggcggagcaggacagagcctacctggagggcacgtgcgtggagtggctccgcagatacctggagaacgggaaggacacgctggagcgcgcggaccccccaaagacacacgtgacccaccaccccatctctgaccatgaggccaccctgaggtgctgggccctgggcttctaccctgcggagatcacactgacctggcagcgggatggcgaggaccaaactcaggacactgagcttgtggagaccagaccagcaggagatagaaccttccagaagtgggcagctgtggtggtgccttctggagaagagcagagatacacatgccatgtacagcatgaggggctgccgaagcccctcaccctgagatgggagccgtcttcccagtccaccgtccccatcgtgggcattgttgctggcctggctgtcctagcagttgtggtcatcggagctgtggtcgctgctgtgatgtgtaggaggaagagctcaggtggaaaaggagggagctactctcaggctgcgtgcagcgacagtgcccagggctctgatgtgtctctcacagcttgaaaagcctgagacagctgtcttgtgagggactgagatgcaggatttcttcacgcctcccctttgtgacttcaagagcctctggcatctctttctgcaaaggcacctgaatgtgtctgcgtccctgttagcataatgtgaggaggtggagagacagcccacccttgtgtccactgtgacccctgttcccatgctgacctgtgtttcctccccagtcatctttcttgttccagagaggtggggctggatgtctccatctctgtctcaactttacgtgcactgagctgcaacttcttacttccctactgaaaataagaatctgaatataaatttgttttctcaaatatttgctatgagaggttgatggattaattaaataagtcaattcctggaatttgagagagcaaataaagacctgagaaccttccagaa

SEQ ID NO: 150739 - DNA, 1154 bp, Homo sapiens
  Payload ID: 9761
  Gene Symbol: HLA-B
  Gene Name: major histocompatibility complex, class I, B
  ENST ID: ENST00000425798
  CDS Start-End: 1-725
ggccggacgggcgcctcctccgcgggcatgaccagtccgcctacgacggcaaggattacatcgccctgaacgaggacctgagctcctggaccgcggcggacacggcggctcagatcacccagcgcaagtgggaggcggcccgtgaggcggagcagtggagagcctacctggagggcctgtgcgtggagtggctccgcagatacctggagaacgggaaggagacgctgcagcgcgcggaccccccaaagacacatgtgacccaccaccccatctctgaccatgaggccaccctgaggtgctgggccctgggcttctaccctgcggagatcacactgacctggcagcgggatggcgaggaccaaactcaggacaccgagcttgtggagaccagaccagcaggagatagaaccttccagaagtgggcagctgtggtggtgccttctggagaagagcagagatacacatgccatgtacagcatgaggggctgccgaagcccctcaccctgagatgggagccatcttcccagtccaccatccccatcgtgggcattgttgctggcctggctgtcctagcagttgtggtcatcggagctgtggtcgctactgtgatgtgtaggaggaagagctcaggacattttcttcccacaggtggaaaaggagggagctactctcaggctgcgtccagcgacagtgcccagggctctgatgtgtctctcacagcttgaaaagcctgagacagctgtcttgtgagggaccgagatgcaggatttcttcacgcctcccctttgtgacttcaagagcctctggcatctctttctgcaaaggcacctgaatgtgtctgcgtccctgttagcataatgtgaggaggtggagagacagcccacccttgtgtccactgtgacccctgttcccatgctgatctgtgtttcctccccagtcatctttcttgttccagagaggtggggctggatgtctccatctctgtctcaactttatgtgcactgagctgcaacttcttacttccctactgaaaataagaatctgaatataaatttgttttctcaaatatttgctatgagaggttgatggattaattaaataagtcaattcctggaatttgaaagagcaaataaagacctgagaaccttccagaa

SEQ ID NO: 150740 - DNA, 1154 bp, Homo sapiens
  Payload ID: 9761
  Gene Symbol: HLA-B
  Gene Name: major histocompatibility complex, class I, B
  ENST ID: ENST00000436729
  CDS Start-End: 1-725
ggccggacgggcgcctcctccgcgggtatgaccaggacgcctacgacggcaaggattacatcgccctgaacgaggacctgagctcctggaccgcggcggacaccgcggctcagatcacccagcgcaagtgggaggcggcccgtgtggcggagcagctgagagcctacctggagggcctgtgcgtggagtcgctccgcagatacctggagaacgggaaggagacgctgcagcgcgcggaccccccaaagacacatgtgacccaccaccccatctctgaccatgaggtcaccctgaggtgctgggccctgggcttctaccctgcggagatcacactgacctggcagcgggatggcgaggaccaaactcaggacaccgagcttgtggagaccagaccagcaggagatagaaccttccagaagtgggcagctgtggtggtgccttctggagaagagcagagatacacatgccatgtacagcatgaggggctgccgaagcccctcaccctgagatgggagccgtcttcccagtccaccgtccccatcgtgggcattgttgctggcctggctgtcctagcagttgtggtcatcggagctgtggtcgctgctgtgatgtgtaggaggaagagctcagggcattttcttcccacaggtggaaaaggagggagctactctcaggctgcgtgcagcgacagtgcccagggctctgatgtgtctctcacagcttgaaaagcctgagacagctgtcttgtgagggactgagatgcaggatttcttcacgcctcccctttgtgacttcaagagcctctggcatctctttctgcaaaggcacctgaatgtgtctgcgtccctgttagcataatgtgaggaggtggagagacagcccacccccgtgtccaccgtgacccctgttcccatgctgacttgtgtttcctccccagtcatctttcctgttccagagaggtggggctggatgtctccatctctgtctcaactttatgtgcactgagctgcaacttcttacttccctactgaaaataagaatctgaatataaatttgttttctcaaatatttgctatgagaggttgatggattaattaaataagtcaattcctggaatttgagagagcaaataaagacctgagaaccttccagaa

SEQ ID NO: 150741 - DNA, 1605 bp, Homo sapiens
  Payload ID: 9761
  Gene Symbol: HLA-B
  Gene Name: major histocompatibility complex, class I, B
  Uniprot ID: P30461
  ENST ID: ENST00000435618
  CDS Start-End: 88-1176
tctagagaagccaatcagtgtcgccggggtcccagttctaaagtccccacgcacccacccggactcagaatctcctcagacgccgagatgcgggtcacggcgccccgaaccctcctcctgctgctctggggggcagtggccctgaccgagacctgggccggctcccactccatgaggtatttctacaccgccatgtcccggcccggccgcggggagccccgcttcatcaccgtgggctacgtggacgacacgctgttcgtgaggttcgacagcgacgccacgagtccgaggaaggagccgcgggcgccatggatagagcaggaggggccggagtattgggaccgggagacacagatctccaagaccaacacacagacttaccgagagaacctgcgcaccgcgctccgctactacaaccagagcgaggccgggtctcacatcatccagaggatgtacggctgcgacgtggggccggacgggcgcctcctccgcgggtatgaccaggacgcctacgacggcaaggattacatcgccctgaacgaggacctgagctcctggaccgcggcggacaccgcggctcagatcacccagcgcaagtgggaggcggcccgtgtggcggagcagctgagagcctacctggagggcctgtgcgtggagtcgctccgcagatacctggagaacgggaaggagacgctgcagcgcgcggaccccccaaagacacatgtgacccaccaccccatctctgaccatgaggtcaccctgaggtgctgggccctgggcttctaccctgcggagatcacactgacctggcagcgggatggcgaggaccaaactcaggacaccgagcttgtggagaccagaccagcaggagatagaaccttccagaagtgggcagctgtggtggtgccttctggagaagagcagagatacacatgccatgtacagcatgaggggctgccgaagcccctcaccctgagatgggagccgtcttcccagtccaccgtccccatcgtgggcattgttgctggcctggctgtcctagcagttgtggtcatcggagctgtggtcgctgctgtgatgtgtaggaggaagagctcaggtggaaaaggagggagctactctcaggctgcgtgcagcgacagtgcccagggctctgatgtgtctctcacagcttgaaaagcctgagacagctgtcttgtgagggactgagatgcaggatttcttcacgcctcccctttgtgacttcaagagcctctggcatctctttctgcaaaggcacctgaatgtgtctgcgtccctgttagcataatgtgaggaggtggagagacagcccacccccgtgtccaccgtgacccctgttcccatgctgacttgtgtttcctccccagtcatctttcctgttccagagaggtggggctggatgtctccatctctgtctcaactttatgtgcactgagctgcaacttcttacttccctactgaaaataagaatctgaatataaatttgttttctcaaatatttgctatgagaggttgatggattaattaaataagtcaattcctggaatttgagagagcaaataaagacctgagaaccttccagaa

SEQ ID NO: 150742 - DNA, 1589 bp, Homo sapiens
  Payload ID: 9761
  Gene Symbol: HLA-B
  Gene Name: major histocompatibility complex, class I, B
  Uniprot ID: P30481
  ENST ID: ENST00000421349
  CDS Start-End: 72-1160
agtgtcgccggggtcccagttctaaagtccccacgcacccacccggactcagaatctcctcagacgccgagatgcgggtcacggcgccccgaaccctcctcctgctgctctggggggcagtggccctgaccgagacctgggccggctcccactccatgaggtatttctacaccgccatgtcccggcccggccgcggggagccccgcttcatcaccgtgggctacgtggacgacacgctgttcgtgaggttcgacagcgacgccacgagtccgaggaaggagccgcgggcgccatggatagagcaggaggggccggagtattgggaccgggagacacagatctccaagaccaacacacagacttaccgagagaacctgcgcaccgcgctccgctactacaaccagagcgaggccgggtctcacatcatccagaggatgtacggctgcgacgtggggccggacgggcgcctcctccgcgggtatgaccaggacgcctacgacggcaaggattacatcgccctgaacgaggacctgagctcctggaccgcggcggacaccgcggctcagatcacccagcgcaagtgggaggcggcccgtgtggcggagcaggacagagcctacctggagggcctgtgcgtggagtcgctccgcagatacctggagaacgggaaggagacgctgcagcgcgcggaccccccaaagacacatgtgacccaccaccccatctctgaccatgaggtcaccctgaggtgctgggccctgggcttctaccctgcggagatcacactgacctggcagcgggatggcgaggaccaaactcaggacaccgagcttgtggagaccagaccagcaggagatagaaccttccagaagtgggcagctgtggtggtgccttctggagaagagcagagatacacatgccatgtacagcatgaggggctgccgaagcccctcaccctgagatgggagccgtcttcccagtccaccgtccccatcgtgggcattgttgctggcctggctgtcctagcagttgtggtcatcggagctgtggtcgctgctgtgatgtgtaggaggaagagctcaggtggaaaaggagggagctactctcaggctgcgtgcagcgacagtgcccagggctctgatgtgtctctcacagcttgaaaagcctgagacagctgtcttgtgagggactgagatgcaggatttcttcacgcctcccctttgtgacttcaagagcctctggcatctctttctgcaaaggcacctgaatgtgtctgcgtccctgttagcataatgtgaggaggtggagagacagcccacccccgtgtccaccgtgacccctgttcccatgctgacttgtgtttcctccccagtcatctttcctgttccagagaggtggggctggatgtctccatctctgtctcaactttatgtgcactgagctgcaacttcttacttccctactgaaaataagaatctgaatataaatttgttttctcaaatatttgctatgagaggttgatggattaattaaataagtcaattcctggaatttgagagagcaaataaagacctgagaaccttccagaa

SEQ ID NO: 150743 - DNA, 863 bp, Homo sapiens
  Payload ID: 9761
  Gene Symbol: HLA-B
  Gene Name: major histocompatibility complex, class I, B
  ENST ID: ENST00000434333
  CDS Start-End: 126-863
cccggactcagagtctcctcagacgccgagatgctggtcatggcgccccgaaccgtcctcctgctgctctcggcggccctggccctgaccgagacctgggccggtgagtgcgggtcgggagggaaatggcctctgccgggaggagcgaggggaccgcaggcgggggcgcaggacctgaggagccgcgccgggaggagggtcgggcgggtctcagcccctcctcacccccaggctcccactccatgaggtatttctacacctccgtgtcccggcccggccgcggggagccccgcttcatctcagtgggctacgtggacgacacccagttcgtgaggttcgacagcgacgccgcgagtccgagagaggagccgcgggcgccgtggatagagcaggaggggccggagtattgggaccggaacacacagatctacaaggcccaggcacagactgaccgagagagcctgcggaacctgcgcggctactacaaccagagcgaggccgggtctcacaccctccagagcatgtacggctgcgacgtggggccggacgggcgcctcctccgcgggcatgaccagtacgcctacgacggcaaggattacatcgccctgaacgaggacctgcgctcctggaccgccgcggacacggcggctcagatcacccagcgcaagtgggaggcggcccgtgaggcggagcagcggagagcctacctggagggcgagtgcgtggagtggctccgcagatacctggagaacgggaaggacaagctggagcgcgctgaccccccaaagacacacgtgacccaccaccccatctctgaccatgaggccaccctgaggtgctgggccctgggtttctaccctgcg

SEQ ID NO: 150744 - DNA, 1154 bp, Homo sapiens
  Payload ID: 9761
  Gene Symbol: HLA-B
  Gene Name: major histocompatibility complex, class I, B
  ENST ID: ENST00000418147
  CDS Start-End: 1-725
ggccggacgggcgcctcctccgcgggcatgaccagtccgcctacgacggcaaggattacatcgccctgaacgaggacctgagctcctggaccgcggcggacaccgcggctcagatcacccagcgcaagtgggaggcggcccgtgtggcggagcagctgagagcctacctggagggcacgtgcgtggagtggctccgcagacacctggagaacgggaaggagacgctgcagcgcgcggaccccccaaagacacatgtgacccaccaccccatctctgaccatgaggccaccctgaggtgctgggccctgggcttctaccctgcggagatcacactgacctggcagcgggatggcgaggaccaaactcaggacaccgagcttgtggagaccagaccagcaggagatagaaccttccagaagtgggcagctgtggtggtgccttctggagaagagcagagatacacatgccatgtacagcatgaggggctgccgaagcccctcaccctgagatgggagccatcttcccagtccaccatccccatcgtgggcattgttgctggcctggctgtcctagcagttgtggtcatcggagctgtggtcgctactgtgatgtgtaggaggaagagctcaggacattttcttcccacaggtggaaaaggagggagctactctcaggctgcgtccagcgacagtgcccagggctctgatgtgtctctcacagcttgaaaagcctgagacagctgtcttgtgagggaccgagatgcaggatttcttcacgcctcccctttgtgacttcaagagcctctggcatctctttctgcaaaggcacctgaatgtgtctgcgtccctgttagcataatgtgaggaggtggagagacagctcacccccgtgtccaccgtgacccctgttcccatgctgacctgtgtttcctccccagtcatctttcttgttccagagaggtggggctggatgtctccatctctgtctcaactttatgtgcactgagctgcaacttcttacttccctactgaaaataagaatctgaatataaatttgttttctcaaatatttgctatgagaggttgatggattaattaaataagtcaattcctggaatttgagagagcaaataaagacctgagaaccttccagaa

SEQ ID NO: 150745 - DNA, 820 bp, Homo sapiens
  Payload ID: 9761
  Gene Symbol: HLA-B
  Gene Name: major histocompatibility complex, class I, B
  ENST ID: ENST00000430299
  CDS Start-End: 83-820
gccccgaaccctcctcctgctgctctggggggcagtggccctgaccgagacctgggccggtgagtgcggggtcgggagggaaatggcctctgtggggaggagagaggggaccgcaggcgggggcgcaggacccggggagccgcgccgggaggagggtcgggcgggtctcagcccctcctcgcccccaggctcccactccatgaggtatttctacaccgccatgtcccggcccggccgcggggagccccgcttcatcaccgtgggctacgtggacgacacgctgttcgtgaggttcgacagcgacgccacgagtccgaggaaggagccgcgggcgccatggatagagcaggaggggccggagtattgggaccgggagacacagatctccaagaccaacacacagacttaccgagagaacctgcgcaccgcgctccgctactacaaccagagcgaggccgggtctcacatcatccagaggatgtacggctgcgacgtggggccggacgggcgcctcctccgcgggtatgaccaggacgcctacgacggcaaggattacatcgccctgaacgaggacctgagctcctggaccgcggcggacaccgcggctcagatcacccagcgcaagtgggaggcggcccgtgtggcggagcagctgagagcctacctggagggcctgtgcgtggagtcgctccgcagatacctggagaacgggaaggagacgctgcagcgcgcggaccccccaaagacacatgtgacccaccaccccatctctgaccatgaggtcaccctgaggtgctgggccctgggcttctaccctgcg

SEQ ID NO: 150746 - DNA, 1005 bp, Homo sapiens
  Payload ID: 9761
  Gene Symbol: HLA-B
  Gene Name: major histocompatibility complex, class I, B
  ENST ID: ENST00000479203
  CDS Start-End: 3-677
agatgcgggtcacggcgccccgaaccctcctcctgctgctctggggggcagtggccctgaccgagacctgggctggctcccactccatgaggtatttccacacctccgtgtcccggcccggccgcggggagccccgcttcatctcagtgggctacgtggacggcacccagttcgtgaggttcgacagcgacgccgcgagtccgaggacggagccccgggcgccgtggatagagcaagaggggccggagtattgggaccggaacacacagatctccaagaccaacacacagacttaccgagagagcctgcggaacctgcgcggctactacaaccagagcgaggccgggtctcacaccctccagaggatgtacggctgcgacgtggggccggacgggcgcctcctccgcgggcatgaccagtccgcctacgacggcaaggattacatcgccctgaacgaggacctgagctcctggaccgcggcggacaccgcggctcagatcacccagcgcaagtgggaggcggcccgtgtggcggagcagctgagagcctacctggagggcacgtgcgtggagtggctccgcagacacctggagaacgggaaggagacgctgcagcgcgcggatcaggagcagaagtctctgttccccgctcagagactcgaactttccaatgaatagattatcccagaccccccaaagacacatgtgacccaccaccccatctctgaccatgaggccaccctgaggtgctgggccctgggcttctaccctgcggagatcacactgacctggcagcgggatggcgaggaccaaactcaggacaccgagcttgtggagaccagaccagcaggagatagaaccttccagaagtgggcagctgtggtggtgccttctggagaagagcagagatacacatgccatgtacagcatgaggggctgccgaagcccctcaccctgagatgggagccatcttcccagtccaccatccccatcgtgggcattgttg

SEQ ID NO: 150747 - DNA, 1008 bp, Homo sapiens
  Payload ID: 9761
  Gene Symbol: HLA-B
  Gene Name: major histocompatibility complex, class I, B
  ENST ID: ENST00000498484
  CDS Start-End: 3-677
agatgcgggtcacggcgccccgaaccctcctcctgctgctctggggggcagtggccctgaccgagacctgggccggctcccactccatgaggtatttctacaccgccatgtcccggcccggccgcggggagccccgcttcatcaccgtgggctacgtggacgacacgctgttcgtgaggttcgacagcgacgccacgagtccgaggaaggagccgcgggcgccatggatagagcaggaggggccggagtattgggaccgggagacacagatctccaagaccaacacacagacttaccgagagaacctgcgcaccgcgctccgctactacaaccagagcgaggccgggtctcacatcatccagaggatgtacggctgcgacgtggggccggacgggcgcctcctccgcgggtatgaccaggacgcctacgacggcaaggattacatcgccctgaacgaggacctgagctcctggaccgcggcggacaccgcggctcagatcacccagcgcaagtgggaggcggcccgtgtggcggagcaggacagagcctacctggagggcctgtgcgtggagtcgctccgcagatacctggagaacgggaaggagacgctgcagcgcgcggatcaggagcagaagtccctgttccccgctcagagactcgaactttccaatgaataggagattatcccagaccccccaaagacacatgtgacccaccaccccatctctgaccatgaggtcaccctgaggtgctgggccctgggcttctaccctgcggagatcacactgacctggcagcgggatggcgaggaccaaactcaggacaccgagcttgtggagaccagaccagcaggagatagaaccttccagaagtgggcagctgtggtggtgccttctggagaagagcagagatacacatgccatgtacagcatgaggggctgccgaagcccctcaccctgagatgggagccgtcttcccagtccaccgtccccatcgtgggcattgttg

SEQ ID NO: 150748 - DNA, 1008 bp, Homo sapiens
  Payload ID: 9761
  Gene Symbol: HLA-B
  Gene Name: major histocompatibility complex, class I, B
  ENST ID: ENST00000471639
  CDS Start-End: 3-677
agatgcgggtcacggcgccccgaaccgtcctcctgctgctctcgggagccctggccctgaccgagacctgggccggctcccactccatgaggtatttctacaccgccatgtcccggcccggccgcggggagccccgcttcatcgcagtgggctacgtggacgacacccagttcgtgaggttcgacagcgacgccgcgagtccgaggatggcgccccgggcgccatggatagagcaggaggggccggagtattgggaccgggagacacagatctccaagaccaacacacagacttaccgagagagcctgcggaacctgcgcggctactacaaccagagcgaggccgggtctcacaccctccagaggatgtacggctgcgacgtggggccggacgggcgcctcctccgcgggcatgaccagtccgcctacgacggcaaggattacatcgccctgaacgaggacctgagctcctggaccgcggcggacacggcggctcagatcacccagcgcaagtgggaggcggcccgtgaggcggagcagtggagagcctacctggagggcctgtgcgtggagtggctccgcagatacctggagaacgggaaggagacgctgcagcgcgcggatcaggagcagaagtccctgttccccgctcagagactcgaactttccaatgaataggagattatcccagaccccccaaagacacatgtgacccaccaccccatctctgaccatgaggccaccctgaggtgctgggccctgggcttctaccctgcggagatcacactgacctggcagcgggatggcgaggaccaaactcaggacaccgagcttgtggagaccagaccagcaggagatagaaccttccagaagtgggcagctgtggtggtgccttctggagaagagcagagatacacatgccatgtacagcatgaggggctgccgaagcccctcaccctgagatgggagccatcttcccagtccaccatccccatcgtgggcattgttg

SEQ ID NO: 150749 - DNA, 1008 bp, Homo sapiens
  Payload ID: 9761
  Gene Symbol: HLA-B
  Gene Name: major histocompatibility complex, class I, B
  ENST ID: ENST00000481283
  CDS Start-End: 3-677
agatgcgggtcacggcgccccgaaccctcctcctgctgctctggggggcagtggccctgaccgagacctgggccggctcccactccatgaggtatttctacaccgccatgtcccggcccggccgcggggagccccgcttcatcaccgtgggctacgtggacgacacgctgttcgtgaggttcgacagcgacgccacgagtccgaggaaggagccgcgggcgccatggatagagcaggaggggccggagtattgggaccgggagacacagatctccaagaccaacacacagacttaccgagagaacctgcgcaccgcgctccgctactacaaccagagcgaggccgggtctcacatcatccagaggatgtacggctgcgacgtggggccggacgggcgcctcctccgcgggtatgaccaggacgcctacgacggcaaggattacatcgccctgaacgaggacctgagctcctggaccgcggcggacaccgcggctcagatcacccagcgcaagtgggaggcggcccgtgtggcggagcagctgagagcctacctggagggcctgtgcgtggagtcgctccgcagatacctggagaacgggaaggagacgctgcagcgcgcggatcaggagcagaagtccctgttccccgctcagagactcgaactttccaatgaataggagattatcccagaccccccaaagacacatgtgacccaccaccccatctctgaccatgaggtcaccctgaggtgctgggccctgggcttctaccctgcggagatcacactgacctggcagcgggatggcgaggaccaaactcaggacaccgagcttgtggagaccagaccagcaggagatagaaccttccagaagtgggcagctgtggtggtgccttctggagaagagcagagatacacatgccatgtacagcatgaggggctgccgaagcccctcaccctgagatgggagccgtcttcccagtccaccgtccccatcgtgggcattgttg

SEQ ID NO: 150750 - DNA, 1008 bp, Homo sapiens
  Payload ID: 9761
  Gene Symbol: HLA-B
  Gene Name: major histocompatibility complex, class I, B
  ENST ID: ENST00000461583
  CDS Start-End: 3-677
agatgctggtcatggcgccccgaaccgtcctcctgctgctctcggcggccctggccctgaccgagacctgggccggctcccactccatgaggtatttcgacaccgccatgtcccggcccggccgcggggagccccgcttcatctcagtgggctacgtggacgacacgcagttcgtgaggttcgacagcgacgccgcgagtccgagagaggagccgcgggcgccgtggatagagcaggaggggccggagtattgggaccggaacacacagatcttcaagaccaacacacagactgaccgagagagcctgcggaacctgcgcggctactacaaccagagcgaggccgggtctcacaccctccagagcatgtacggctgcgacgtggggccggacgggcgcctcctccgcgggcataaccagtacgcctacgacggcaaggattacatcgccctgaacgaggacctgcgctcctggaccgcggcggacaccgcggctcagatcacccagcgcaagtgggaggcggcccgtgtggcggagcaggacagagcctacctggagggcacgtgcgtggagtggctccgcagatacctggagaacgggaaggacacgctggagcgcgcggatcaggagcagaagtccctgttccccgctcagagactcgaactttccaatgaataggagattatcccagaccccccaaagacacacgtgacccaccaccccatctctgaccatgaggccaccctgaggtgctgggccctgggcttctaccctgcggagatcacactgacctggcagcgggatggcgaggaccaaactcaggacactgagcttgtggagaccagaccagcaggagatagaaccttccagaagtgggcagctgtggtggtgccttctggagaagagcagagatacacatgccatgtacagcatgaggggctgccgaagcccctcaccctgagatgggagccgtcttcccagtccaccgtccccatcgtgggcattgttg

SEQ ID NO: 150751 - DNA, 1536 bp, Homo sapiens
  Payload ID: 9762
  Gene Symbol: HLA-C
  Gene Name: major histocompatibility complex, class I, C
  Uniprot ID: P10321
  ENST ID: ENST00000376228
  CDS Start-End: 16-1116
tccccagaggccgagatgcgggtcatggcgccccgagccctcctcctgctgctctcgggaggcctggccctgaccgagacctgggcctgctcccactccatgaggtatttcgacaccgccgtgtcccggcccggccgcggagagccccgcttcatctcagtgggctacgtggacgacacgcagttcgtgcggttcgacagcgacgccgcgagtccgagaggggagccgcgggcgccgtgggtggagcaggaggggccggagtattgggaccgggagacacagaagtacaagcgccaggcacaggctgaccgagtgagcctgcggaacctgcgcggctactacaaccagagcgaggacgggtctcacaccctccagaggatgtctggctgcgacctggggcccgacgggcgcctcctccgcgggtatgaccagtccgcctacgacggcaaggattacatcgccctgaacgaggacctgcgctcctggaccgccgcggacaccgcggctcagatcacccagcgcaagttggaggcggcccgtgcggcggagcagctgagagcctacctggagggcacgtgcgtggagtggctccgcagatacctggagaacgggaaggagacgctgcagcgcgcagaacccccaaagacacacgtgacccaccaccccctctctgaccatgaggccaccctgaggtgctgggccctgggcttctaccctgcggagatcacactgacctggcagcgggatggggaggaccagacccaggacaccgagcttgtggagaccaggccagcaggagatggaaccttccagaagtgggcagctgtggtggtgccttctggacaagagcagagatacacgtgccatatgcagcacgaggggctgcaagagcccctcaccctgagctgggagccatcttcccagcccaccatccccatcatgggcatcgttgctggcctggctgtcctggttgtcctagctgtccttggagctgtggtcaccgctatgatgtgtaggaggaagagctcaggtggaaaaggagggagctgctctcaggctgcgtgcagcaacagtgcccagggctctgatgagtctctcatcacttgtaaagcctgagacagctgcctgtgtgggactgagatgcaggatttcttcacacctctcctttgtgacttcaagagcctctggcatctctttctgcaaaggcacctgaatgtgtctgcgttcctgttagcataatgtgaggaggtggagagacagcccacccccgtgtccaccgtgacccctgtccccacactgacctgtgttccctccccgatcatctttcctgttccagagaggtggggctggatgtctccatctctgtctcaaattcatggtgcactgagctgcaacttcttacttccctaatgaagttaagaacctgaatataaatttgtgttctcaaatatttgctatgaagcgttgatggattaattaaataagtcaattcctagaagttgagagagcaaataaagacctgagaaccttccagaa

SEQ ID NO: 150752 - DNA, 1538 bp, Homo sapiens
  Payload ID: 9762
  Gene Symbol: HLA-C
  Gene Name: major histocompatibility complex, class I, C
  ENST ID: ENST00000376237
  CDS Start-End: 35-430
cccacccggactcacattctccccagaggccgagatgcgggtcatggcgccccgagccctcctcctgctgctctcgggaggcctggccctgaccgagacctgggcctgctcccactccatgaggtatttcgacaccgccgtgtcccggcccggccgcggagagccccgcttcatctcagtgggctacgtggacgacacgcagttcgtgcggttcgacagcgacgccgcgagtccgagaggggagccgcgggcgccgtgggtggagcaggaggggccggagtattgggaccgggagacacagaagtacaagcgccaggcacaggctgaccgagtgagcctgcggaacctgcgcggctactacaaccagagcgaggacgaggatgtctggctgcgacctggggcccgacgggcgcctcctccgcgggtatgaccagtccgcctacgacggcaaggattacatcgccctgaacgaggacctgcgctcctggaccgccgcggacaccgcggctcagatcacccagcgcaagttggaggcggcccgtgcggcggagcagctgagagcctacctggagggcacgtgcgtggagtggctccgcagatacctggagaacgggaaggagacgctgcagcgcgcagaacccccaaagacacacgtgacccaccaccccctctctgaccatgaggccaccctgaggtgctgggccctgggcttctaccctgcggagatcacactgacctggcagcgggatggggaggaccagacccaggacaccgagcttgtggagaccaggccagcaggagatggaaccttccagaagtgggcagctgtggtggtgccttctggacaagagcagagatacacgtgccatatgcagcacgaggggctgcaagagcccctcaccctgagctgggagccatcttcccagcccaccatccccatcatgggcatcgttgctggcctggctgtcctggttgtcctagctgtccttggagctgtggtcaccgctatgatgtgtaggaggaagagctcaggtggaaaaggagggagctgctctcaggctgcgtgcagcaacagtgcccagggctctgatgagtctctcatcacttgtaaagcctgagacagctgcctgtgtgggactgagatgcaggatttcttcacacctctcctttgtgacttcaagagcctctggcatctctttctgcaaaggcacctgaatgtgtctgcgttcctgttagcataatgtgaggaggtggagagacagcccacccccgtgtccaccgtgacccctgtccccacactgacctgtgttccctccccgatcatctttcctgttccagagaggtggggctggatgtctccatctctgtctcaaattcatggtgcactgagctgcaacttcttacttccctaatgaagttaagaacctgaatataaatttgtgttctcaaatatttgctatgaagcgttgatggattaattaaataagtcaattcctagaagttgagagagcaaataaagacctgagaaccttccagaa

SEQ ID NO: 150753 - DNA, 1552 bp, Homo sapiens
  Payload ID: 9762
  Gene Symbol: HLA-C
  Gene Name: major histocompatibility complex, class I, C
  ENST ID: ENST00000383323
  CDS Start-End: 16-1134
tccccagacgccgagatgcgggtcatggcgccccgaaccctcatcctgctgctctcgggagccctggccctgaccgagacctgggcctgctcccactccatgaggtatttctacaccgccgtgtcccggcccggccgcggagagccccgcttcatcgcagtgggctacgtggacgacacgcagttcgtgcagttcgacagcgacgccgcgagtccaagaggggagccgcgggcgccgtgggtggagcaggaggggccggagtattgggaccgggagacacagaagtacaagcgccaggcacagactgaccgagtgaacctgcggaaactgcgcggctactacaaccagagcgaggccgggtctcacaccctccagaggatgtatggctgcgacctggggcccgacgggcgcctcctccgcgggtataaccagttcgcctacgacggcaaggattacatcgccctgaatgaggacctgcgctcctggaccgccgcggacaaggcggctcagatcacccagcgcaagtgggaggcggcccgtgaggcggagcagcggagagcctacctggagggcacgtgcgtggagtggctccgcagatacctggagaacgggaagaagacgctgcagcgcgcggaacacccaaagacacacgtgacccaccatcccgtctctgaccatgaggccaccctgaggtgctgggccctgggcttctaccctgcggagatcacactgacctggcagcgggatggcgaggaccaaactcaggacaccgagcttgtggagaccaggccagcaggagatggaaccttccagaagtgggcagctgtggtggtgccttctggagaagagcagagatacacgtgccatgtgcagcacgaggggctgccagagcccctcaccctgagatgggggccatcttcccagcccaccatccccatcgtgggcatcgttgctggcctggctgtcctggctgtcctagctgtcctaggagctgtgatggctgttgtgatgtgtaggaggaagagctcagggcattttcttcccacaggtggaaaaggagggagctgctctcaggctgcgtccagcaacagtgcccagggctctgatgagtctctcatcgcttgtaaagcctgagacagctgcctgtgtgggactgagatgcaggatttcttcacacctttcctttgtgacttcaagagcctctggcatctctttctgcaaaggcatctgaatgtgtctgcgttcctgttagcataatgtgaggaggtggagagacagcccacccccgtgtccaccgtgacccctgtccccacactgacctgtgttccctccccgatcatctttcctgttccagagaagtgggctggatgtctccatctctgtctcaactttacgtgtactgagctgcaacttcttacttccctactgaaaataagaatctgaatataaatttgttttctcaaatatttgctatgagaggttgatggattaattaaataagtcaattcctggaagttgagagagcaaataaagacctgagaaccttccagaa

SEQ ID NO: 150754 - DNA, 1554 bp, Homo sapiens
  Payload ID: 9762
  Gene Symbol: HLA-C
  Gene Name: major histocompatibility complex, class I, C
  ENST ID: ENST00000383329
  CDS Start-End: 16-1134
tccccagaggccgagatgcgggtcatggcgccccgagccctcctcctgctgctctcgggaggcctggccctgaccgagacctgggcctgctcccactccatgaggtatttcgacaccgccgtgtcccggcccggccgcggagagccccgcttcatctcagtgggctacgtggacgacacgcagttcgtgcggttcgacagcgacgccgcgagtccgagaggggagccgcgggcgccgtgggtggagcaggaggggccggagtattgggaccgggagacacagaagtacaagcgccaggcacaggctgaccgagtgagcctgcggaacctgcgcggctactacaaccagagcgaggacgggtctcacaccctccagaggatgtctggctgcgacctggggcccgacgggcgcctcctccgcgggtatgaccagtccgcctacgacggcaaggattacatcgccctgaacgaggacctgcgctcctggaccgccgcggacaccgcggctcagatcacccagcgcaagttggaggcggcccgtgcggcggagcagctgagagcctacctggagggcacgtgcgtggagtggctccgcagatacctggagaacgggaaggagacgctgcagcgcgcagaacccccaaagacacacgtgacccaccaccccctctctgaccatgaggccaccctgaggtgctgggccctgggcttctaccctgcggagatcacactgacctggcagcgggatggggaggaccagacccaggacaccgagcttgtggagaccaggccagcaggagatggaaccttccagaagtgggcagctgtggtggtgccttctggacaagagcagagatacacgtgccatatgcagcacgaggggctgcaagagcccctcaccctgagctgggagccatcttcccagcccaccatccccatcatgggcatcgttgctggcctggctgtcctggttgtcctagctgtccttggagctgtggtcaccgctatgatgtgtaggaggaagagctcagggcattttcttcccacaggtggaaaaggagggagctgctctcaggctgcgtgcagcaacagtgcccagggctctgatgagtctctcatcacttgtaaagcctgagacagctgcctgtgtgggactgagatgcaggatttcttcacacctctcctttgtgacttcaagagcctctggcatctctttctgcaaaggcacctgaatgtgtctgcgttcctgttagcataatgtgaggaggtggagagacagcccacccccgtgtccaccgtgacccctgtccccacactgacctgtgttccctccccgatcatctttcctgttccagagaggtggggctggatgtctccatctctgtctcaaattcatggtgcactgagctgcaacttcttacttccctaatgaagttaagaacctgaatataaatttgtgttctcaaatatttgctatgaagcgttgatggattaattaaataagtcaattcctagaagttgagagagcaaataaagacctgagaaccttccagaa

SEQ ID NO: 150755 - DNA, 1530 bp, Homo sapiens
  Payload ID: 9762
  Gene Symbol: HLA-C
  Gene Name: major histocompatibility complex, class I, C
  ENST ID: ENST00000383483
  CDS Start-End: 16-1209
tccccagacgccgagatgcgggtcatggcgccccgaaccctcatcctgctgctctcgggagccctggccctgaccgagacctgggcctgctcccactccatgaggtatttctacaccgccgtgtcccggcccggccgcggagagccccgcttcatcgcagtgggctacgtggacgacacgcagttcgtgcagttcgacagcgacgccgcgagtccaagaggggagccgcgggcgccgtgggtggagcaggaggggccggagtattgggaccgggagacacagaagtacaagcgccaggcacagactgaccgagtgaacctgcggaaactgcgcggctactacaaccagagcgaggccgggtctcacaccctccagaggatgtatggctgcgacctggggcccgacgggcgcctcctccgcgggtataaccagttcgcctacgacggcaaggattacatcgccctgaatgaggacctgcgctcctggaccgccgcggacaaggcggctcagatcacccagcgcaagtgggaggcggcccgtgaggcggagcagcggagagcctacctggagggcacgtgcgtggagtggctccgcagatacctggagaacgggaagaagacgctgcagcgcgcggaacacccaaagacacacgtgacccaccatcccgtctctgaccatgaggccaccctgaggtgctgggccctgggcttctaccctgcggagatcacactgacctggcagcgggatggcgaggaccaaactcaggacaccgagcttgtggagaccaggccagcaggagatggaaccttccagaagtgggcagctgtggtggtgccttctggagaagagcagagatacacgtgccatgtgcagcacgaggggctgccagagcccctcaccctgagatgggggccatcttcccagcccaccatccccatcgtgggcatcgttgctggcctggctgtcctggctgtcctagctgtcctaggagctgtgatggctgttgtgatgtgtaggaggaagagctcaggtagggaaggggtgaggagtggggtctggccagcaacagtgcccagggctctgatgagtctctcatcgcttgtaaagcctgagacagctgcctgtgtgggactgagatgcaggatttcttcacacctttcctttgtgacttcaagagcctctggcatctctttctgcaaaggcatctgaatgtgtctgcgttcctgttagcataatgtgaggaggtggagagacagcccacccccgtgtccaccgtgacccctgtccccacactgacctgtgttccctccccgatcatctttcctgttccagagaagtgggctggatgtctccatctctgtctcaactttacgtgtactgagctgcaacttcttacttccctactgaaaataagaatctgaatataaatttgttttctcaaatatttgctatgagaggttgatggattaattaaataagtcaattcctggaagttgagagagcaaataaagacctgagaaccttccagaa

SEQ ID NO: 150756 - DNA, 1552 bp, Homo sapiens; identical to SEQ ID NO: 150753
  Payload ID: 9762
  Gene Symbol: HLA-C
  Gene Name: major histocompatibility complex, class I, C
  ENST ID: ENST00000383487
  CDS Start-End: 16-1134

SEQ ID NO: 150757 - DNA, 1599 bp, Homo sapiens
  Payload ID: 9762
  Gene Symbol: HLA-C
  Gene Name: major histocompatibility complex, class I, C
  Uniprot ID: P30504
  ENST ID: ENST00000400341
  CDS Start-End: 81-1181
aagccaatcagcgtctccgcagtcccggttctaaagtccccagtcacccacccggactcggattctccccagacgccgagatgcgggtcatggcgccccgaaccctcatcctgctgctctcgggagccctggccctgaccgagacctgggcctgctcccactccatgaggtatttctacaccgccgtgtcccggcccggccgcggagagccccgcttcatcgcagtgggctacgtggacgacacgcagttcgtgcagttcgacagcgacgccgcgagtccaagaggggagccgcgggcgccgtgggtggagcaggaggggccggagtattgggaccgggagacacagaagtacaagcgccaggcacagactgaccgagtgaacctgcggaaactgcgcggctactacaaccagagcgaggccgggtctcacaccctccagaggatgtatggctgcgacctggggcccgacgggcgcctcctccgcgggtataaccagttcgcctacgacggcaaggattacatcgccctgaatgaggacctgcgctcctggaccgccgcggacaaggcggctcagatcacccagcgcaagtgggaggcggcccgtgaggcggagcagcggagagcctacctggagggcacgtgcgtggagtggctccgcagatacctggagaacgggaagaagacgctgcagcgcgcggaacacccaaagacacacgtgacccaccatcccgtctctgaccatgaggccaccctgaggtgctgggccctgggcttctaccctgcggagatcacactgacctggcagcgggatggcgaggaccaaactcaggacaccgagcttgtggagaccaggccagcaggagatggaaccttccagaagtgggcagctgtggtggtgccttctggagaagagcagagatacacgtgccatgtgcagcacgaggggctgccagagcccctcaccctgagatgggggccatcttcccagcccaccatccccatcgtgggcatcgttgctggcctggctgtcctggctgtcctagctgtcctaggagctgtgatggctgttgtgatgtgtaggaggaagagctcaggtggaaaaggagggagctgctctcaggctgcgtccagcaacagtgcccagggctctgatgagtctctcatcgcttgtaaagcctgagacagctgcctgtgtgggactgagatgcaggatttcttcacacctttcctttgtgacttcaagagcctctggcatctctttctgcaaaggcatctgaatgtgtctgcgttcctgttagcataatgtgaggaggtggagagacagcccacccccgtgtccaccgtgacccctgtccccacactgacctgtgttccctccccgatcatctttcctgttccagagaagtgggctggatgtctccatctctgtctcaactttacgtgtactgagctgcaacttcttacttccctactgaaaataagaatctgaatataaatttgttttctcaaatatttgctatgagaggttgatggattaattaaataagtcaattcctggaagttgagagagcaaataaagacctgagaaccttccagaa

SEQ ID NO: 150758 - DNA, 1578 bp, Homo sapiens
  Payload ID: 9762
  Gene Symbol: HLA-C
  Gene Name: major histocompatibility complex, class I, C
  Uniprot ID: P30504
  ENST ID: ENST00000400394
  CDS Start-End: 60-1160
gtcccggttctaaagtccccagtcacccacccggactcggattctccccagacgccgagatgcgggtcatggcgccccgaaccctcatcctgctgctctcgggagccctggccctgaccgagacctgggcctgctcccactccatgaggtatttctacaccgccgtgtcccggcccggccgcggagagccccgcttcatcgcagtgggctacgtggacgacacgcagttcgtgcagttcgacagcgacgccgcgagtccaagaggggagccgcgggcgccgtgggtggagcaggaggggccggagtattgggaccgggagacacagaagtacaagcgccaggcacagactgaccgagtgaacctgcggaaactgcgcggctactacaaccagagcgaggccgggtctcacaccctccagaggatgtatggctgcgacctggggcccgacgggcgcctcctccgcgggtataaccagttcgcctacgacggcaaggattacatcgccctgaatgaggacctgcgctcctggaccgccgcggacaaggcggctcagatcacccagcgcaagtgggaggcggcccgtgaggcggagcagcggagagcctacctggagggcacgtgcgtggagtggctccgcagatacctggagaacgggaagaagacgctgcagcgcgcggaacacccaaagacacacgtgacccaccatcccgtctctgaccatgaggccaccctgaggtgctgggccctgggcttctaccctgcggagatcacactgacctggcagcgggatggcgaggaccaaactcaggacaccgagcttgtggagaccaggccagcaggagatggaaccttccagaagtgggcagctgtggtggtgccttctggagaagagcagagatacacgtgccatgtgcagcacgaggggctgccagagcccctcaccctgagatgggggccatcttcccagcccaccatccccatcgtgggcatcgttgctggcctggctgtcctggctgtcctagctgtcctaggagctgtgatggctgttgtgatgtgtaggaggaagagctcaggtggaaaaggagggagctgctctcaggctgcgtccagcaacagtgcccagggctctgatgagtctctcatcgcttgtaaagcctgagacagctgcctgtgtgggactgagatgcaggatttcttcacacctttcctttgtgacttcaagagcctctggcatctctttctgcaaaggcatctgaatgtgtctgcgttcctgttagcataatgtgaggaggtggagagacagcccacccccgtgtccaccgtgacccctgtccccacactgacctgtgttccctccccgatcatctttcctgttccagagaagtgggctggatgtctccatctctgtctcaactttacgtgtactgagctgcaacttcttacttccctactgaaaataagaatctgaatataaatttgttttctcaaatatttgctatgagaggttgatggattaattaaataagtcaattcctggaagttgagagagcaaataaagacctgagaaccttccagaa

SEQ ID NO: 150759 - DNA, 1530 bp, Homo sapiens; identical to SEQ ID NO: 150755
  Payload ID: 9762
  Gene Symbol: HLA-C
  Gene Name: major histocompatibility complex, class I, C
  ENST ID: ENST00000400395
  CDS Start-End: 16-1209

SEQ ID NO: 150760 - DNA, 1552 bp, Homo sapiens
  Payload ID: 9762
  Gene Symbol: HLA-C
  Gene Name: major histocompatibility complex, class I, C
  ENST ID: ENST00000453809
  CDS Start-End: 16-1134
tccccagacgccgagatgcgggtcatggcgccccgaaccctcatcctgctgctctcgggagccctggccctgaccgagacctgggcctgctcccactccatgaggtatttctacaccgccgtgtcccggcccggccgcggagagccccgcttcatcgcagtgggctacgtggacgacacgcagttcgtgcggttcgacagcgacgccgcgagtccaagaggggagccgcgggcgccgtgggtggagcaggaggggccggagtattgggaccgggagacacagaagtacaagcgccaggcacagactgaccgagtgagcctgcggaacctgcgcggctactacaaccagagcgaggccgggtctcacaccctccagtggatgtatggctgcgacctggggcccgacgggcgcctcctccgcgggtatgaccagtccgcctacgacggcaaggattacatcgccctgaacgaggacctgcgctcctggaccgccgcggacacggcggctcagatcacccagcgcaagtgggaggcggcccgtgcggcggagcagcagagagcctacctggagggcacgtgcgtggagtggctccgcagatacctggagaacgggaaggagacgctgcagcgcgcggaacacccaaagacacacgtgacccaccatctcgtctctgaccatgaggccaccctgaggtgctgggccctgggcttctaccctgcggagatcacactgacctggcagcgggatggcgaggaccaaactcaggacaccgagcttgtggagaccaggccagcaggagatggaaccttccagaagtgggcagctgtggtggtgccttctggagaagagcagagatacacgtgccatgtgcagcacgaggggctgccggagcccctcaccctgagatgggagccatcttcccagcccaccatccccatcgtgggcatcgttgctggcctggctgtcctggctgtcctagctgtcctaggagctgtggtggctgttgttatgtgtaggaggaagagctcagggcattttcttcccacaggtggaaaaggagggagctgctctcaggctgcgtccagcaacagtgcccagggctctgatgagtctctcatcgcttgtaaagcctgagacagctgcctgtgtgggactgagatgcaggatttcttcacacctctcctttgtgacttcaagagcctctggcatctctttctgcaaaggcatctgaatgcgtctgcgttcctgttagcataatgtgaggaggtggagagacagcccacccccgtgtccaccgtgacccctgtccccacactgacctgtgttccctccccgatcatctttcctgttccagagaagtgggctggatgtctccatctctgtctcaactttacgtgtactgagctgcaacttcttacttccctactgaaaataagaatctgaatataaatttgttttctcaaatatttgctatgagaggttgatggattaattaaataagtcaatccctggaagttgagagagcaaataaagacctgagaaccttccagaa

SEQ ID NO: 150761 - DNA, 1452 bp, Homo sapiens
  Payload ID: 9762
  Gene Symbol: HLA-C
  Gene Name: major histocompatibility complex, class I, C
  ENST ID: ENST00000422726
  CDS Start-End: 23-1129
cacattctccccagaggccgagatgcgggtcatggcgccccgagccctcctcctgctgctctcgggaggcctggccctgaccgagacctgggcctgctcccactccatgaggtatttcgacaccgccgtgtcccggcccggccgcggagagccccgcttcatctcagtgggctacgtggacgacacgcagttcgtgcggttcgacagcgacgccgcgagtccgagaggggagccgcgggcgccgtgggtggagcaggaggggccggagtattgggaccgggagacacagaactacaagcgccaggcacaggctgaccgagtgagcctgcggaacctgcgcggctactacaaccagagcgaggacgggtctcacaccctccagaggatgtatggctgcgacctggggcccgacgggcgcctcctccgcgggtatgaccagtccgcctacgacggcaaggattacatcgccctgaacgaggacctgcgctcctggaccgccgcggacaccgcggctcagatcacccagcgcaagttggaggcggcccgtgcggcggagcagctgagagcctacctggagggcacgtgcgtggagtggctccgcagatacctggagaacgggaaggagacgctgcagcgcgcagaacccccaaagacacacgtgacccaccaccccctctctgaccatgaggccaccctgaggtgctgggccctgggcttctaccctgcggagatcacactgacctggcagcgggatggggaggaccagacccaggacaccgagcttgtggagaccaggccagcaggagatggaaccttccagaagtgggcagctgtggtggtgccttctggacaagagcagagatacacgtgccatatgcagcacgaggggctgcaagagcccctcaccctgagctgggagccatcttcccagcccaccatccccatcatgggcatcgttgctggcctggctgtcctggttgtcctagctgtccttggagctgtggtcaccgctatgatgtgtaggaggaagagctcagctgcctgtgtgggactgagatgcaggatttcttcacacctctcctttgtgacttcaagagcctctggcatctctttctgcaaaggcgtctgaatgtgtctgcgttcctgttagcataatgtgaggaggtggagagacagcccacccccgtgtccaccgtgacccctgtccccacactgacctgtgttccctccccgatcatctttcctgttccagagaggtggggctggatgtctccatctctgtctcaaattcatggtgcactgagctgcaacttcttacttccctaatgaagttaagaacctgaatataaatttgtgttctcaaatatttgctatgaagcgttgatggattaattaaataagtcaattcctagaagttgagagagcaaataaagacctgagaaccttccagaa

SEQ ID NO: 150762 - DNA, 1530 bp, Homo sapiens
  Payload ID: 9762
  Gene Symbol: HLA-C
  Gene Name: major histocompatibility complex, class I, C
  ENST ID: ENST00000414249
  CDS Start-End: 16-1209
tccccagacgccgagatgcgggtcatggcgccccgaaccctcatcctgctgctctcgggagccctggccctgaccgagacctgggcctgctcccactccatgaggtatttctacaccgccgtgtcccggcccggccgcggagagccccgcttcatcgcagtgggctacgtggacgacacgcagttcgtgcggttcgacagcgacgccgcgagtccaagaggggagccgcgggcgccgtgggtggagcaggaggggccggagtattgggaccgggagacacagaagtacaagcgccaggcacagactgaccgagtgagcctgcggaacctgcgcggctactacaaccagagcgaggccgggtctcacaccctccagtggatgtatggctgcgacctggggcccgacgggcgcctcctccgcgggtatgaccagtccgcctacgacggcaaggattacatcgccctgaacgaggacctgcgctcctggaccgccgcggacacggcggctcagatcacccagcgcaagtgggaggcggcccgtgcggcggagcagcagagagcctacctggagggcacgtgcgtggagtggctccgcagatacctggagaacgggaaggagacgctgcagcgcgcggaacacccaaagacacacgtgacccaccatctcgtctctgaccatgaggccaccctgaggtgctgggccctgggcttctaccctgcggagatcacactgacctggcagcgggatggcgaggaccaaactcaggacaccgagcttgtggagaccaggccagcaggagatggaaccttccagaagtgggcagctgtggtggtgccttctggagaagagcagagatacacgtgccatgtgcagcacgaggggctgccggagcccctcaccctgagatgggagccatcttcccagcccaccatccccatcgtgggcatcgttgctggcctggctgtcctggctgtcctagctgtcctaggagctgtggtggctgttgttatgtgtaggaggaagagctcaggtagggaaggggtgaggagtggggtctggccagcaacagtgcccagggctctgatgagtctctcatcgcttgtaaagcctgagacagctgcctgtgtgggactgagatgcaggatttcttcacacctctcctttgtgacttcaagagcctctggcatctctttctgcaaaggcatctgaatgcgtctgcgttcctgttagcataatgtgaggaggtggagagacagcccacccccgtgtccaccgtgacccctgtccccacactgacctgtgttccctccccgatcatctttcctgttccagagaagtgggctggatgtctccatctctgtctcaactttacgtgtactgagctgcaacttcttacttccctactgaaaataagaatctgaatataaatttgttttctcaaatatttgctatgagaggttgatggattaattaaataagtcaatccctggaagttgagagagcaaataaagacctgagaaccttccagaa

SEQ ID NO: 150763 - DNA, 1579 bp, Homo sapiens
  Payload ID: 9762
  Gene Symbol: HLA-C
  Gene Name: major histocompatibility complex, class I, C
  Uniprot ID: P04222
  ENST ID: ENST00000457903
  CDS Start-End: 60-1160
gtcccggttctgaagtccccagtcacccacccggactcagattctccccagacgccgagatgcgggtcatggcgccccgaaccctcatcctgctgctctcgggagccctggccctgaccgagacctgggccggctcccactccatgaggtatttctacaccgctgtgtcccggcccggccgcggggagccccacttcatcgcagtgggctacgtggacgacacgcagttcgtgcggttcgacagcgacgccgcgagtccgagaggggagccgcgggcgccgtgggtggagcaggaggggccggagtattgggaccgggagacacagaagtacaagcgccaggcacagactgaccgagtgagcctgcggaacctgcgcggctactacaaccagagcgaggccgggtctcacatcatccagaggatgtatggctgcgacgtggggcccgacgggcgcctcctccgcgggtatgaccagtacgcctacgacggcaaggattacatcgccctgaacgaggatctgcgctcctggaccgccgcggacacggcggctcagatcacccagcgcaagtgggaggcggcccgtgaggcggagcagctgagagcctacctggagggcctgtgcgtggagtggctccgcagatacctgaagaatgggaaggagacgctgcagcgcgcggaacacccaaagacacacgtgacccaccatcccgtctctgaccatgaggccaccctgaggtgctgggccctgggcttctaccctgcggagatcacactgacctggcagtgggatggggaggaccaaactcaggacactgagcttgtggagaccaggccagcaggagatggaaccttccagaagtgggcagctgtggtggtgccttctggagaagagcagagatacacgtgccatgtgcagcacgaggggctgccggagcccctcaccctgagatgggagccgtcttcccagcccaccatccccatcgtgggcatcgttgctggcctggctgtcctggctgtcctagctgtcctaggagctgtggtggctgttgtgatgtgtaggaggaagagctcaggtggaaaaggagggagctgctctcaggctgcgtccagcaacagtgcccagggctctgatgagtctctcatcgcttgtaaagcctgagacagctgcctgtgtgggactgagatgcaggatttcttcacacctctcctttgtgacttcaagagcctctggcatctctttctgcaaaggcatctgaatgtgtctgcgttcctgttagcataatgtgaggaggtggagagacagcccacccccgtgtccaccgtgacccctgtccccacactgacctgtgttccctccccgatcatctttcctgttccagagaagtgggctggatgtctccatctctgtctcaacttcatggtgcgctgagctgcaacttcttacttccctaatgaagttaggaacctgaatataaatttgttttctcaaatatttgctatgaagggttgatggattaattaaataagtcaattcctggaagttgagagagcaaataaagacctgagaactttccagaa

SEQ ID NO: 150764 - DNA, 1460 bp, Homo sapiens
  Payload ID: 9762
  Gene Symbol: HLA-C
  Gene Name: major histocompatibility complex, class I, C
  ENST ID: ENST00000419590
  CDS Start-End: 23-1042
cggattctccccagacgccgagatgcgggtcatggcgccccgaaccctcatcctgctgctctcgggagccctggccctgaccgagacctgggcctgctcccactccatgaggtatttctacaccgccgtgtcccggcccggccgcggagagccccgcttcatcgcagtgggctacgtggacgacacgcagttcgtgcggttcgacagcgacgccgcgagtccaagaggggagccgcgggcgccgtgggtggagcaggaggggccggagtattgggaccgggagacacagaagtacaagcgccaggcacagactgaccgagtgagcctgcggaacctgcgcggctactacaaccagagcgaggccgggtctcacaccctccagtggatgtatggctgcgacctggggcccgacgggcgcctcctccgcgggtatgaccagtccgcctacgacggcaaggattacatcgccctgaacgaggacctgcgctcctggaccgccgcggacacggcggctcagatcacccagcgcaagtgggaggcggcccgtgcggcggagcagcagagagcctacctggagggcacgtgcgtggagtggctccgcagatacctggagaacgggaaggagacgctgcagcgcgcggaacacccaaagacacacgtgacccaccatctcgtctctgaccatgaggccaccctgaggtgctgggccctgggcttctaccctgcggagatcacactgacctggcagcgggatggcgaggaccaaactcaggacaccgagcttgtggagaccaggccagcaggagatggaaccttccagaagtgggcagctgtggtggtgccttctggagaagagcagagatacacgtgccatgtgcagcacgaggggctgccggagcccctcaccctgagatgggagccatcttcccagcccaccatccccatcgtgggcatcgttgctggcctggctgtcctggctgtcctagctgtcctaggagctgtggtggctgttgttatgtgtaggaggaagagctcagcctgagacagctgcctgtgtgggactgagatgcaggatttcttcacacctctcctttgtgacttcaagagcctctggcatctctttctgcaaaggcatctgaatgcgtctgcgttcctgttagcataatgtgaggaggtggagagacagcccacccccgtgtccaccgtgacccctgtccccacactgacctgtgttccctccccgatcatctttcctgttccagagaagtgggctggatgtctccatctctgtctcaactttacgtgtactgagctgcaacttcttacttccctactgaaaataagaatctgaatataaatttgttttctcaaatatttgctatgagaggttgatggattaattaaataagtcaatccctggaagttgagagagcaaataaagacctgagaaccttccagaa

SEQ ID NO: 150765 - DNA, 782 bp, Homo sapiens
  Payload ID: 9762
  Gene Symbol: HLA-C
  Gene Name: major histocompatibility complex, class I, C
  ENST ID: ENST00000454033
  CDS Start-End: 1-782
gcgggtcatggcgccccgaaccctcatcctgctgctctcgggagccctggccctgaccgagacctgggcctgctcccactccatgaggtatttcgacaccgccgtgtcccggcccggccgcggagagccccgcttcatctcagtgggctacgtggacgacacgcagttcgtgcggttcgacagcgacgccgcgagtccgagaggggagccccgggcgccgtgggtggagcaggaggggccggagtattgggaccgggagacacagaagtacaagcgccaggcacaggctgaccgagtgaacctgcggaaactgcgcggctactacaaccagagcgaggacgggtctcacaccctccagtggatgtatggctgcgacctggggcccgacgggcgcctcctccgcgggtatgaccagtccgcctacgacggcaaggattacatcgccctgaacgaggacctgcgctcctggaccgccgcggacacggcggctcagatcacccagcgcaagtgggaggcggcccgtgaggcggagcagtggagagcctacctggagggcacgtgcgtggagtggctccgcagatacctggagaacgggaaggagacgctgcagcgcgcggaacacccaaagacacacgtgacccaccatcccgtctctgaccatgaggccagcaggagatggaaccttccagaagtgggcagctgtggtggtgccttctggagaagagcagagatacacgtgccatgtgcagcacgaggggctgccagagcccctcaccctgaga

SEQ ID NO: 150766 - DNA, 1578 bp, Homo sapiens
  Payload ID: 9762
  Gene Symbol: HLA-C
  Gene Name: major histocompatibility complex, class I, C
  Uniprot ID: P30499
  ENST ID: ENST00000438171
  CDS Start-End: 60-1160
gtcccggttctaaagtccccagtcacccacccggactcggattctccccagacgccgagatgcgggtcatggcgccccgaaccctcatcctgctgctctcgggagccctggccctgaccgagacctgggcctgctcccactccatgaggtatttctacaccgccgtgtcccggcccggccgcggagagccccgcttcatcgcagtgggctacgtggacgacacgcagttcgtgcggttcgacagcgacgccgcgagtccaagaggggagccgcgggcgccgtgggtggagcaggaggggccggagtattgggaccgggagacacagaagtacaagcgccaggcacagactgaccgagtgagcctgcggaacctgcgcggctactacaaccagagcgaggccgggtctcacaccctccagtggatgtatggctgcgacctggggcccgacgggcgcctcctccgcgggtatgaccagtccgcctacgacggcaaggattacatcgccctgaacgaggacctgcgctcctggaccgccgcggacacggcggctcagatcacccagcgcaagtgggaggcggcccgtgcggcggagcagcagagagcctacctggagggcacgtgcgtggagtggctccgcagatacctggagaacgggaaggagacgctgcagcgcgcggaacacccaaagacacacgtgacccaccatctcgtctctgaccatgaggccaccctgaggtgctgggccctgggcttctaccctgcggagatcacactgacctggcagcgggatggcgaggaccaaactcaggacaccgagcttgtggagaccaggccagcaggagatggaaccttccagaagtgggcagctgtggtggtgccttctggagaagagcagagatacacgtgccatgtgcagcacgaggggctgccggagcccctcaccctgagatgggagccatcttcccagcccaccatccccatcgtgggcatcgttgctggcctggctgtcctggctgtcctagctgtcctaggagctgtggtggctgttgttatgtgtaggaggaagagctcaggtggaaaaggagggagctgctctcaggctgcgtccagcaacagtgcccagggctctgatgagtctctcatcgcttgtaaagcctgagacagctgcctgtgtgggactgagatgcaggatttcttcacacctctcctttgtgacttcaagagcctctggcatctctttctgcaaaggcatctgaatgcgtctgcgttcctgttagcataatgtgaggaggtggagagacagcccacccccgtgtccaccgtgacccctgtccccacactgacctgtgttccctccccgatcatctttcctgttccagagaagtgggctggatgtctccatctctgtctcaactttacgtgtactgagctgcaacttcttacttccctactgaaaataagaatctgaatataaatttgttttctcaaatatttgctatgagaggttgatggattaattaaataagtcaatccctggaagttgagagagcaaataaagacctgagaaccttccagaa

SEQ ID NO: 150767 - DNA, 1450 bp, Homo sapiens
  Payload ID: 9762
  Gene Symbol: HLA-C
  Gene Name: major histocompatibility complex, class I, C
  ENST ID: ENST00000456487
  CDS Start-End: 23-1129
cggattctccccagacgccgagatgcgggtcatggcgccccgaaccctcatcctgctgctctcgggagccctggccctgaccgagacctgggcctgctcccactccatgaggtatttcgacaccgccgtgtcccggcccggccgcggagagccccgcttcatctcagtgggctacgtggacgacacgcagttcgtgcggttcgacagcgacgccgcgagtccgagaggggagccccgggcgccgtgggtggagcaggaggggccggagtattgggaccgggagacacagaagtacaagcgccaggcacaggctgaccgagtgaacctgcggaaactgcgcggctactacaaccagagcgaggacgggtctcacaccctccagtggatgtatggctgcgacctggggcccgacgggcgcctcctccgcgggtatgaccagtccgcctacgacggcaaggattacatcgccctgaacgaggacctgcgctcctggaccgccgcggacacggcggctcagatcacccagcgcaagtgggaggcggcccgtgaggcggagcagtggagagcctacctggagggcacgtgcgtggagtggctccgcagatacctggagaacgggaaggagacgctgcagcgcgcggaacacccaaagacacacgtgacccaccatcccgtctctgaccatgaggccaccctgaggtgctgggccctgggcttctaccctgcggagatcacactgacctggcagcgggatggcgaggaccaaactcaggacaccgagcttgtggagaccaggccagcaggagatggaaccttccagaagtgggcagctgtggtggtgccttctggagaagagcagagatacacgtgccatgtgcagcacgaggggctgccagagcccctcaccctgagatgggagccatcttcccagcccaccatccccatcgtgggcatcgttgctggcctggctgtcctggctgtcctagctgtcctaggagctgtgatggctgttgtgatgtgtaggaggaagagctcagctgcctgtgtgggactgagatgcaggatttcttcacacctctcctttgtgacttcaagagcctctggcatctctttctgcaaaggcatctgaatgtgtctgcgttcctgttagcataatgtgaggaggtggagagacagcccacccccgtgtccaccgtgacccctgtccccacactgacctgtgttccctccccgatcatctttcctgttccagagaagtgggctggatgtctccatctctgtctcaactttacgtgtactgagctgcaacttcttacttccctactgaaaataagaatctgaatataaatttgttttctcaaatatttgctatgagaggttgatggattaattaaataagtcaattcctggaagttgagagagcaaataaagacctgagaaccttccagaa

SEQ ID NO: 150768 - DNA, 1530 bp, Homo sapiens
  Payload ID: 9762
  Gene Symbol: HLA-C
  Gene Name: major histocompatibility complex, class I, C
  ENST ID: ENST00000422921
  CDS Start-End: 16-1209
tccccagacgccgagatgcgggtcatggcgccccgaaccctcatcctgctgctctcgggagccctggccctgaccgagacctgggcctgctcccactccatgaggtatttcgacaccgccgtgtcccggcccggccgcggagagccccgcttcatctcagtgggctacgtggacgacacgcagttcgtgcggttcgacagcgacgccgcgagtccgagaggggagccccgggcgccgtgggtggagcaggaggggccggagtattgggaccgggagacacagaagtacaagcgccaggcacaggctgaccgagtgaacctgcggaaactgcgcggctactacaaccagagcgaggacgggtctcacaccctccagtggatgtatggctgcgacctggggcccgacgggcgcctcctccgcgggtatgaccagtccgcctacgacggcaaggattacatcgccctgaacgaggacctgcgctcctggaccgccgcggacacggcggctcagatcacccagcgcaagtgggaggcggcccgtgaggcggagcagtggagagcctacctggagggcacgtgcgtggagtggctccgcagatacctggagaacgggaaggagacgctgcagcgcgcggaacacccaaagacacacgtgacccaccatcccgtctctgaccatgaggccaccctgaggtgctgggccctgggcttctaccctgcggagatcacactgacctggcagcgggatggcgaggaccaaactcaggacaccgagcttgtggagaccaggccagcaggagatggaaccttccagaagtgggcagctgtggtggtgccttctggagaagagcagagatacacgtgccatgtgcagcacgaggggctgccagagcccctcaccctgagatgggagccatcttcccagcccaccatccccatcgtgggcatcgttgctggcctggctgtcctggctgtcctagctgtcctaggagctgtgatggctgttgtgatgtgtaggaggaagagctcaggtagggaaggggtgaggagtggggtctggccagcaacagtgcccagggctctgatgagtctctcatcgcttgtaaagcctgagacagctgcctgtgtgggactgagatgcaggatttcttcacacctctcctttgtgacttcaagagcctctggcatctctttctgcaaaggcatctgaatgtgtctgcgttcctgttagcataatgtgaggaggtggagagacagcccacccccgtgtccaccgtgacccctgtccccacactgacctgtgttccctccccgatcatctttcctgttccagagaagtgggctggatgtctccatctctgtctcaactttacgtgtactgagctgcaacttcttacttccctactgaaaataagaatctgaatataaatttgttttctcaaatatttgctatgagaggttgatggattaattaaataagtcaattcctggaagttgagagagcaaataaagacctgagaaccttccagaa

SEQ ID NO: 150769 - DNA, 1450 bp, Homo sapiens
  Payload ID: 9762
  Gene Symbol: HLA-C
  Gene Name: major histocompatibility complex, class I, C
  ENST ID: ENST00000434884
  CDS Start-End: 23-1129
cggattctccccagacgccgagatgcgggtcatggcgccccgaaccctcatcctgctgctctcgggagccctggccctgaccgagacctgggcctgctcccactccatgaggtatttctacaccgccgtgtcccggcccggccgcggagagccccgcttcatcgcagtgggctacgtggacgacacgcagttcgtgcagttcgacagcgacgccgcgagtccaagaggggagccgcgggcgccgtgggtggagcaggaggggccggagtattgggaccgggagacacagaagtacaagcgccaggcacagactgaccgagtgaacctgcggaaactgcgcggctactacaaccagagcgaggccgggtctcacaccctccagaggatgtatggctgcgacctggggcccgacgggcgcctcctccgcgggtataaccagttcgcctacgacggcaaggattacatcgccctgaatgaggacctgcgctcctggaccgccgcggacaaggcggctcagatcacccagcgcaagtgggaggcggcccgtgaggcggagcagcggagagcctacctggagggcacgtgcgtggagtggctccgcagatacctggagaacgggaagaagacgctgcagcgcgcggaacacccaaagacacacgtgacccaccatcccgtctctgaccatgaggccaccctgaggtgctgggccctgggcttctaccctgcggagatcacactgacctggcagcgggatggcgaggaccaaactcaggacaccgagcttgtggagaccaggccagcaggagatggaaccttccagaagtgggcagctgtggtggtgccttctggagaagagcagagatacacgtgccatgtgcagcacgaggggctgccagagcccctcaccctgagatgggggccatcttcccagcccaccatccccatcgtgggcatcgttgctggcctggctgtcctggctgtcctagctgtcctaggagctgtgatggctgttgtgatgtgtaggaggaagagctcagctgcctgtgtgggactgagatgcaggatttcttcacacctttcctttgtgacttcaagagcctctggcatctctttctgcaaaggcatctgaatgtgtctgcgttcctgttagcataatgtgaggaggtggagagacagcccacccccgtgtccaccgtgacccctgtccccacactgacctgtgttccctccccgatcatctttcctgttccagagaagtgggctggatgtctccatctctgtctcaactttacgtgtactgagctgcaacttcttacttccctactgaaaataagaatctgaatataaatttgttttctcaaatatttgctatgagaggttgatggattaattaaataagtcaattcctggaagttgagagagcaaataaagacctgagaaccttccagaa

SEQ ID NO: 150770 - DNA, 782 bp, Homo sapiens
  Payload ID: 9762
  Gene Symbol: HLA-C
  Gene Name: major histocompatibility complex, class I, C
  ENST ID: ENST00000415537
  CDS Start-End: 1-782
gcgggtcatggcgccccgagccctcctcctgctgctctcgggaggcctggccctgaccgagacctgggcctgctcccactccatgaggtatttcgacaccgccgtgtcccggcccggccgcggagagccccgcttcatctcagtgggctacgtggacgacacgcagttcgtgcggttcgacagcgacgccgcgagtccgagaggggagccgcgggcgccgtgggtggagcaggaggggccggagtattgggaccgggagacacagaagtacaagcgccaggcacaggctgaccgagtgagcctgcggaacctgcgcggctactacaaccagagcgaggacgggtctcacaccctccagaggatgtctggctgcgacctggggcccgacgggcgcctcctccgcgggtatgaccagtccgcctacgacggcaaggattacatcgccctgaacgaggacctgcgctcctggaccgccgcggacaccgcggctcagatcacccagcgcaagttggaggcggcccgtgcggcggagcagctgagagcctacctggagggcacgtgcgtggagtggctccgcagatacctggagaacgggaaggagacgctgcagcgcgcagaacccccaaagacacacgtgacccaccaccccctctctgaccatgaggccagcaggagatggaaccttccagaagtgggcagctgtggtggtgccttctggacaagagcagagatacacgtgccatatgcagcacgaggggctgcaagagcccctcaccctgagc

SEQ ID NO: 150771 - DNA, 1447 bp, Homo sapiens
  Payload ID: 9762
  Gene Symbol: HLA-C
  Gene Name: major histocompatibility complex, class I, C
  ENST ID: ENST00000458668
  CDS Start-End: 20-1126
attctccccagacgccgagatgcgggtcatggcgccccgaaccctcatcctgctgctctcgggagccctggccctgaccgagacctgggcctgctcccactccatgaggtatttctacaccgccgtgtcccggcccggccgcggagagccccgcttcatcgcagtgggctacgtggacgacacgcagttcgtgcagttcgacagcgacgccgcgagtccaagaggggagccgcgggcgccgtgggtggagcaggaggggccggagtattgggaccgggagacacagaagtacaagcgccaggcacagactgaccgagtgaacctgcggaaactgcgcggctactacaaccagagcgaggccgggtctcacaccctccagaggatgtatggctgcgacctggggcccgacgggcgcctcctccgcgggtataaccagttcgcctacgacggcaaggattacatcgccctgaatgaggacctgcgctcctggaccgccgcggacaaggcggctcagatcacccagcgcaagtgggaggcggcccgtgaggcggagcagcggagagcctacctggagggcacgtgcgtggagtggctccgcagatacctggagaacgggaagaagacgctgcagcgcgcggaacacccaaagacacacgtgacccaccatcccgtctctgaccatgaggccaccctgaggtgctgggccctgggcttctaccctgcggagatcacactgacctggcagcgggatggcgaggaccaaactcaggacaccgagcttgtggagaccaggccagcaggagatggaaccttccagaagtgggcagctgtggtggtgccttctggagaagagcagagatacacgtgccatgtgcagcacgaggggctgccagagcccctcaccctgagatgggggccatcttcccagcccaccatccccatcgtgggcatcgttgctggcctggctgtcctggctgtcctagctgtcctaggagctgtgatggctgttgtgatgtgtaggaggaagagctcagctgcctgtgtgggactgagatgcaggatttcttcacacctttcctttgtgacttcaagagcctctggcatctctttctgcaaaggcatctgaatgtgtctgcgttcctgttagcataatgtgaggaggtggagagacagcccacccccgtgtccaccgtgacccctgtccccacactgacctgtgttccctccccgatcatctttcctgttccagagaagtgggctggatgtctccatctctgtctcaactttacgtgtactgagctgcaacttcttacttccctactgaaaataagaatctgaatataaatttgttttctcaaatatttgctatgagaggttgatggattaattaaataagtcaattcctggaagttgagagagcaaataaagacctgagaaccttccagaa

SEQ ID NO: 150772 - DNA, 1554 bp, Homo sapiens
  Payload ID: 9762
  Gene Symbol: HLA-C
  Gene Name: major histocompatibility complex, class I, C
  ENST ID: ENST00000423509
  CDS Start-End: 16-1134
tccccagaggccgagatgcgggtcatggcgccccgagccctcctcctgctgctctcgggaggcctggccctgaccgagacctgggcctgctcccactccatgaggtatttcgacaccgccgtgtcccggcccggccgcggagagccccgcttcatctcagtgggctacgtggacgacacgcagttcgtgcggttcgacagcgacgccgcgagtccgagaggggagccgcgggcgccgtgggtggagcaggaggggccggagtattgggaccgggagacacagaactacaagcgccaggcacaggctgaccgagtgagcctgcggaacctgcgcggctactacaaccagagcgaggacgggtctcacaccctccagaggatgtatggctgcgacctggggcccgacgggcgcctcctccgcgggtatgaccagtccgcctacgacggcaaggattacatcgccctgaacgaggacctgcgctcctggaccgccgcggacaccgcggctcagatcacccagcgcaagttggaggcggcccgtgcggcggagcagctgagagcctacctggagggcacgtgcgtggagtggctccgcagatacctggagaacgggaaggagacgctgcagcgcgcagaacccccaaagacacacgtgacccaccaccccctctctgaccatgaggccaccctgaggtgctgggccctgggcttctaccctgcggagatcacactgacctggcagcgggatggggaggaccagacccaggacaccgagcttgtggagaccaggccagcaggagatggaaccttccagaagtgggcagctgtggtggtgccttctggacaagagcagagatacacgtgccatatgcagcacgaggggctgcaagagcccctcaccctgagctgggagccatcttcccagcccaccatccccatcatgggcatcgttgctggcctggctgtcctggttgtcctagctgtccttggagctgtggtcaccgctatgatgtgtaggaggaagagctcagggcattttcttcccacaggtggaaaaggagggagctgctctcaggctgcgtgcagcaacagtgcccagggctctgatgagtctctcatcacttgtaaagcctgagacagctgcctgtgtgggactgagatgcaggatttcttcacacctctcctttgtgacttcaagagcctctggcatctctttctgcaaaggcgtctgaatgtgtctgcgttcctgttagcataatgtgaggaggtggagagacagcccacccccgtgtccaccgtgacccctgtccccacactgacctgtgttccctccccgatcatctttcctgttccagagaggtggggctggatgtctccatctctgtctcaaattcatggtgcactgagctgcaacttcttacttccctaatgaagttaagaacctgaatataaatttgtgttctcaaatatttgctatgaagcgttgatggattaattaaataagtcaattcctagaagttgagagagcaaataaagacctgagaaccttccagaa

SEQ ID NO: 150773 - DNA, 1552 bp, Homo sapiens
  Payload ID: 9762
  Gene Symbol: HLA-C
  Gene Name: major histocompatibility complex, class I, C
  ENST ID: ENST00000458192
  CDS Start-End: 16-1134
tccccagacgccgagatgcgggtcatggcgccccgaaccctcatcctgctgctctcgggagccctggccctgaccgagacctgggcctgctcccactccatgaggtatttcgacaccgccgtgtcccggcccggccgcggagagccccgcttcatctcagtgggctacgtggacgacacgcagttcgtgcggttcgacagcgacgccgcgagtccgagaggggagccccgggcgccgtgggtggagcaggaggggccggagtattgggaccgggagacacagaagtacaagcgccaggcacaggctgaccgagtgaacctgcggaaactgcgcggctactacaaccagagcgaggacgggtctcacaccctccagtggatgtatggctgcgacctggggcccgacgggcgcctcctccgcgggtatgaccagtccgcctacgacggcaaggattacatcgccctgaacgaggacctgcgctcctggaccgccgcggacacggcggctcagatcacccagcgcaagtgggaggcggcccgtgaggcggagcagtggagagcctacctggagggcacgtgcgtggagtggctccgcagatacctggagaacgggaaggagacgctgcagcgcgcggaacacccaaagacacacgtgacccaccatcccgtctctgaccatgaggccaccctgaggtgctgggccctgggcttctaccctgcggagatcacactgacctggcagcgggatggcgaggaccaaactcaggacaccgagcttgtggagaccaggccagcaggagatggaaccttccagaagtgggcagctgtggtggtgccttctggagaagagcagagatacacgtgccatgtgcagcacgaggggctgccagagcccctcaccctgagatgggagccatcttcccagcccaccatccccatcgtgggcatcgttgctggcctggctgtcctggctgtcctagctgtcctaggagctgtgatggctgttgtgatgtgtaggaggaagagctcagggcattttcttcccacaggtggaaaaggagggagctgctctcaggctgcgtccagcaacagtgcccagggctctgatgagtctctcatcgcttgtaaagcctgagacagctgcctgtgtgggactgagatgcaggatttcttcacacctctcctttgtgacttcaagagcctctggcatctctttctgcaaaggcatctgaatgtgtctgcgttcctgttagcataatgtgaggaggtggagagacagcccacccccgtgtccaccgtgacccctgtccccacactgacctgtgttccctccccgatcatctttcctgttccagagaagtgggctggatgtctccatctctgtctcaactttacgtgtactgagctgcaacttcttacttccctactgaaaataagaatctgaatataaatttgttttctcaaatatttgctatgagaggttgatggattaattaaataagtcaattcctggaagttgagagagcaaataaagacctgagaaccttccagaa

SEQ ID NO: 150774 - DNA, 782 bp, Homo sapiens
  Payload ID: 9762
  Gene Symbol: HLA-C
  Gene Name: major histocompatibility complex, class I, C
  ENST ID: ENST00000457806
  CDS Start-End: 1-782
gcgggtcatggcgccccgagccctcctcctgctgctctcgggaggcctggccctgaccgagacctgggcctgctcccactccatgaggtatttcgacaccgccgtgtcccggcccggccgcggagagccccgcttcatctcagtgggctacgtggacgacacgcagttcgtgcggttcgacagcgacgccgcgagtccgagaggggagccgcgggcgccgtgggtggagcaggaggggccggagtattgggaccgggagacacagaactacaagcgccaggcacaggctgaccgagtgagcctgcggaacctgcgcggctactacaaccagagcgaggacgggtctcacaccctccagaggatgtatggctgcgacctggggcccgacgggcgcctcctccgcgggtatgaccagtccgcctacgacggcaaggattacatcgccctgaacgaggacctgcgctcctggaccgccgcggacaccgcggctcagatcacccagcgcaagttggaggcggcccgtgcggcggagcagctgagagcctacctggagggcacgtgcgtggagtggctccgcagatacctggagaacgggaaggagacgctgcagcgcgcagaacccccaaagacacacgtgacccaccaccccctctctgaccatgaggccagcaggagatggaaccttccagaagtgggcagctgtggtggtgccttctggacaagagcagagatacacgtgccatatgcagcacgaggggctgcaagagcccctcaccctgagc

SEQ ID NO: 150775 - DNA, 1553 bp, Homo sapiens
  Payload ID: 9762
  Gene Symbol: HLA-C
  Gene Name: major histocompatibility complex, class I, C
  ENST ID: ENST00000419135
  CDS Start-End: 16-1134
tccccagacgccgagatgcgggtcatggcgccccgaaccctcatcctgctgctctcgggagccctggccctgaccgagacctgggccggctcccactccatgaggtatttctacaccgctgtgtcccggcccggccgcggggagccccacttcatcgcagtgggctacgtggacgacacgcagttcgtgcggttcgacagcgacgccgcgagtccgagaggggagccgcgggcgccgtgggtggagcaggaggggccggagtattgggaccgggagacacagaagtacaagcgccaggcacagactgaccgagtgagcctgcggaacctgcgcggctactacaaccagagcgaggccgggtctcacatcatccagaggatgtatggctgcgacgtggggcccgacgggcgcctcctccgcgggtatgaccagtacgcctacgacggcaaggattacatcgccctgaacgaggatctgcgctcctggaccgccgcggacacggcggctcagatcacccagcgcaagtgggaggcggcccgtgaggcggagcagctgagagcctacctggagggcctgtgcgtggagtggctccgcagatacctgaagaatgggaaggagacgctgcagcgcgcggaacacccaaagacacacgtgacccaccatcccgtctctgaccatgaggccaccctgaggtgctgggccctgggcttctaccctgcggagatcacactgacctggcagtgggatggggaggaccaaactcaggacactgagcttgtggagaccaggccagcaggagatggaaccttccagaagtgggcagctgtggtggtgccttctggagaagagcagagatacacgtgccatgtgcagcacgaggggctgccggagcccctcaccctgagatgggagccgtcttcccagcccaccatccccatcgtgggcatcgttgctggcctggctgtcctggctgtcctagctgtcctaggagctgtggtggctgttgtgatgtgtaggaggaagagctcagggcattttcttcccacaggtggaaaaggagggagctgctctcaggctgcgtccagcaacagtgcccagggctctgatgagtctctcatcgcttgtaaagcctgagacagctgcctgtgtgggactgagatgcaggatttcttcacacctctcctttgtgacttcaagagcctctggcatctctttctgcaaaggcatctgaatgtgtctgcgttcctgttagcataatgtgaggaggtggagagacagcccacccccgtgtccaccgtgacccctgtccccacactgacctgtgttccctccccgatcatctttcctgttccagagaagtgggctggatgtctccatctctgtctcaacttcatggtgcgctgagctgcaacttcttacttccctaatgaagttaggaacctgaatataaatttgttttctcaaatatttgctatgaagggttgatggattaattaaataagtcaattcctggaagttgagagagcaaataaagacctgagaactttccagaa

SEQ ID NO: 150776 - DNA, 782 bp, Homo sapiens
  Payload ID: 9762
  Gene Symbol: HLA-C
  Gene Name: major histocompatibility complex, class I, C
  ENST ID: ENST00000437368
  CDS Start-End: 1-782
gcgggtcatggcgccccgaaccctcatcctgctgctctcgggagccctggccctgaccgagacctgggcctgctcccactccatgaggtatttctacaccgccgtgtcccggcccggccgcggagagccccgcttcatcgcagtgggctacgtggacgacacgcagttcgtgcggttcgacagcgacgccgcgagtccaagaggggagccgcgggcgccgtgggtggagcaggaggggccggagtattgggaccgggagacacagaagtacaagcgccaggcacagactgaccgagtgagcctgcggaacctgcgcggctactacaaccagagcgaggccgggtctcacaccctccagtggatgtatggctgcgacctggggcccgacgggcgcctcctccgcgggtatgaccagtccgcctacgacggcaaggattacatcgccctgaacgaggacctgcgctcctggaccgccgcggacacggcggctcagatcacccagcgcaagtgggaggcggcccgtgcggcggagcagcagagagcctacctggagggcacgtgcgtggagtggctccgcagatacctggagaacgggaaggagacgctgcagcgcgcggaacacccaaagacacacgtgacccaccatctcgtctctgaccatgaggccagcaggagatggaaccttccagaagtgggcagctgtggtggtgccttctggagaagagcagagatacacgtgccatgtgcagcacgaggggctgccggagcccctcaccctgaga

SEQ ID NO: 150777 - DNA, 1578 bp, Homo sapiens
  Payload ID: 9762
  Gene Symbol: HLA-C
  Gene Name: major histocompatibility complex, class I, C
  Uniprot ID: P30501
  ENST ID: ENST00000420206
  CDS Start-End: 60-1160
gtcccggttctaaagtccccagtcacccacccggactcggattctccccagacgccgagatgcgggtcatggcgccccgaaccctcatcctgctgctctcgggagccctggccctgaccgagacctgggcctgctcccactccatgaggtatttcgacaccgccgtgtcccggcccggccgcggagagccccgcttcatctcagtgggctacgtggacgacacgcagttcgtgcggttcgacagcgacgccgcgagtccgagaggggagccccgggcgccgtgggtggagcaggaggggccggagtattgggaccgggagacacagaagtacaagcgccaggcacaggctgaccgagtgaacctgcggaaactgcgcggctactacaaccagagcgaggacgggtctcacaccctccagtggatgtatggctgcgacctggggcccgacgggcgcctcctccgcgggtatgaccagtccgcctacgacggcaaggattacatcgccctgaacgaggacctgcgctcctggaccgccgcggacacggcggctcagatcacccagcgcaagtgggaggcggcccgtgaggcggagcagtggagagcctacctggagggcacgtgcgtggagtggctccgcagatacctggagaacgggaaggagacgctgcagcgcgcggaacacccaaagacacacgtgacccaccatcccgtctctgaccatgaggccaccctgaggtgctgggccctgggcttctaccctgcggagatcacactgacctggcagcgggatggcgaggaccaaactcaggacaccgagcttgtggagaccaggccagcaggagatggaaccttccagaagtgggcagctgtggtggtgccttctggagaagagcagagatacacgtgccatgtgcagcacgaggggctgccagagcccctcaccctgagatgggagccatcttcccagcccaccatccccatcgtgggcatcgttgctggcctggctgtcctggctgtcctagctgtcctaggagctgtgatggctgttgtgatgtgtaggaggaagagctcaggtggaaaaggagggagctgctctcaggctgcgtccagcaacagtgcccagggctctgatgagtctctcatcgcttgtaaagcctgagacagctgcctgtgtgggactgagatgcaggatttcttcacacctctcctttgtgacttcaagagcctctggcatctctttctgcaaaggcatctgaatgtgtctgcgttcctgttagcataatgtgaggaggtggagagacagcccacccccgtgtccaccgtgacccctgtccccacactgacctgtgttccctccccgatcatctttcctgttccagagaagtgggctggatgtctccatctctgtctcaactttacgtgtactgagctgcaacttcttacttccctactgaaaataagaatctgaatataaatttgttttctcaaatatttgctatgagaggttgatggattaattaaataagtcaattcctggaagttgagagagcaaataaagacctgagaaccttccagaa

SEQ ID NO: 150778 - DNA, 782 bp, Homo sapiens
  Payload ID: 9762
  Gene Symbol: HLA-C
  Gene Name: major histocompatibility complex, class I, C
  ENST ID: ENST00000448362
  CDS Start-End: 1-782
gcgggtcatggcgccccgaaccctcatcctgctgctctcgggagccctggccctgaccgagacctgggcctgctcccactccatgaggtatttctacaccgccgtgtcccggcccggccgcggagagccccgcttcatcgcagtgggctacgtggacgacacgcagttcgtgcagttcgacagcgacgccgcgagtccaagaggggagccgcgggcgccgtgggtggagcaggaggggccggagtattgggaccgggagacacagaagtacaagcgccaggcacagactgaccgagtgaacctgcggaaactgcgcggctactacaaccagagcgaggccgggtctcacaccctccagaggatgtatggctgcgacctggggcccgacgggcgcctcctccgcgggtataaccagttcgcctacgacggcaaggattacatcgccctgaatgaggacctgcgctcctggaccgccgcggacaaggcggctcagatcacccagcgcaagtgggaggcggcccgtgaggcggagcagcggagagcctacctggagggcacgtgcgtggagtggctccgcagatacctggagaacgggaagaagacgctgcagcgcgcggaacacccaaagacacacgtgacccaccatcccgtctctgaccatgaggccagcaggagatggaaccttccagaagtgggcagctgtggtggtgccttctggagaagagcagagatacacgtgccatgtgcagcacgaggggctgccagagcccctcaccctgaga

SEQ ID NO: 150779 - DNA, 782 bp, Homo sapiens; identical to SEQ ID NO: 150778
  Payload ID: 9762
  Gene Symbol: HLA-C
  Gene Name: major histocompatibility complex, class I, C
  ENST ID: ENST00000449884
  CDS Start-End: 1-782

SEQ ID NO: 150780 - DNA, 782 bp, Homo sapiens
  Payload ID: 9762
  Gene Symbol: HLA-C
  Gene Name: major histocompatibility complex, class I, C
  ENST ID: ENST00000445075
  CDS Start-End: 1-782
gcgggtcatggcgccccgaaccctcatcctgctgctctcgggagccctggccctgaccgagacctgggccggctcccactccatgaggtatttctacaccgctgtgtcccggcccggccgcggggagccccacttcatcgcagtgggctacgtggacgacacgcagttcgtgcggttcgacagcgacgccgcgagtccgagaggggagccgcgggcgccgtgggtggagcaggaggggccggagtattgggaccgggagacacagaagtacaagcgccaggcacagactgaccgagtgagcctgcggaacctgcgcggctactacaaccagagcgaggccgggtctcacatcatccagaggatgtatggctgcgacgtggggcccgacgggcgcctcctccgcgggtatgaccagtacgcctacgacggcaaggattacatcgccctgaacgaggatctgcgctcctggaccgccgcggacacggcggctcagatcacccagcgcaagtgggaggcggcccgtgaggcggagcagctgagagcctacctggagggcctgtgcgtggagtggctccgcagatacctgaagaatgggaaggagacgctgcagcgcgcggaacacccaaagacacacgtgacccaccatcccgtctctgaccatgaggccagcaggagatggaaccttccagaagtgggcagctgtggtggtgccttctggagaagagcagagatacacgtgccatgtgcagcacgaggggctgccggagcccctcaccctgaga

SEQ ID NO: 150781 - DNA, 1451 bp, Homo sapiens
  Payload ID: 9762
  Gene Symbol: HLA-C
  Gene Name: major histocompatibility complex, class I, C
  ENST ID: ENST00000429840
  CDS Start-End: 23-1129
cagattctccccagacgccgagatgcgggtcatggcgccccgaaccctcatcctgctgctctcgggagccctggccctgaccgagacctgggccggctcccactccatgaggtatttctacaccgctgtgtcccggcccggccgcggggagccccacttcatcgcagtgggctacgtggacgacacgcagttcgtgcggttcgacagcgacgccgcgagtccgagaggggagccgcgggcgccgtgggtggagcaggaggggccggagtattgggaccgggagacacagaagtacaagcgccaggcacagactgaccgagtgagcctgcggaacctgcgcggctactacaaccagagcgaggccgggtctcacatcatccagaggatgtatggctgcgacgtggggcccgacgggcgcctcctccgcgggtatgaccagtacgcctacgacggcaaggattacatcgccctgaacgaggatctgcgctcctggaccgccgcggacacggcggctcagatcacccagcgcaagtgggaggcggcccgtgaggcggagcagctgagagcctacctggagggcctgtgcgtggagtggctccgcagatacctgaagaatgggaaggagacgctgcagcgcgcggaacacccaaagacacacgtgacccaccatcccgtctctgaccatgaggccaccctgaggtgctgggccctgggcttctaccctgcggagatcacactgacctggcagtgggatggggaggaccaaactcaggacactgagcttgtggagaccaggccagcaggagatggaaccttccagaagtgggcagctgtggtggtgccttctggagaagagcagagatacacgtgccatgtgcagcacgaggggctgccggagcccctcaccctgagatgggagccgtcttcccagcccaccatccccatcgtgggcatcgttgctggcctggctgtcctggctgtcctagctgtcctaggagctgtggtggctgttgtgatgtgtaggaggaagagctcagctgcctgtgtgggactgagatgcaggatttcttcacacctctcctttgtgacttcaagagcctctggcatctctttctgcaaaggcatctgaatgtgtctgcgttcctgttagcataatgtgaggaggtggagagacagcccacccccgtgtccaccgtgacccctgtccccacactgacctgtgttccctccccgatcatctttcctgttccagagaagtgggctggatgtctccatctctgtctcaacttcatggtgcgctgagctgcaacttcttacttccctaatgaagttaggaacctgaatataaatttgttttctcaaatatttgctatgaagggttgatggattaattaaataagtcaattcctggaagttgagagagcaaataaagacctgagaactttccagaa

SEQ ID NO: 150782 - DNA, 1532 bp, Homo sapiens
  Payload ID: 9762
  Gene Symbol: HLA-C
  Gene Name: major histocompatibility complex, class I, C
  ENST ID: ENST00000430940
  CDS Start-End: 16-1209
tccccagaggccgagatgcgggtcatggcgccccgagccctcctcctgctgctctcgggaggcctggccctgaccgagacctgggcctgctcccactccatgaggtatttcgacaccgccgtgtcccggcccggccgcggagagccccgcttcatctcagtgggctacgtggacgacacgcagttcgtgcggttcgacagcgacgccgcgagtccgagaggggagccgcgggcgccgtgggtggagcaggaggggccggagtattgggaccgggagacacagaactacaagcgccaggcacaggctgaccgagtgagcctgcggaacctgcgcggctactacaaccagagcgaggacgggtctcacaccctccagaggatgtatggctgcgacctggggcccgacgggcgcctcctccgcgggtatgaccagtccgcctacgacggcaaggattacatcgccctgaacgaggacctgcgctcctggaccgccgcggacaccgcggctcagatcacccagcgcaagttggaggcggcccgtgcggcggagcagctgagagcctacctggagggcacgtgcgtggagtggctccgcagatacctggagaacgggaaggagacgctgcagcgcgcagaacccccaaagacacacgtgacccaccaccccctctctgaccatgaggccaccctgaggtgctgggccctgggcttctaccctgcggagatcacactgacctggcagcgggatggggaggaccagacccaggacaccgagcttgtggagaccaggccagcaggagatggaaccttccagaagtgggcagctgtggtggtgccttctggacaagagcagagatacacgtgccatatgcagcacgaggggctgcaagagcccctcaccctgagctgggagccatcttcccagcccaccatccccatcatgggcatcgttgctggcctggctgtcctggttgtcctagctgtccttggagctgtggtcaccgctatgatgtgtaggaggaagagctcaggtagggaaggggtgaagagcggggtctgggcagcaacagtgcccagggctctgatgagtctctcatcacttgtaaagcctgagacagctgcctgtgtgggactgagatgcaggatttcttcacacctctcctttgtgacttcaagagcctctggcatctctttctgcaaaggcgtctgaatgtgtctgcgttcctgttagcataatgtgaggaggtggagagacagcccacccccgtgtccaccgtgacccctgtccccacactgacctgtgttccctccccgatcatctttcctgttccagagaggtggggctggatgtctccatctctgtctcaaattcatggtgcactgagctgcaacttcttacttccctaatgaagttaagaacctgaatataaatttgtgttctcaaatatttgctatgaagcgttgatggattaattaaataagtcaattcctagaagttgagagagcaaataaagacctgagaaccttccagaa

SEQ ID NO: 150783 - DNA, 1580 bp, Homo sapiens
  Payload ID: 9762
  Gene Symbol: HLA-C
  Gene Name: major histocompatibility complex, class I, C
  ENST ID: ENST00000424832
  CDS Start-End: 60-1160
gtcccggttctaaagtccccagtcacccacccggactcacattctccccagaggccgagatgcgggtcatggcgccccgagccctcctcctgctgctctcgggaggcctggccctgaccgagacctgggcctgctcccactccatgaggtatttcgacaccgccgtgtcccggcccggccgcggagagccccgcttcatctcagtgggctacgtggacgacacgcagttcgtgcggttcgacagcgacgccgcgagtccgagaggggagccgcgggcgccgtgggtggagcaggaggggccggagtattgggaccgggagacacagaactacaagcgccaggcacaggctgaccgagtgagcctgcggaacctgcgcggctactacaaccagagcgaggacgggtctcacaccctccagaggatgtatggctgcgacctggggcccgacgggcgcctcctccgcgggtatgaccagtccgcctacgacggcaaggattacatcgccctgaacgaggacctgcgctcctggaccgccgcggacaccgcggctcagatcacccagcgcaagttggaggcggcccgtgcggcggagcagctgagagcctacctggagggcacgtgcgtggagtggctccgcagatacctggagaacgggaaggagacgctgcagcgcgcagaacccccaaagacacacgtgacccaccaccccctctctgaccatgaggccaccctgaggtgctgggccctgggcttctaccctgcggagatcacactgacctggcagcgggatggggaggaccagacccaggacaccgagcttgtggagaccaggccagcaggagatggaaccttccagaagtgggcagctgtggtggtgccttctggacaagagcagagatacacgtgccatatgcagcacgaggggctgcaagagcccctcaccctgagctgggagccatcttcccagcccaccatccccatcatgggcatcgttgctggcctggctgtcctggttgtcctagctgtccttggagctgtggtcaccgctatgatgtgtaggaggaagagctcaggtggaaaaggagggagctgctctcaggctgcgtgcagcaacagtgcccagggctctgatgagtctctcatcacttgtaaagcctgagacagctgcctgtgtgggactgagatgcaggatttcttcacacctctcctttgtgacttcaagagcctctggcatctctttctgcaaaggcgtctgaatgtgtctgcgttcctgttagcataatgtgaggaggtggagagacagcccacccccgtgtccaccgtgacccctgtccccacactgacctgtgttccctccccgatcatctttcctgttccagagaggtggggctggatgtctccatctctgtctcaaattcatggtgcactgagctgcaacttcttacttccctaatgaagttaagaacctgaatataaatttgtgttctcaaatatttgctatgaagcgttgatggattaattaaataagtcaattcctagaagttgagagagcaaataaagacctgagaaccttccagaa

SEQ ID NO: 150784 - DNA, 1502 bp, Homo sapiens
  Payload ID: 9762
  Gene Symbol: HLA-C
  Gene Name: major histocompatibility complex, class I, C
  ENST ID: ENST00000433153
  CDS Start-End: 16-1083
tccccagacgccgagatgcgggtcatggcgccccgaaccctcatcctgctgctctcgggagccctggccctgaccgagacctgggccggctcccactccatgaggtatttctacaccgctgtgtcccggcccggccgcggggagccccacttcatcgcagtgggctacgtggacgacacgcagttcgtgcggttcgacagcgacgccgcgagtccgagaggggagccgcgggcgccgtgggtggagcaggaggggccggagtattgggaccgggagacacagaagtacaagcgccaggcacagactgaccgagtgagcctgcggaacctgcgcggctactacaaccagagcgaggccgggtctcacatcatccagaggatgtatggctgcgacgtggggcccgacgggcgcctcctccgcgggtatgaccagtacgcctacgacggcaaggattacatcgccctgaacgaggatctgcgctcctggaccgccgcggacacggcggctcagatcacccagcgcaagtgggaggcggcccgtgaggcggagcagctgagagcctacctggagggcctgtgcgtggagtggctccgcagatacctgaagaatgggaaggagacgctgcagcgcgcggaacacccaaagacacacgtgacccaccatcccgtctctgaccatgaggccaccctgaggtgctgggccctgggcttctaccctgcggagatcacactgacctggcagtgggatggggaggaccaaactcaggacactgagcttgtggagaccaggccagcaggagatggaaccttccagaagtgggcagctgtggtggtgccttctggagaagagcagagatacacgtgccatgtgcagcacgaggggctgccggagcccctcaccctgagatgggagccgtcttcccagcccaccatccccatcgtgggcatcgttgctggcctggctgtcctggctgtcctagctgtcctaggagctgtggtggctgttgtgatgtgtaggaggaagagctcagccagcaacagtgcccagggctctgatgagtctctcatcgcttgtaaagcctgagacagctgcctgtgtgggactgagatgcaggatttcttcacacctctcctttgtgacttcaagagcctctggcatctctttctgcaaaggcatctgaatgtgtctgcgttcctgttagcataatgtgaggaggtggagagacagcccacccccgtgtccaccgtgacccctgtccccacactgacctgtgttccctccccgatcatctttcctgttccagagaagtgggctggatgtctccatctctgtctcaacttcatggtgcgctgagctgcaacttcttacttccctaatgaagttaggaacctgaatataaatttgttttctcaaatatttgctatgaagggttgatggattaattaaataagtcaattcctggaagttgagagagcaaataaagacctgagaactttccagaa

SEQ ID NO: 150785 - DNA, 1536 bp, Homo sapiens
  Payload ID: 9762
  Gene Symbol: HLA-C
  Gene Name: major histocompatibility complex, class I, C
  ENST ID: ENST00000485321
  CDS Start-End: 35-430
cccacccggactcggattctccccagacgccgagatgcgggtcatggcgccccgaaccctcatcctgctgctctcgggagccctggccctgaccgagacctgggcctgctcccactccatgaggtatttctacaccgccgtgtcccggcccggccgcggagagccccgcttcatcgcagtgggctacgtggacgacacgcagttcgtgcagttcgacagcgacgccgcgagtccaagaggggagccgcgggcgccgtgggtggagcaggaggggccggagtattgggaccgggagacacagaagtacaagcgccaggcacagactgaccgagtgaacctgcggaaactgcgcggctactacaaccagagcgaggccgaggatgtatggctgcgacctggggcccgacgggcgcctcctccgcgggtataaccagttcgcctacgacggcaaggattacatcgccctgaatgaggacctgcgctcctggaccgccgcggacaaggcggctcagatcacccagcgcaagtgggaggcggcccgtgaggcggagcagcggagagcctacctggagggcacgtgcgtggagtggctccgcagatacctggagaacgggaagaagacgctgcagcgcgcggaacacccaaagacacacgtgacccaccatcccgtctctgaccatgaggccaccctgaggtgctgggccctgggcttctaccctgcggagatcacactgacctggcagcgggatggcgaggaccaaactcaggacaccgagcttgtggagaccaggccagcaggagatggaaccttccagaagtgggcagctgtggtggtgccttctggagaagagcagagatacacgtgccatgtgcagcacgaggggctgccagagcccctcaccctgagatgggggccatcttcccagcccaccatccccatcgtgggcatcgttgctggcctggctgtcctggctgtcctagctgtcctaggagctgtgatggctgttgtgatgtgtaggaggaagagctcaggtggaaaaggagggagctgctctcaggctgcgtccagcaacagtgcccagggctctgatgagtctctcatcgcttgtaaagcctgagacagctgcctgtgtgggactgagatgcaggatttcttcacacctttcctttgtgacttcaagagcctctggcatctctttctgcaaaggcatctgaatgtgtctgcgttcctgttagcataatgtgaggaggtggagagacagcccacccccgtgtccaccgtgacccctgtccccacactgacctgtgttccctccccgatcatctttcctgttccagagaagtgggctggatgtctccatctctgtctcaactttacgtgtactgagctgcaacttcttacttccctactgaaaataagaatctgaatataaatttgttttctcaaatatttgctatgagaggttgatggattaattaaataagtcaattcctggaagttgagagagcaaataaagacctgagaaccttccagaa

SEQ ID NO: 150786 - DNA, 1536 bp, Homo sapiens
  Payload ID: 9762
  Gene Symbol: HLA-C
  Gene Name: major histocompatibility complex, class I, C
  ENST ID: ENST00000488273
  CDS Start-End: 35-430
cccacccggactcggattctccccagacgccgagatgcgggtcatggcgccccgaaccctcatcctgctgctctcgggagccctggccctgaccgagacctgggcctgctcccactccatgaggtatttctacaccgccgtgtcccggcccggccgcggagagccccgcttcatcgcagtgggctacgtggacgacacgcagttcgtgcggttcgacagcgacgccgcgagtccaagaggggagccgcgggcgccgtgggtggagcaggaggggccggagtattgggaccgggagacacagaagtacaagcgccaggcacagactgaccgagtgagcctgcggaacctgcgcggctactacaaccagagcgaggccgtggatgtatggctgcgacctggggcccgacgggcgcctcctccgcgggtatgaccagtccgcctacgacggcaaggattacatcgccctgaacgaggacctgcgctcctggaccgccgcggacacggcggctcagatcacccagcgcaagtgggaggcggcccgtgcggcggagcagcagagagcctacctggagggcacgtgcgtggagtggctccgcagatacctggagaacgggaaggagacgctgcagcgcgcggaacacccaaagacacacgtgacccaccatctcgtctctgaccatgaggccaccctgaggtgctgggccctgggcttctaccctgcggagatcacactgacctggcagcgggatggcgaggaccaaactcaggacaccgagcttgtggagaccaggccagcaggagatggaaccttccagaagtgggcagctgtggtggtgccttctggagaagagcagagatacacgtgccatgtgcagcacgaggggctgccggagcccctcaccctgagatgggagccatcttcccagcccaccatccccatcgtgggcatcgttgctggcctggctgtcctggctgtcctagctgtcctaggagctgtggtggctgttgttatgtgtaggaggaagagctcaggtggaaaaggagggagctgctctcaggctgcgtccagcaacagtgcccagggctctgatgagtctctcatcgcttgtaaagcctgagacagctgcctgtgtgggactgagatgcaggatttcttcacacctctcctttgtgacttcaagagcctctggcatctctttctgcaaaggcatctgaatgcgtctgcgttcctgttagcataatgtgaggaggtggagagacagcccacccccgtgtccaccgtgacccctgtccccacactgacctgtgttccctccccgatcatctttcctgttccagagaagtgggctggatgtctccatctctgtctcaactttacgtgtactgagctgcaacttcttacttccctactgaaaataagaatctgaatataaatttgttttctcaaatatttgctatgagaggttgatggattaattaaataagtcaatccctggaagttgagagagcaaataaagacctgagaaccttccagaa

SEQ ID NO: 150787 - DNA, 1536 bp, Homo sapiens
  Payload ID: 9762
  Gene Symbol: HLA-C
  Gene Name: major histocompatibility complex, class I, C
  ENST ID: ENST00000479595
  CDS Start-End: 35-430
cccacccggactcggattctccccagacgccgagatgcgggtcatggcgccccgaaccctcatcctgctgctctcgggagccctggccctgaccgagacctgggcctgctcccactccatgaggtatttcgacaccgccgtgtcccggcccggccgcggagagccccgcttcatctcagtgggctacgtggacgacacgcagttcgtgcggttcgacagcgacgccgcgagtccgagaggggagccccgggcgccgtgggtggagcaggaggggccggagtattgggaccgggagacacagaagtacaagcgccaggcacaggctgaccgagtgaacctgcggaaactgcgcggctactacaaccagagcgaggacgtggatgtatggctgcgacctggggcccgacgggcgcctcctccgcgggtatgaccagtccgcctacgacggcaaggattacatcgccctgaacgaggacctgcgctcctggaccgccgcggacacggcggctcagatcacccagcgcaagtgggaggcggcccgtgaggcggagcagtggagagcctacctggagggcacgtgcgtggagtggctccgcagatacctggagaacgggaaggagacgctgcagcgcgcggaacacccaaagacacacgtgacccaccatcccgtctctgaccatgaggccaccctgaggtgctgggccctgggcttctaccctgcggagatcacactgacctggcagcgggatggcgaggaccaaactcaggacaccgagcttgtggagaccaggccagcaggagatggaaccttccagaagtgggcagctgtggtggtgccttctggagaagagcagagatacacgtgccatgtgcagcacgaggggctgccagagcccctcaccctgagatgggagccatcttcccagcccaccatccccatcgtgggcatcgttgctggcctggctgtcctggctgtcctagctgtcctaggagctgtgatggctgttgtgatgtgtaggaggaagagctcaggtggaaaaggagggagctgctctcaggctgcgtccagcaacagtgcccagggctctgatgagtctctcatcgcttgtaaagcctgagacagctgcctgtgtgggactgagatgcaggatttcttcacacctctcctttgtgacttcaagagcctctggcatctctttctgcaaaggcatctgaatgtgtctgcgttcctgttagcataatgtgaggaggtggagagacagcccacccccgtgtccaccgtgacccctgtccccacactgacctgtgttccctccccgatcatctttcctgttccagagaagtgggctggatgtctccatctctgtctcaactttacgtgtactgagctgcaacttcttacttccctactgaaaataagaatctgaatataaatttgttttctcaaatatttgctatgagaggttgatggattaattaaataagtcaattcctggaagttgagagagcaaataaagacctgagaaccttccagaa

SEQ ID NO: 150788 - DNA, 1537 bp, Homo sapiens
  Payload ID: 9762
  Gene Symbol: HLA-C
  Gene Name: major histocompatibility complex, class I, C
  ENST ID: ENST00000491984
  CDS Start-End: 35-430
cccacccggactcagattctccccagacgccgagatgcgggtcatggcgccccgaaccctcatcctgctgctctcgggagccctggccctgaccgagacctgggccggctcccactccatgaggtatttctacaccgctgtgtcccggcccggccgcggggagccccacttcatcgcagtgggctacgtggacgacacgcagttcgtgcggttcgacagcgacgccgcgagtccgagaggggagccgcgggcgccgtgggtggagcaggaggggccggagtattgggaccgggagacacagaagtacaagcgccaggcacagactgaccgagtgagcctgcggaacctgcgcggctactacaaccagagcgaggccgaggatgtatggctgcgacgtggggcccgacgggcgcctcctccgcgggtatgaccagtacgcctacgacggcaaggattacatcgccctgaacgaggatctgcgctcctggaccgccgcggacacggcggctcagatcacccagcgcaagtgggaggcggcccgtgaggcggagcagctgagagcctacctggagggcctgtgcgtggagtggctccgcagatacctgaagaatgggaaggagacgctgcagcgcgcggaacacccaaagacacacgtgacccaccatcccgtctctgaccatgaggccaccctgaggtgctgggccctgggcttctaccctgcggagatcacactgacctggcagtgggatggggaggaccaaactcaggacactgagcttgtggagaccaggccagcaggagatggaaccttccagaagtgggcagctgtggtggtgccttctggagaagagcagagatacacgtgccatgtgcagcacgaggggctgccggagcccctcaccctgagatgggagccgtcttcccagcccaccatccccatcgtgggcatcgttgctggcctggctgtcctggctgtcctagctgtcctaggagctgtggtggctgttgtgatgtgtaggaggaagagctcaggtggaaaaggagggagctgctctcaggctgcgtccagcaacagtgcccagggctctgatgagtctctcatcgcttgtaaagcctgagacagctgcctgtgtgggactgagatgcaggatttcttcacacctctcctttgtgacttcaagagcctctggcatctctttctgcaaaggcatctgaatgtgtctgcgttcctgttagcataatgtgaggaggtggagagacagcccacccccgtgtccaccgtgacccctgtccccacactgacctgtgttccctccccgatcatctttcctgttccagagaagtgggctggatgtctccatctctgtctcaacttcatggtgcgctgagctgcaacttcttacttccctaatgaagttaggaacctgaatataaatttgttttctcaaatatttgctatgaagggttgatggattaattaaataagtcaattcctggaagttgagagagcaaataaagacctgagaactttccagaa

SEQ ID NO: 150789 - DNA, 966 bp, Homo sapiens
  Payload ID: 9762
  Gene Symbol: HLA-C
  Gene Name: major histocompatibility complex, class I, C
  ENST ID: ENST00000464914
  CDS Start-End: 3-677
agatgcgggtcatggcgccccgagccctcctcctgctgctctcgggaggcctggccctgaccgagacctgggcctgctcccactccatgaggtatttcgacaccgccgtgtcccggcccggccgcggagagccccgcttcatctcagtgggctacgtggacgacacgcagttcgtgcggttcgacagcgacgccgcgagtccgagaggggagccgcgggcgccgtgggtggagcaggaggggccggagtattgggaccgggagacacagaactacaagcgccaggcacaggctgaccgagtgagcctgcggaacctgcgcggctactacaaccagagcgaggacgggtctcacaccctccagaggatgtatggctgcgacctggggcccgacgggcgcctcctccgcgggtatgaccagtccgcctacgacggcaaggattacatcgccctgaacgaggacctgcgctcctggaccgccgcggacaccgcggctcagatcacccagcgcaagttggaggcggcccgtgcggcggagcagctgagagcctacctggagggcacgtgcgtggagtggctccgcagatacctggagaacgggaaggagacgctgcagcgcgcaggtcaggaccagaagtcgctgttcctccctcagagactagaactttccaatgaataggagattatcccagaacccccaaagacacacgtgacccaccaccccctctctgaccatgaggccaccctgaggtgctgggccctgggcttctaccctgcggagatcacactgacctggcagcgggatggggaggaccagacccaggacaccgagcttgtggagaccaggccagcaggagatggaaccttccagaagtgggcagctgtggtggtgccttctggacaagagcagagatacacgtgccatatgcagcacgaggggctgcaagagcccctcaccctgagctggg

SEQ ID NO: 150790 - DNA, 1538 bp, Homo sapiens
  Payload ID: 9762
  Gene Symbol: HLA-C
  Gene Name: major histocompatibility complex, class I, C
  ENST ID: ENST00000476248
  CDS Start-End: 35-430
cccacccggactcacattctccccagaggccgagatgcgggtcatggcgccccgagccctcctcctgctgctctcgggaggcctggccctgaccgagacctgggcctgctcccactccatgaggtatttcgacaccgccgtgtcccggcccggccgcggagagccccgcttcatctcagtgggctacgtggacgacacgcagttcgtgcggttcgacagcgacgccgcgagtccgagaggggagccgcgggcgccgtgggtggagcaggaggggccggagtattgggaccgggagacacagaactacaagcgccaggcacaggctgaccgagtgagcctgcggaacctgcgcggctactacaaccagagcgaggacgaggatgtatggctgcgacctggggcccgacgggcgcctcctccgcgggtatgaccagtccgcctacgacggcaaggattacatcgccctgaacgaggacctgcgctcctggaccgccgcggacaccgcggctcagatcacccagcgcaagttggaggcggcccgtgcggcggagcagctgagagcctacctggagggcacgtgcgtggagtggctccgcagatacctggagaacgggaaggagacgctgcagcgcgcagaacccccaaagacacacgtgacccaccaccccctctctgaccatgaggccaccctgaggtgctgggccctgggcttctaccctgcggagatcacactgacctggcagcgggatggggaggaccagacccaggacaccgagcttgtggagaccaggccagcaggagatggaaccttccagaagtgggcagctgtggtggtgccttctggacaagagcagagatacacgtgccatatgcagcacgaggggctgcaagagcccctcaccctgagctgggagccatcttcccagcccaccatccccatcatgggcatcgttgctggcctggctgtcctggttgtcctagctgtccttggagctgtggtcaccgctatgatgtgtaggaggaagagctcaggtggaaaaggagggagctgctctcaggctgcgtgcagcaacagtgcccagggctctgatgagtctctcatcacttgtaaagcctgagacagctgcctgtgtgggactgagatgcaggatttcttcacacctctcctttgtgacttcaagagcctctggcatctctttctgcaaaggcgtctgaatgtgtctgcgttcctgttagcataatgtgaggaggtggagagacagcccacccccgtgtccaccgtgacccctgtccccacactgacctgtgttccctccccgatcatctttcctgttccagagaggtggggctggatgtctccatctctgtctcaaattcatggtgcactgagctgcaacttcttacttccctaatgaagttaagaacctgaatataaatttgtgttctcaaatatttgctatgaagcgttgatggattaattaaataagtcaattcctagaagttgagagagcaaataaagacctgagaaccttccagaa

SEQ ID NO: 150791 - DNA, 966 bp, Homo sapiens
  Payload ID: 9762
  Gene Symbol: HLA-C
  Gene Name: major histocompatibility complex, class I, C
  ENST ID: ENST00000461937
  CDS Start-End: 3-677
agatgcgggtcatggcgccccgaaccctcatcctgctgctctcgggagccctggccctgaccgagacctgggcctgctcccactccatgaggtatttctacaccgccgtgtcccggcccggccgcggagagccccgcttcatcgcagtgggctacgtggacgacacgcagttcgtgcagttcgacagcgacgccgcgagtccaagaggggagccgcgggcgccgtgggtggagcaggaggggccggagtattgggaccgggagacacagaagtacaagcgccaggcacagactgaccgagtgaacctgcggaaactgcgcggctactacaaccagagcgaggccgggtctcacaccctccagaggatgtatggctgcgacctggggcccgacgggcgcctcctccgcgggtataaccagttcgcctacgacggcaaggattacatcgccctgaatgaggacctgcgctcctggaccgccgcggacaaggcggctcagatcacccagcgcaagtgggaggcggcccgtgaggcggagcagcggagagcctacctggagggcacgtgcgtggagtggctccgcagatacctggagaacgggaagaagacgctgcagcgcgcgggtcaggaccagaagtcgctgttcctccctcagagactagaactttccaatgaataggagattatcccagaacacccaaagacacacgtgacccaccatcccgtctctgaccatgaggccaccctgaggtgctgggccctgggcttctaccctgcggagatcacactgacctggcagcgggatggcgaggaccaaactcaggacaccgagcttgtggagaccaggccagcaggagatggaaccttccagaagtgggcagctgtggtggtgccttctggagaagagcagagatacacgtgccatgtgcagcacgaggggctgccagagcccctcaccctgagatggg

SEQ ID NO: 150792 - DNA, 1536 bp, Homo sapiens; identical to SEQ ID NO: 150785
  Payload ID: 9762
  Gene Symbol: HLA-C
  Gene Name: major histocompatibility complex, class I, C
  ENST ID: ENST00000469544
  CDS Start-End: 35-430

SEQ ID NO: 150793 - DNA, 147 bp, Homo sapiens
  Payload ID: 9762
  Gene Symbol: HLA-C
  Gene Name: major histocompatibility complex, class I, C
  ENST ID: ENST00000621261
  CDS Start-End: 1-147
gctgtggtggtgccttctggacaagagcagagatacacgtgccatatgcagcacgaggggctgcaagagcccctcaccctgagctggggtggaaaaggagggagctgctctcaggctgcgtgcagcaacagtgcccagggctctgat

SEQ ID NO: 150794 - DNA, 147 bp, Homo sapiens
  Payload ID: 9762
  Gene Symbol: HLA-C
  Gene Name: major histocompatibility complex, class I, C
  ENST ID: ENST00000618255
  CDS Start-End: 1-147
gctgtggtggtgccttctggagaagagcagagatacacgtgccatgtgcagcacgaggggctgccagagcccctcaccctgagatggggtggaaaaggagggagctgctctcaggctgcgtccagcaacagtgcccagggctctgat

SEQ ID NO: 150795 - DNA, 147 bp, Homo sapiens
  Payload ID: 9762
  Gene Symbol: HLA-C
  Gene Name: major histocompatibility complex, class I, C
  ENST ID: ENST00000619148
  CDS Start-End: 1-147
gctgtggtggtgccttctggagaagagcagagatacacgtgccatgtgcagcacgaggggctgccggagcccctcaccctgagatggggtggaaaaggagggagctgctctcaggctgcgtccagcaacagtgcccagggctctgat

SEQ ID NO: 150796 - DNA, 2601 bp, Homo sapiens
  Payload ID: 9763
  Gene Symbol: HLA-E
  Gene Name: major histocompatibility complex, class I, E
  ENST ID: ENST00000376630
  CDS Start-End: 66-1142
acgactcccgactataaagtccccatccggactcaagaagttctcaggactcagaggctgggatcatggtagatggaaccctccttttactcctctcggaggccctggcccttacccagacctgggcgggctcccactccttgaagtatttccacacttccgtgtcccggcccggccgcggggagccccgcttcatctctgtgggctacgtggacgacacccagttcgtgcgcttcgacaacgacgccgcgagtccgaggatggtgccgcgggcgccgtggatggagcaggaggggtcagagtattgggaccgggagacacggagcgccagggacaccgcacagattttccgagtgaatctgcggacgctgcgcggctactacaatcagagcgaggccgggtctcacaccctgcagtggatgcatggctgcgagctggggcccgacgggcgcttcctccgcgggtatgaacagttcgcctacgacggcaaggattatctcaccctgaatgaggacctgcgctcctggaccgcggtggacacggcggctcagatctccgagcaaaagtcaaatgatgcctctgaggcggagcaccagagagcctacctggaagacacatgcgtggagtggctccacaaatacctggagaaggggaaggagacgctgcttcacctggagcccccaaagacacacgtgactcaccaccccatctctgaccatgaggccaccctgaggtgctgggccctgggcttctaccctgcggagatcacactgacctggcagcaggatggggagggccatacccaggacacggagctcgtggagaccaggcctgcaggggatggaaccttccagaagtgggcagctgtggtggtgccttctggagaggagcagagatacacgtgccatgtgcagcatgaggggctacccgagcccgtcaccctgagatggaagccggcttcccagcccaccatccccatcgtgggcatcattgctggcctggttctccttggatctgtggtctctggagctgtggttgctgctgtgatatggaggaagaagagctcaggtggaaaaggagggagctactctaaggctgagtggagcgacagtgcccaggggtctgagtctcacagcttgtaaagcctgagacagctgccttgtgtgcgactgagatgcacagctgccttgtgtgcgactgagatgcaggatttcctcacgcctcccctatgtgtcttaggggactctggcttctctttttgcaagggcctctgaatctgtctgtgtccctgttagcacaatgtgaggaggtagagaaacagtccacctctgtgtctaccatgacccccttcctcacactgacctgtgttccttccctgttctcttttctattaaaaataagaacctgggcagagtgcggcagctcatgcctgtaatcccagcacttagggaggccgaggagggcagatcacgaggtcaggagatcgaaaccatcctggctaacacggtgaaaccccgtctctactaaaaaatacaaaaaattagctgggcgcagaggcacgggcctgtagtcccagctactcaggaggcggaggcaggagaatggcgtcaacccgggaggcggaggttgcagtgagccaggattgtgcgactgcactccagcctgggtgacagggtgaaacgccatctcaaaaaataaaaattgaaaaataaaaaaagaacctggatctcaatttaatttttcatattcttgcaatgaaatggacttgaggaagctaagatcatagctagaaatacagataattccacagcacatctctagcaaatttagcctattcctattctctagcctattccttaccacctgtaatcttgaccatataccttggagttgaatattgttttcatactgctgtggtttgaatgttccctccaacactcatgttgagacttaatccctaatgtggcaatactgaaaggtggggcctttgagatgtgattggatcgtaaggctgtgccttcattcatgggttaatggattaatgggttatcacaggaatgggactggtggctttataagaagaggaaaagagaactgagctagcatgcccagcccacagagagcctccactagagtgatgctaagtggaaatgtgaggtgcagctgccacagagggcccccaccagggaaatgtctagtgtctagtggatccaggccacaggagagagtgccttgtggagcgctgggagcaggacctgaccaccaccaggaccccagaactgtggagtcagtggcagcatgcagcgcccccttgggaaagctttaggcaccagcctgcaacccattcgagcagccacgtaggctgcacccagcaaagccacaggcacggggctacctgaggccttgggggcccaatccctgctccagtgtgtccgtgaggcagcacacgaagtcaaaagagattattctcttcccacagataccttttctctcccatgaccctttaacagcatctgcttcattcccctcaccttcccaggctgatctgaggtaaactttgaagtaaaataaaagctgtgtttgagcatcatttgtatttca

SEQ ID NO: 150797 - DNA, 2601 bp, Homo sapiens
  Payload ID: 9763
  Gene Symbol: HLA-E
  Gene Name: major histocompatibility complex, class I, E
  Uniprot ID: P13747
  ENST ID: ENST00000383597
  CDS Start-End: 66-1142
acgactcccgactataaagtccccatccggactcaagaagttctcaggactcagaggctgggatcatggtagatggaaccctccttttactcctctcggaggccctggcccttacccagacctgggcgggctcccactccttgaagtatttccacacttccgtgtcccggcccggccgcggggagccccgcttcatctctgtgggctacgtggacgacacccagttcgtgcgcttcgacaacgacgccgcgagtccgaggatggtgccgcgggcgccgtggatggagcaggaggggtcagagtattgggaccgggagacacggagcgccagggacaccgcacagattttccgagtgaacctgcggacgctgcgcggctactacaatcagagcgaggccgggtctcacaccctgcagtggatgcatggctgcgagctggggcccgacaggcgcttcctccgcgggtatgaacagttcgcctacgacggcaaggattatctcaccctgaatgaggacctgcgctcctggaccgcggtggacacggcggctcagatctccgagcaaaagtcaaatgatgcctctgaggcggagcaccagagagcctacctggaagacacatgcgtggagtggctccacaaatacctggagaaggggaaggagacgctgcttcacctggagcccccaaagacacacgtgactcaccaccccatctctgaccatgaggccaccctgaggtgctgggccctgggcttctaccctgcggagatcacactgacctggcagcaggatggggagggccatacccaggacacggagctcgtggagaccaggcctgcaggggatggaaccttccagaagtgggcagctgtggtggtgccttctggagaggagcagagatacacgtgccatgtgcagcatgaggggctacccgagcccgtcaccctgagatggaagccggcttcccagcccaccatccccatcgtgggcatcattgctggcctggttctccttggatctgtggtctctggagctgtggttgctgctgtgatatggaggaagaagagctcaggtggaaaaggagggagctactctaaggctgagtggagcgacagtgcccaggggtctgagtctcacagcttgtaaagcctgagacagctgccttgtgtgcgactgagatgcacagctgccttgtgtgcgactgagatgcaggatttcctcacgcctcccctatgtgtcttaggggactctggcttctctttttgcaagggcctctgaatctgtctgtgtccctgttagcacaatgtgaggaggtagagaaacagtccacctctgtgtctaccatgacccccttcctcacactgacctgtgttccttccctgttctcttttctattaaaaataagaacctgggcagagtgcggcagctcatgcctgtaatcccagcacttagggaggccgaggagggcagatcacgaggtcaggagatcgaaaccatcctggctaacacggtgaaaccccgtctctactaaaaaatacaaaaaattagctgggcgcagaggcacgggcctgtagtcccagctactcaggaggcggaggcaggagaatggcgtcaacccgggaggcggaggttgcagtgagccaggattgtgcgactgcactccagcctgggtgacagggtgaaacgccatctcaaaaaataaaaattaaaaaataaaaaaagaacctggatctcaatttaatttttcatattcttgcaatgaaatggacttgaggaagctaagatcatagctagaaatacagataattccacagcacatctctagcaaatttagcctattcctattctctagcctattccttaccacctgtaatcttgaccatataccttggagttgaatattgttttcatactgctgtggtttgaatgttccctccaacactcatgttgagacttaatccctaatgtggcaatactgaaaggtggggcctttgagatgtgattggatcgtaaggctgtgccttcattcatgggttaatggattaatgggttatcacaggaatgggactggtggctttataagaagaggaaaagagaactgagctagcatgcccagcccacagagagcctccactagagtgatgctaagtggaaatgtgaggtgcagctgccacagagggcccccaccagggaaatgtctagtgtctagtggatccaggccacaggagagagtgccttgtggagcgctgggagcaggacctgaccaccaccaggaccccagaactgtggagtcagtggcagcatgcagcgcccccttgggaaagctttaggcaccagcctgcaacccattcgagcagccacgtaggctgcacccagcaaagccacaggcacggggctacctgaggccttgggggcccaatccctgctccagtgtgtccgtgaggcagcacacgaagtcaaaagagattattctcttcccacagataccttttctctcccatgaccctttaacagcatctgcttcattcccctcaccttcccaggctgatctgaggtaaactttgaagtaaaataaaagctgtgtttgagcatcatttgtatttca

SEQ ID NO: 150798 - DNA, 2601 bp, Homo sapiens; identical to SEQ ID NO: 150797
  Payload ID: 9763
  Gene Symbol: HLA-E
  Gene Name: major histocompatibility complex, class I, E
  Uniprot ID: P13747
  ENST ID: ENST00000415649
  CDS Start-End: 66-1142

SEQ ID NO: 150799 - DNA, 2601 bp, Homo sapiens; identical to SEQ ID NO: 150797
  Payload ID: 9763
  Gene Symbol: HLA-E
  Gene Name: major histocompatibility complex, class I, E
  Uniprot ID: P13747
  ENST ID: ENST00000427936
  CDS Start-End: 66-1142

SEQ ID NO: 150800 - DNA, 2601 bp, Homo sapiens; identical to SEQ ID NO: 150796
  Payload ID: 9763
  Gene Symbol: HLA-E
  Gene Name: major histocompatibility complex, class I, E
  ENST ID: ENST00000444683
  CDS Start-End: 66-1142

SEQ ID NO: 150801 - DNA, 2601 bp, Homo sapiens; identical to SEQ ID NO: 150796
  Payload ID: 9763
  Gene Symbol: HLA-E
  Gene Name: major histocompatibility complex, class I, E
  ENST ID: ENST00000425603
  CDS Start-End: 66-1142

SEQ ID NO: 150802 - DNA, 2601 bp, Homo sapiens; identical to SEQ ID NO: 150797
  Payload ID: 9763
  Gene Symbol: HLA-E
  Gene Name: major histocompatibility complex, class I, E
  Uniprot ID: P13747
  ENST ID: ENST00000415289
  CDS Start-End: 66-1142

SEQ ID NO: 150803 - DNA, 1635 bp, Homo sapiens
  Payload ID: 9764
  Gene Symbol: HLA-F
  Gene Name: major histocompatibility complex, class I, F
  Uniprot ID: P30511
  ENST ID: ENST00000259951
  CDS Start-End: 186-1514
ttctctttctctcccaacccgtgtcaggtccttcttcctggatactcataacgcggccccatttctcactcccattgggcgtcgcgtttctagagaagccaatcagtgtcgccgcagttcccaggttctaaagtcccacgcaccccgcgggactcatatttttcccagacgcggaggttggggtcatggcgccccgaagcctcctcctgctgctctcaggggccctggccctgaccgatacttgggcgggctcccactccttgaggtatttcagcaccgctgtgtcgcggcccggccgcggggagccccgctacatcgccgtggagtacgtagacgacacgcaattcctgcggttcgacagcgacgccgcgattccgaggatggagccgcgggagccgtgggtggagcaagaggggccgcagtattgggagtggaccacagggtacgccaaggccaacgcacagactgaccgagtggccctgaggaacctgctccgccgctacaaccagagcgaggctgggtctcacaccctccagggaatgaatggctgcgacatggggcccgacggacgcctcctccgcgggtatcaccagcacgcgtacgacggcaaggattacatctccctgaacgaggacctgcgctcctggaccgcggcggacaccgtggctcagatcacccagcgcttctatgaggcagaggaatatgcagaggagttcaggacctacctggagggcgagtgcctggagttgctccgcagatacttggagaatgggaaggagacgctacagcgcgcagatcctccaaaggcacacgttgcccaccaccccatctctgaccatgaggccaccctgaggtgctgggccctgggcttctaccctgcggagatcacgctgacctggcagcgggatggggaggaacagacccaggacacagagcttgtggagaccaggcctgcaggggatggaaccttccagaagtgggccgctgtggtggtgcctcctggagaggaacagagatacacatgccatgtgcagcacgaggggctgccccagcccctcatcctgagatgggagcagtctccccagcccaccatccccatcgtgggcatcgttgctggccttgttgtccttggagctgtggtcactggagctgtggtcgctgctgtgatgtggaggaagaagagctcagatagaaacagagggagctactctcaggctgcagcctactcagtggtcagcggaaacttgatgataacatggtggtcaagcttatttctcctgggggtgctcttccaaggatatttgggctgcctccggagtcacagtgtcttgggccgccggaaggtgggtgacatgtggatcttgttttttttgtggctgtggacatctttcaacactgccttcttggccttgcaaagccttcgctttggcttcggctttaggaggggcaggagcttccttcttcgttcttggcaccatcttatgaaaagggtccagattaagatttttgactgagtcattctaaagtaagttgcaagacccatgatactagaccactaaatacttcatcacacacctcctaagaataagaaccaacattatcacaccaaagaaaataaataattccataatatta

SEQ ID NO: 150804 - DNA, 1283 bp, Homo sapiens
  Payload ID: 9764
  Gene Symbol: HLA-F
  Gene Name: major histocompatibility complex, class I, F
  Uniprot ID: P30511
  ENST ID: ENST00000334668
  CDS Start-End: 125-1165
tttctcactcccattgggcgtcgcgtttctagagaagccaatcagtgtcgccgcagttcccaggttctaaagtcccacgcaccccgcgggactcatatttttcccagacgcggaggttggggtcatggcgccccgaagcctcctcctgctgctctcaggggccctggccctgaccgatacttgggcgggctcccactccttgaggtatttcagcaccgctgtgtcgcggcccggccgcggggagccccgctacatcgccgtggagtacgtagacgacacgcaattcctgcggttcgacagcgacgccgcgattccgaggatggagccgcgggagccgtgggtggagcaagaggggccgcagtattgggagtggaccacagggtacgccaaggccaacgcacagactgaccgagtggccctgaggaacctgctccgccgctacaaccagagcgaggctgggtctcacaccctccagggaatgaatggctgcgacatggggcccgacggacgcctcctccgcgggtatcaccagcacgcgtacgacggcaaggattacatctccctgaacgaggacctgcgctcctggaccgcggcggacaccgtggctcagatcacccagcgcttctatgaggcagaggaatatgcagaggagttcaggacctacctggagggcgagtgcctggagttgctccgcagatacttggagaatgggaaggagacgctacagcgcgcagatcctccaaaggcacacgttgcccaccaccccatctctgaccatgaggccaccctgaggtgctgggccctgggcttctaccctgcggagatcacgctgacctggcagcgggatggggaggaacagacccaggacacagagcttgtggagaccaggcctgcaggggatggaaccttccagaagtgggccgctgtggtggtgcctcctggagaggaacagagatacacatgccatgtgcagcacgaggggctgccccagcccctcatcctgagatgggagcagtctccccagcccaccatccccatcgtgggcatcgttgctggccttgttgtccttggagctgtggtcactggagctgtggtcgctgctgtgatgtggaggaagaagagctcagatagaaacagagggagctactctcaggctgcagtgtgagacagcttccttgtgtgggactgagaagcaagatatcaatgtagcagaattgcacttgtgcctcacgaacatacataaattttaaaaataaagaataaaaatatatctttttatagat

SEQ ID NO: 150805 - DNA, 1544 bp, Homo sapiens
  Payload ID: 9764
  Gene Symbol: HLA-F
  Gene Name: major histocompatibility complex, class I, F
  ENST ID: ENST00000342322
  CDS Start-End: 385-1425
gaaggagaggaagaggaagaggaagaagaagaagaagaagaagaagaagaagaagaagaagaagaagaagaagaagaagaagaagaagaagaagaagaagaagaagaagaagaagaaaaggaagaagaagaaactgtctctacaccttcattctcaggacaagttcattgtctggcaccaagctccttggggtgaattttcttccaaaagagtccggggagtccaggtccttcttcctggatactcataacgcggccccatttctcactcccattgggcgtcgcgtttctagagaagccaatcagtgtcgccgcagttcccaggttctaaagtcccacgcaccccgcgggactcatatttttcccagacgcggaggttggggtcatggcgccccgaagcctcctcctgctgctctcaggggccctggccctgaccgatacttgggcgggctcccactccttgaggtatttcagcaccgctgtgtcgcggcccggccgcggggagccccgctacatcgccgtggagtacgtagacgacacgcaattcctgcggttcgacagcgacgccgcgattccgaggatggagccgcgggagccgtgggtggagcaagaggggccgcagtattgggagtggaccacagggtacgccaaggccaacgcacagactgaccgagtggccctgaggaacctgctccgccgctacaaccagagcgaggctgggtctcacaccctccagggaatgaatggctgcgacatggggcccgacggacgcctcctccgcgggtatcaccagcacgcgtacgacggcaaggattacatctccctgaacgaggacctgcgctcctggaccgcggcggacaccgtggctcagatcacccagcgcttctatgaggcagaggaatatgcagaggagttcaggacctacctggagggcgagtgcctggagttgctccgcagatacttggagaatgggaaggagacgctacagcgcgcagatcctccaaaggcacacgttgcccaccaccccatctctgaccatgaggccaccctgaggtgctgggccctgggcttctaccctgcggagatcacgctgacctggcagcgggatggggaggaacagacccaggacacagagcttgtggagaccaggcctgcaggggatggaaccttccagaagtgggccgctgtggtggtgccttctggagaggaacagagatacacatgccatgtgcagcacgaggggctgccccagcccctcatcctgagatgggagcagtctccccagcccaccatccccatcgtgggcatcgttgctggccttgttgtccttggagctgtggtcactggagctgtggtcgctgctgtgatgtggaggaagaagagctcagatagaaacagagggagctactctcaggctgcagtgtgagacagcttccttgtgtgggactgagaagcaagatatcaatgtagcagaattgcacttgtgcctcacgaacatacataaattttaaaaataaagaataaaaatatatctttttatagata

SEQ ID NO: 150806 - DNA, 884 bp, Homo sapiens
  Payload ID: 9764
  Gene Symbol: HLA-F
  Gene Name: major histocompatibility complex, class I, F
  Uniprot ID: P30511
  ENST ID: ENST00000359076
  CDS Start-End: 1-765
atggcgccccgaagcctcctcctgctgctctcaggggccctggccctgaccgatacttgggcgggctcccactccttgaggtatttcagcaccgctgtgtcgcggcccggccgcggggagccccgctacatcgccgtggagtacgtagacgacacgcaattcctgcggttcgacagcgacgccgcgattccgaggatggagccgcgggagccgtgggtggagcaagaggggccgcagtattgggagtggaccacagggtacgccaaggccaacgcacagactgaccgagtggccctgaggaacctgctccgccgctacaaccagagcgaggctgggtctcacaccctccagggaatgaatggctgcgacatggggcccgacggacgcctcctccgcgggtatcaccagcacgcgtacgacggcaaggattacatctccctgaacgaggacctgcgctcctggaccgcggcggacaccgtggctcagatcacccagcgcttctatgaggcagaggaatatgcagaggagttcaggacctacctggagggcgagtgcctggagttgctccgcagatacttggagaatgggaaggagacgctacagcgcgcagagcagtctccccagcccaccatccccatcgtgggcatcgttgctggccttgttgtccttggagctgtggtcactggagctgtggtcgctgctgtgatgtggaggaagaagagctcagatagaaacagagggagctactctcaggctgcagtgtgagacagcttccttgtgtgggactgagaagcaagatatcaatgtagcagaattgcacttgtgcctcacgaacatacataaattttaaaaataaagaataaaaatatatctttttatagata

SEQ ID NO: 150807 - DNA, 1059 bp, Homo sapiens
  Payload ID: 9764
  Gene Symbol: HLA-F
  Gene Name: major histocompatibility complex, class I, F
  ENST ID: ENST00000376844
  CDS Start-End: 57-1059
aaagtcccacgcaccccgcgggactcatatttttcccagacgcggaggttggggtcatggcgccccgaagcctcctcctgctgctctcaggggccctggccctgaccgatacttgggcgggctcccactccttgaggtatttcagcaccgctgtgtcgcggcccggccgcggggagccccgctacatcgccgtggagtacgtagacgacacgcaattcctgcggttcgacagcgacgccgcgattccgaggatggagccgcgggagccgtgggtggagcaagaggggccgcagtattgggagtggaccacagggtacgccaaggccaacgcacagactgaccgagtggccctgaggaacctgctccgccgctacaaccagagcgaggctgggtctcacaccctccagggaatgaatggctgcgacatggggcccgacggacgcctcctccgcgggtatcaccagcacgcgtacgacggcaaggattacatctccctgaacgaggacctgcgctcctggaccgcggcggacaccgtggctcagatcacccagcgcttctatgaggcagaggaatatgcagaggagttcaggacctacctggagggcgagtgcctggagttgctccgcagatacttggagaatgggaaggagacgctacagcgcgcagatcctccaaaggcacacgttgcccaccaccccatctctgaccatgaggccaccctgaggtgctgggccctgggcttctaccctgcggagatcacgctgacctggcagcgggatggggaggaacagacccaggacacagagcttgtggagaccaggcctgcaggggatggaaccttccagaagtgggccgctgtggtggtgccttctggagaggaacagagatacacatgccatgtgcagcacgaggggctgccccagcccctcatcctgagatgggagcagtctccccagcccaccatccccatcgtgggcatcgttgctggccttgttgtccttggagctgtggtcactggagctgtggtcgctgctgtgatgtggaggaagaagagctcag

SEQ ID NO: 150808 - DNA, 884 bp, Homo sapiens
  Payload ID: 9764
  Gene Symbol: HLA-F
  Gene Name: major histocompatibility complex, class I, F
  Uniprot ID: P30511
  ENST ID: ENST00000376848
  CDS Start-End: 1-765
atggcgccccgaagcctcctcctgctgctctcaggggccctggccctgaccgatacttgggcaggctcccactccttgaggtatttcagcaccgctgtgtcgcggcccggccgcggggagccccgctacatcgccgtggagtacgtagacgacacgcaattcctgcggttcgacagcgacgccgcgattccgaggatggagccgcgggagccgtgggtggagcaagaggggccgcagtattgggagtggaccacagggtacgccaaggccaacgcacagactgaccgagtggccctgaggaacctgctccgccgctacaaccagagcgaggctgggtctcacaccctccagggaatgaatggctgcgacatggggcccgacggacgcctcctccgcgggtatcaccagcacgcgtacgacggcaaggattacatctccctgaacgaggacctgcgctcctggaccgcggcggacaccgtggctcagatcacccagcgcttctatgaggcagaggaatatgcagaggagttcaggacctacctggagggcgagtgcctggagttgctccgcagatacttggagaatgggaaggagacgctacagcgcgcagagcagtctccccagcccaccatccccatcgtgggcatcgttgctggccttgttgtccttggagctgtggtcactggagctgtggtcgctgctgtgatgtggaggaagaagagctcagatagaaacagagggagctactctcaggctgcagtgtgagacagcttccttgtgtgggactgagaagcaagatatcaatgtagcagaattgcacttgtgcctcacgaacatacataaattttaaaaataaagaataaaaatatatctttttatagata

SEQ ID NO: 150809 - DNA, 1544 bp, Homo sapiens
  Payload ID: 9764
  Gene Symbol: HLA-F
  Gene Name: major histocompatibility complex, class I, F
  Uniprot ID: P30511
  ENST ID: ENST00000376861
  CDS Start-End: 385-1425
gaagaggaagaggaagaagaagaagaagaagaagaagaagaagaagaagaagaagaagaagaagaagaagaagaagaagaagaagaagaagaagaagaagaagaagaagaagaagaaaaggaagaagaagaaactgtctctacaccttcattctcaggacaagttcattgtctggcaccaagctccttggggtgaattttcttccaaaagagtccggggagtccaggtccttcttcctggatactcataacgcggccccatttctcactcccattgggcgtcgcgtttctagagaagccaatcagtgtcgccgcagttcccaggttctaaagtcccacgcaccccgcgggactcatatttttcccagacgcggaggttggggtcatggcgccccgaagcctcctcctgctgctctcaggggccctggccctgaccgatacttgggcgggctcccactccttgaggtatttcagcaccgctgtgtcgcggcccggccgcggggagccccgctacatcgccgtggagtacgtagacgacacgcaattcctgcggttcgacagcgacgccgcgattccgaggatggagccgcgggagccgtgggtggagcaagaggggccgcagtattgggagtggaccacagggtacgccaaggccaacgcacagactgaccgagtggccctgaggaacctgctccgccgctacaaccagagcgaggctgggtctcacaccctccagggaatgaatggctgcgacatggggcccgacggacgcctcctccgcgggtatcaccagcacgcgtacgacggcaaggattacatctccctgaacgaggacctgcgctcctggaccgcggcggacaccgtggctcagatcacccagcgcttctatgaggcagaggaatatgcagaggagttcaggacctacctggagggcgagtgcctggagttgctccgcagatacttggagaatgggaaggagacgctacagcgcgcagatcctccaaaggcacacgttgcccaccaccccatctctgaccatgaggccaccctgaggtgctgggccctgggcttctaccctgcggagatcacgctgacctggcagcgggatggggaggaacagacccaggacacagagcttgtggagaccaggcctgcaggggatggaaccttccagaagtgggccgctgtggtggtgcctcctggagaggaacagagatacacatgccatgtgcagcacgaggggctgccccagcccctcatcctgagatgggagcagtctccccagcccaccatccccatcgtgggcatcgttgctggccttgttgtccttggagctgtggtcactggagctgtggtcgctgctgtgatgtggaggaagaagagctcagatagaaacagagggagctactctcaggctgcagtgtgagacagcttccttgtgtgggactgagaagcaagatatcaatgtagcagaattgcacttgtgcctcacgaacatacataaattttaaaaataaagaataaaaatatatctttttatagata

SEQ ID NO: 150810 - DNA, 884 bp, Homo sapiens; identical to SEQ ID NO: 150806
  Payload ID: 9764
  Gene Symbol: HLA-F
  Gene Name: major histocompatibility complex, class I, F
  Uniprot ID: P30511
  ENST ID: ENST00000383515
  CDS Start-End: 1-765

SEQ ID NO: 150811 - DNA, 1506 bp, Homo sapiens
  Payload ID: 9764
  Gene Symbol: HLA-F
  Gene Name: major histocompatibility complex, class I, F
  ENST ID: ENST00000383516
  CDS Start-End: 57-1385
aaagtcccacgcaccccgcgggactcatatttttcccagacgcggaggttggggtcatggcgccccgaagcctcctcctgctgctctcaggggccctggccctgaccgatacttgggcgggctcccactccttgaggtatttcagcaccgctgtgtcgcggcccggccgcggggagccccgctacatcgccgtggagtacgtagacgacacgcaattcctgcggttcgacagcgacgccgcgattccgaggatggagccgcgggagccgtgggtggagcaagaggggccgcagtattgggagtggaccacagggtacgccaaggccaacgcacagactgaccgagtggccctgaggaacctgctccgccgctacaaccagagcgaggctgggtctcacaccctccagggaatgaatggctgcgacatggggcccgacggacgcctcctccgcgggtatcaccagcacgcgtacgacggcaaggattacatctccctgaacgaggacctgcgctcctggaccgcggcggacaccgtggctcagatcacccagcgcttctatgaggcagaggaatatgcagaggagttcaggacctacctggagggcgagtgcctggagttgctccgcagatacttggagaatgggaaggagacgctacagcgcgcagatcctccaaaggcacacgttgcccaccaccccatctctgaccatgaggccaccctgaggtgctgggccctgggcttctaccctgcggagatcacgctgacctggcagcgggatggggaggaacagacccaggacacagagcttgtggagaccaggcctgcaggggatggaaccttccagaagtgggccgctgtggtggtgccttctggagaggaacagagatacacatgccatgtgcagcacgaggggctgccccagcccctcatcctgagatgggagcagtctccccagcccaccatccccatcgtgggcatcgttgctggccttgttgtccttggagctgtggtcactggagctgtggtcgctgctgtgatgtggaggaagaagagctcagatagaaacagagggagctactctcaggctgcagcctactcagtggtcagcggaaacttgatgataacatggtggtcaagcttatttctcctgggggtgctcttccaaggatatttgggctgcctccggagtcacagtgtcttgggccgccggaaggtgggtgacatgtggatcttgttttttttgtggctgtggacatctttcaacactgccttcttggccttgcaaagccttcgctttggcttcggctttaggaggggcaggagcttccttcttcgttcttggcaccatcttatgaaaagggtccagattaagatttttgactgagtcattctaaagtaagttgcaagacccatgatactagaccactaaatacttcatcacacacctcctaagaataagaaccaacattatcacaccaaagaaaataaataattccataatatta

SEQ ID NO: 150812 - DNA, 1544 bp, Homo sapiens
  Payload ID: 9764
  Gene Symbol: HLA-F
  Gene Name: major histocompatibility complex, class I, F
  ENST ID: ENST00000383626
  CDS Start-End: 385-1425
gaagaggaagaggaagaggaagaggaagaagaagaagaagaagaagaagaagaagaagaagaagaagaagaagaagaagaagaagaagaagaagaagaagaagaagaagaagaagaagaggaagaagaagaaactgtctctagaccttcattctcaggacaagttcattgtctggcaccaagctccttggggtgaattttcttccaaaagagtccggggagtccaggtccttcatcctggatactcataacgcggccccatttctcactcccattgggcgtcgcgtttctagagaagccaatcagtgtcgccgcagttcccaggttctaaagtcccacgcaccccgcgggactcatatttttcccagacgcggaggttggggtcatggcgccccgaagcctcctcctgctgctctcaggggccctggccctgaccgatacttgggcgggctcccactccttgaggtatttcagcaccgctgtgtcgcggcccggccgcggggagccccgctacatcgccgtggagtacgtagacgacacgcaattcctgcggttcgacagcgacgccgcgattccgaggatggagccgcgggagccgtgggtggagcaagaggggccgcagtattgggagtggaccacagggtacgccaaggccaacgcacagactgaccgagtggccctgaggaacctgctccgccgctacaaccagagcgaggctgggtctcacaccctccagggaatgaatggctgcgacatggggcccgacggacgcctcctccgcgggtatcaccagcacgcgtacgacggcaaggattacatctccctgaacgaggacctgcgctcctggaccgcggcggacaccgtggctcagatcacccagcgcttctatgaggcagaggaatatgcagaggagttcaggacctacctggagggcgagtgcctggagttgctccgcagatacttggagaatgggaaggagacgctacagcgcgcagatcctccaaaggcacacgttgcccaccaccccatctctgaccatgaggccaccctgaggtgctgggccctgggcttctaccctgcggagatcacgctgacctggcagcgggatggggaggaacagacccaggacacagagcttgtggagaccaggcctgcaggggatggaaccttccagaagtgggccgctgtggtggtgccttctggagaggaacagagatacacatgccatgtgcagcacgaggggctgccccagcccctcatcctgagatgggagcagtctccccagcccaccatccccatcgtgggcatcgttgctggccttgttgtccttggagctgtggtcactggagctgtggtcgctgctgtgatgtggaggaagaagagctcagatagaaacagagggagctactctcaggctgcagtgtgagacagcttccttgtgtgggactgagaagcaagatatcaatgtagcagaattgcacttgtgcctcacgaacatacataaattttaaaaataaagaataaaaatatatctttttatagata

SEQ ID NO: 150813 - DNA, 1506 bp, Homo sapiens; identical to SEQ ID NO: 150811
  Payload ID: 9764
  Gene Symbol: HLA-F
  Gene Name: major histocompatibility complex, class I, F
  ENST ID: ENST00000383627
  CDS Start-End: 57-1385

SEQ ID NO: 150814 - DNA, 1506 bp, Homo sapiens; identical to SEQ ID NO: 150811
  Payload ID: 9764
  Gene Symbol: HLA-F
  Gene Name: major histocompatibility complex, class I, F
  ENST ID: ENST00000428296
  CDS Start-End: 57-1385

SEQ ID NO: 150815 - DNA, 578 bp, Homo sapiens
  Payload ID: 9764
  Gene Symbol: HLA-F
  Gene Name: major histocompatibility complex, class I, F
  ENST ID: ENST00000447400
  CDS Start-End: 186-578
ttctctttctctcccaacccgtgtcaggtccttcatcctggatactcataacgcggccccatttctcactcccattgggcgtcgcgtttctagagaagccaatcagtgtcgccgcagttcccaggttctaaagtcccacgcaccccgcgggactcatatttttcccagacgcggaggttggggtcatggcgccccgaagcctcctcctgctgctctcaggggccctggccctgaccgatacttgggcgggctcccactccttgaggtatttcagcaccgctgtgtcgcggcccggccgcggggagccccgctacatcgccgtggagtacgtagacgacacgcaattcctgcggttcgacagcgacgccgcgattccgaggatggagccgcgggagccgtgggtggagcaagaggggccgcagtattgggagtggaccacagggtacgccaaggccaacgcacagactgaccgagtggccctgaggaacctgctccgccgctacaaccagagcgaggctgggtctcacaccctccagggaatgaatggctgcgacatggggcccgacggacgcctcctc

SEQ ID NO: 150816 - DNA, 578 bp, Homo sapiens
  Payload ID: 9764
  Gene Symbol: HLA-F
  Gene Name: major histocompatibility complex, class I, F
  ENST ID: ENST00000444057
  CDS Start-End: 186-578
ttctctttctctcccaacccgtgtcaggtccttcttcctggttactcataacgcggccccatttctcactcccattgggcgtcgggtttctagagaagccaatcagtgtcgccgcagttcccaggttctaaagtcccacgcaccccgcgggactcatatttttcccagacgcggaggttggggtcatggcgccccgaagcctcctcctgctgctctcaggggccctggccctgaccgatacttgggcaggctcccactccttgaggtatttcagcaccgctgtgtcgcggcccggccgcggggagccccgctacatcgccgtggagtacgtagacgacacgcaattcctgcggttcgacagcgacgccgcgattccgaggatggagccgcgggagccgtgggtggagcaagaggggccgcagtattgggagtggaccacagggtacgccaaggccaacgcacagactgaccgagtggccctgaggaacctgctccgccgctacaaccagagcgaggctgggtctcacaccctccagggaatgaatggctgcgacatggggcccgacggacgcctcctc

SEQ ID NO: 150817 - DNA, 796 bp, Homo sapiens
  Payload ID: 9764
  Gene Symbol: HLA-F
  Gene Name: major histocompatibility complex, class I, F
  ENST ID: ENST00000454779
  CDS Start-End: 1-677
gcccagaccctccacccgggagagtcccaggcgcctttacccagcacgcgtacgacggcaaggattacatctccctgaacgaggacctgcgctcctggaccgcggcggacaccgtggctcagatcacccagcgcttctatgaggcagaggaatatgcagaggagttcaggacctacctggagggcgagtgcctggagttgctccgcagatacttggagaatgggaaggagacgctacagcgcgcagatcctccaaaggcacacgttgcccaccaccccatctctgaccatgaggccaccctgaggtgctgggccctgggcttctaccctgcggagatcacgctgacctggcagcgggatggggaggaacagacccaggacacagagcttgtggagaccaggcctgcaggggatggaaccttccagaagtgggccgctgtggtggtgccttctggagaggaacagagatacacatgccatgtgcagcacgaggggctgccccagcccctcatcctgagatgggagcagtctccccagcccaccatccccatcgtgggcatcgttgctggccttgttgtccttggagctgtggtcactggagctgtggtcgctgctgtgatgtggaggaagaagagctcagatagaaacagagggagctactctcaggctgcagtgtgagacagcttccttgtgtgggactgagaagcaagatatcaatgtagcagaattgcacttgtgcctcacgaacatacataaattttaaaaataaagaataaaaatatatctttttatagata

SEQ ID NO: 150818 - DNA, 495 bp, Homo sapiens
  Payload ID: 9764
  Gene Symbol: HLA-F
  Gene Name: major histocompatibility complex, class I, F
  ENST ID: ENST00000444621
  CDS Start-End: 1-374
ctgctgtgatgtggaggaagaagagctcaggacattttcttcccatagatagaaacagagggagctactctcaggctgcagcctactcagtggtcagcggaaacttgatgataacatggtggtcaagcttatttctcctgggggtgctcttccaaggatatttgggctgcctccggagtcacagtgtcttgggccgccggaaggtgggtgacatgtggatcttgttttttttgtggctgtggacatctttcaacactgccttcttggccttgcaaagccttcgctttggcttcggctttaggaggggcaggagcttccttcttcgttcttggcaccatcttatgaaaagggtccagattaagatttttgactgagtcattctaaagtaagttgcaagacccatgatactagaccactaaatacttcatcacacacctcctaagaataagaaccaacattatcacaccaaagaaaataaataattccataatatta

SEQ ID NO: 150819 - DNA, 884 bp, Homo sapiens; identical to SEQ ID NO: 150806
  Payload ID: 9764
  Gene Symbol: HLA-F
  Gene Name: major histocompatibility complex, class I, F
  Uniprot ID: P30511
  ENST ID: ENST00000420067
  CDS Start-End: 1-765

SEQ ID NO: 150820 - DNA, 1544 bp, Homo sapiens
  Payload ID: 9764
  Gene Symbol: HLA-F
  Gene Name: major histocompatibility complex, class I, F
  ENST ID: ENST00000422711
  CDS Start-End: 385-1425
gaagaagaagaagaagaggaagaggaagaggaagaagaagaagaagaagaagaagaagaagaagaagaagaagaagaagaagaagaagaagaagaagaagaagaagaagaagaagaagaggaagaagaagaaactgtctctagaccttcattctcaggacaagttcattgtctggcaccaagctccttggggtgaattttcttccaaaagagtccggggagtccaggtccttcatcctggatactcataacgcggccccatttctcactcccattgggcgtcgcgtttctagagaagccaatcagtgtcgccgcagttcccaggttctaaagtcccacgcaccccgcgggactcatatttttcccagacgcggaggttggggtcatggcgccccgaagcctcctcctgctgctctcaggggccctggccctgaccgatacttgggcgggctcccactccttgaggtatttcagcaccgctgtgtcgcggcccggccgcggggagccccgctacatcgccgtggagtacgtagacgacacgcaattcctgcggttcgacagcgacgccgcgattccgaggatggagccgcgggagccgtgggtggagcaagaggggccgcagtattgggagtggaccacagggtacgccaaggccaacgcacagactgaccgagtggccctgaggaacctgctccgccgctacaaccagagcgaggctgggtctcacaccctccagggaatgaatggctgcgacatggggcccgacggacgcctcctccgcgggtatcaccagcacgcgtacgacggcaaggattacatctccctgaacgaggacctgcgctcctggaccgcggcggacaccgtggctcagatcacccagcgcttctatgaggcagaggaatatgcagaggagttcaggacctacctggagggcgagtgcctggagttgctccgcagatacttggagaatgggaaggagacgctacagcgcgcagatcctccaaaggcacacgttgcccaccaccccatctctgaccatgaggccaccctgaggtgctgggccctgggcttctaccctgcggagatcacgctgacctggcagcgggatggggaggaacagacccaggacacagagcttgtggagaccaggcctgcaggggatggaaccttccagaagtgggccgctgtggtggtgccttctggagaggaacagagatacacatgccatgtgcagcacgaggggctgccccagcccctcatcctgagatgggagcagtctccccagcccaccatccccatcgtgggcatcgttgctggccttgttgtccttggagctgtggtcactggagctgtggtcgctgctgtgatgtggaggaagaagagctcagatagaaacagagggagctactctcaggctgcagtgtgagacagcttccttgtgtgggactgagaagcaagatatcaatgtagcagaattgcacttgtgcctcacgaacatacataaattttaaaaataaagaataaaaatatatctttttatagata

SEQ ID NO: 150821 - DNA, 578 bp, Homo sapiens; identical to SEQ ID NO: 150815
  Payload ID: 9764
  Gene Symbol: HLA-F
  Gene Name: major histocompatibility complex, class I, F
  ENST ID: ENST00000437020
  CDS Start-End: 186-578

SEQ ID NO: 150822 - DNA, 884 bp, Homo sapiens; identical to SEQ ID NO: 150806
  Payload ID: 9764
  Gene Symbol: HLA-F
  Gene Name: major histocompatibility complex, class I, F
  Uniprot ID: P30511
  ENST ID: ENST00000434407
  CDS Start-End: 1-765

SEQ ID NO: 150823 - DNA, 1506 bp, Homo sapiens
  Payload ID: 9764
  Gene Symbol: HLA-F
  Gene Name: major histocompatibility complex, class I, F
  ENST ID: ENST00000430472
  CDS Start-End: 57-1385
aaagtcccacgcaccccgcgggactcatatttttcccagacgcggaggttggggtcatggcgccccgaagcctcctcctgctgctctcaggggccctggccctgaccgatacttgggcaggctcccactccttgaggtatttcagcaccgctgtgtcgcggcccggccgcggggagccccgctacatcgccgtggagtacgtagacgacacgcaattcctgcggttcgacagcgacgccgcgattccgaggatggagccgcgggagccgtgggtggagcaagaggggccgcagtattgggagtggaccacagggtacgccaaggccaacgcacagactgaccgagtggccctgaggaacctgctccgccgctacaaccagagcgaggctgggtctcacaccctccagggaatgaatggctgcgacatggggcccgacggacgcctcctccgcgggtatcaccagcacgcgtacgacggcaaggattacatctccctgaacgaggacctgcgctcctggaccgcggcggacaccgtggctcagatcacccagcgcttctatgaggcagaggaatatgcagaggagttcaggacctacctggagggcgagtgcctggagttgctccgcagatacttggagaatgggaaggagacgctacagcgcgcagatcctccaaaggcacacgttgcccaccaccccatctctgaccatgaggccaccctgaggtgctgggccctgggcttctaccctgcggagatcacgctgacctggcagcgggatggggaggaacagacccaggacacagagcttgtggagaccaggcctgcaggggatggaaccttccagaagtgggccgctgtggtggtgccttctggagaggaacagagatacacatgccatgtgcagcacgaggggctgccccagcccctcatcctgagatgggagcagtctccccagcccaccatccccatcgtgggcatcgttgctggccttgttgtccttggagctgtggtcactggagctgtggtcgctgctgtgatgtggaggaagaagagctcagatagaaacagagggagctactctcaggctgcagcctactcagtggtcagcggactcttgatgataacatggtggtcaagcttatttctcctgggggtgctcttccaaggatatttgggctgcctccggagtcacagtgtcttgggccgccggaaggtgggtgacatgtggatcttgttttttttgtggctgtggacatctttcaacactgccttcttggccttgcaaagccttcgctttggcttcggctttaggaggggcaggagcttccttcttcgttcttggcaccatcttatgaaaagggtccagattaagatttttgactgagtcattctaaagtaagttgcaagacccatgatactagaccactaaatacttcatcacacacctcctaagaataagaaccaacattatcacaccaaagaaaataaataattccataatatta

SEQ ID NO: 150824 - DNA, 796 bp, Homo sapiens
  Payload ID: 9764
  Gene Symbol: HLA-F
  Gene Name: major histocompatibility complex, class I, F
  ENST ID: ENST00000433515
  CDS Start-End: 1-677
gcccagaccctccacccgggagagtcccaggcgcctttaccgagcacgcgtacgacggcaaggattacatctccctgaacgaggacctgcgctcctggaccgcggcggacaccgtggctcagatcacccagcgcttctatgaggcagaggaatatgcagaggagttcaggacctacctggagggcgagtgcctggagttgctccgcagatacttggagaatgggaaggagacgctacagcgcgcagatcctccaaaggcacacgttgcccaccaccccatctctgaccatgaggccaccctgaggtgctgggccctgggcttctaccctgcggagatcacgctgacctggcagcgggatggggaggaacagacccaggacacagagcttgtggagaccaggcctgcaggggatggaaccttccagaagtgggccgctgtggtggtgccttctggagaggaacagagatacacatgccatgtgcagcacgaggggctgccccagcccctcatcctgagatgggagcagtctccccagcccaccatccccatcgtgggcatcgttgctggccttgttgtccttggagctgtggtcactggagctgtggtcgctgctgtgatgtggaggaagaagagctcagatagaaacagagggagctactctcaggctgcagtgtgagacagcttccttgtgtgggactgagaagcaagatatcaatgtagcagaattgcacttgtgcctcacgaacatacataaattttaaaaataaagaataaaaatatatctttttatagata

SEQ ID NO: 150825 - DNA, 495 bp, Homo sapiens; identical to SEQ ID NO: 150818
  Payload ID: 9764
  Gene Symbol: HLA-F
  Gene Name: major histocompatibility complex, class I, F
  ENST ID: ENST00000458026
  CDS Start-End: 1-374

SEQ ID NO: 150826 - DNA, 495 bp, Homo sapiens
  Payload ID: 9764
  Gene Symbol: HLA-F
  Gene Name: major histocompatibility complex, class I, F
  ENST ID: ENST00000448064
  CDS Start-End: 1-374
ctgctgtgatgtggaggaagaagagctcaggacattttcttcccatagatagaaacagagggagctactctcaggctgcagcctactcagtggtcagcggactcttgatgataacatggtggtcaagcttatttctcctgggggtgctcttccaaggatatttgggctgcctccggagtcacagtgtcttgggccgccggaaggtgggtgacatgtggatcttgttttttttgtggctgtggacatctttcaacactgccttcttggccttgcaaagccttcgctttggcttcggctttaggaggggcaggagcttccttcttcgttcttggcaccatcttatgaaaagggtccagattaagatttttgactgagtcattctaaagtaagttgcaagacccatgatactagaccactaaatacttcatcacacacctcctaagaataagaaccaacattatcacaccaaagaaaataaataattccataatatta

SEQ ID NO: 150827 - DNA, 884 bp, Homo sapiens; identical to SEQ ID NO: 150806
  Payload ID: 9764
  Gene Symbol: HLA-F
  Gene Name: major histocompatibility complex, class I, F
  Uniprot ID: P30511
  ENST ID: ENST00000440590
  CDS Start-End: 1-765

SEQ ID NO: 150828 - DNA, 796 bp, Homo sapiens; identical to SEQ ID NO: 150824
  Payload ID: 9764
  Gene Symbol: HLA-F
  Gene Name: major histocompatibility complex, class I, F
  ENST ID: ENST00000420923
  CDS Start-End: 1-677

SEQ ID NO: 150829 - DNA, 30 bp, Homo sapiens
  Payload ID: 9764
  Gene Symbol: HLA-F
  Gene Name: major histocompatibility complex, class I, F
  ENST ID: ENST00000437226
  CDS Start-End: 1-30
ctgctgtgatgtggaggaagaagagctcag

SEQ ID NO: 150830 - DNA, 1504 bp, Homo sapiens
  Payload ID: 9764
  Gene Symbol: HLA-F
  Gene Name: major histocompatibility complex, class I, F
  ENST ID: ENST00000444891
  CDS Start-End: 345-1385
agaagaagaggaggggggcggggaggagcaggaggaggaggaaagaaggaggagaaggagaaggagaaggagaagaagaagaagaagaagaaactgtctctacaccttcattctcaggacaagttcattgtctggcaccaagctccttggggtgaattttcttccaaaagagtccggggagtccaggtccttcttcctggttactcataacgcggccccatttctcactcccattgggcgtcgggtttctagagaagccaatcagtgtcgccgcagttcccaggttctaaagtcccacgcaccccgcgggactcatatttttcccagacgcggaggttggggtcatggcgccccgaagcctcctcctgctgctctcaggggccctggccctgaccgatacttgggcaggctcccactccttgaggtatttcagcaccgctgtgtcgcggcccggccgcggggagccccgctacatcgccgtggagtacgtagacgacacgcaattcctgcggttcgacagcgacgccgcgattccgaggatggagccgcgggagccgtgggtggagcaagaggggccgcagtattgggagtggaccacagggtacgccaaggccaacgcacagactgaccgagtggccctgaggaacctgctccgccgctacaaccagagcgaggctgggtctcacaccctccagggaatgaatggctgcgacatggggcccgacggacgcctcctccgcgggtatcaccagcacgcgtacgacggcaaggattacatctccctgaacgaggacctgcgctcctggaccgcggcggacaccgtggctcagatcacccagcgcttctatgaggcagaggaatatgcagaggagttcaggacctacctggagggcgagtgcctggagttgctccgcagatacttggagaatgggaaggagacgctacagcgcgcagatcctccaaaggcacacgttgcccaccaccccatctctgaccatgaggccaccctgaggtgctgggccctgggcttctaccctgcggagatcacgctgacctggcagcgggatggggaggaacagacccaggacacagagcttgtggagaccaggcctgcaggggatggaaccttccagaagtgggccgctgtggtggtgccttctggagaggaacagagatacacatgccatgtgcagcacgaggggctgccccagcccctcatcctgagatgggagcagtctccccagcccaccatccccatcgtgggcatcgttgctggccttgttgtccttggagctgtggtcactggagctgtggtcgctgctgtgatgtggaggaagaagagctcagatagaaacagagggagctactctcaggctgcagtgtgagacagcttccttgtgtgggactgagaagcaagatatcaatgtagcagaattgcacttgtgcctcacgaacatacataaattttaaaaataaagaataaaaatatatctttttatagata

SEQ ID NO: 150831 - DNA, 495 bp, Homo sapiens; identical to SEQ ID NO: 150818
  Payload ID: 9764
  Gene Symbol: HLA-F
  Gene Name: major histocompatibility complex, class I, F
  ENST ID: ENST00000426470
  CDS Start-End: 1-374

SEQ ID NO: 150832 - DNA, 578 bp, Homo sapiens; identical to SEQ ID NO: 150815
  Payload ID: 9764
  Gene Symbol: HLA-F
  Gene Name: major histocompatibility complex, class I, F
  ENST ID: ENST00000418017
  CDS Start-End: 186-578

SEQ ID NO: 150833 - DNA, 727 bp, Homo sapiens
  Payload ID: 9764
  Gene Symbol: HLA-F
  Gene Name: major histocompatibility complex, class I, F
  ENST ID: ENST00000441200
  CDS Start-End: 1-727
atggcgccccgaagcctcctcctgctgctctcaggggccctggccctgaccgatacttgggcgggctcccactccttgaggtatttcagcaccgctgtgtcgcggcccggccgcggggagccccgctacatcgccgtggagtacgtagacgacacgcaattcctgcggttcgacagcgacgccgcgattccgaggatggagccgcgggagccgtgggtggagcaagaggggccgcagtattgggagtggaccacagggtacgccaaggccaacgcacagactgaccgagtggccctgaggaacctgctccgccgctacaaccagagcgaggctgggtctcacaccctccagggaatgaatggctgcgacatggggcccgacggacgcctcctccgcgggtatcaccagcacgcgtacgacggcaaggattacatctccctgaacgaggacctgcgctcctggaccgcggcggacaccgtggctcagatcacccagcgcttctatgaggcagaggaatatgcagaggagttcaggacctacctggagggcgagtgcctggagttgctccgcagatacttggagaatgggaaggagacgctacagcgcgcagagcagtctccccagcccaccatccccatcgtgggcatcgttgctggccttgttgtccttggagctgtggtcactggagctgtggtcgctgctgtgatgtggaggaagaagagctcag

SEQ ID NO: 150834 - DNA, 578 bp, Homo sapiens
  Payload ID: 9764
  Gene Symbol: HLA-F
  Gene Name: major histocompatibility complex, class I, F
  ENST ID: ENST00000420414
  CDS Start-End: 186-578
ttctctttctctcccaacccgtgtcaggtccttcttcctggatactcataacgcggccccatttctcactcccattgggcgtcgcgtttctagagaagccaatcagtgtcgccgcagttcccaggttctaaagtcccacgcaccccgcgggactcatatttttcccagacgcggaggttggggtcatggcgccccgaagcctcctcctgctgctctcaggggccctggccctgaccgatacttgggcgggctcccactccttgaggtatttcagcaccgctgtgtcgcggcccggccgcggggagccccgctacatcgccgtggagtacgtagacgacacgcaattcctgcggttcgacagcgacgccgcgattccgaggatggagccgcgggagccgtgggtggagcaagaggggccgcagtattgggagtggaccacagggtacgccaaggccaacgcacagactgaccgagtggccctgaggaacctgctccgccgctacaaccagagcgaggctgggtctcacaccctccagggaatgaatggctgcgacatggggcccgacggacgcctcctc

SEQ ID NO: 150835 - DNA, 1544 bp, Homo sapiens; identical to SEQ ID NO: 150812
  Payload ID: 9764
  Gene Symbol: HLA-F
  Gene Name: major histocompatibility complex, class I, F
  ENST ID: ENST00000435058
  CDS Start-End: 385-1425

SEQ ID NO: 150836 - DNA, 578 bp, Homo sapiens; identical to SEQ ID NO: 150815
  Payload ID: 9764
  Gene Symbol: HLA-F
  Gene Name: major histocompatibility complex, class I, F
  ENST ID: ENST00000414958
  CDS Start-End: 186-578

SEQ ID NO: 150837 - DNA, 495 bp, Homo sapiens; identical to SEQ ID NO: 150818
  Payload ID: 9764
  Gene Symbol: HLA-F
  Gene Name: major histocompatibility complex, class I, F
  ENST ID: ENST00000425139
  CDS Start-End: 1-374

SEQ ID NO: 150838 - DNA, 1408 bp, Homo sapiens
  Payload ID: 9764
  Gene Symbol: HLA-F
  Gene Name: major histocompatibility complex, class I, F
  ENST ID: ENST00000422439
  CDS Start-End: 406-1408
gaagaagaagaagaagaagaagaagaagaagaggaagaggaagaggaagaggaagaagaagaagaagaagaagaagaagaagaagaagaagaagaagaagaagaagaagaagaagaagaagaagaagaagaggaagaagaggaagaagaagaaactgtctctagaccttcattctcaggacaagttcattgtctggcaccaagctccttggggtgaattttcttccaaaagagtccggggagtccaggtccttcatcctggatactcataacgcggccccatttctcactcccattgggcgtcgcgtttctagagaagccaatcagtgtcgccgcagttcccaggttctaaagtcccacgcaccccgcgggactcatatttttcccagacgcggaggttggggtcatggcgccccgaagcctcctcctgctgctctcaggggccctggccctgaccgatacttgggcgggctcccactccttgaggtatttcagcaccgctgtgtcgcggcccggccgcggggagccccgctacatcgccgtggagtacgtagacgacacgcaattcctgcggttcgacagcgacgccgcgattccgaggatggagccgcgggagccgtgggtggagcaagaggggccgcagtattgggagtggaccacagggtacgccaaggccaacgcacagactgaccgagtggccctgaggaacctgctccgccgctacaaccagagcgaggctgggtctcacaccctccagggaatgaatggctgcgacatggggcccgacggacgcctcctccgcgggtatcaccagcacgcgtacgacggcaaggattacatctccctgaacgaggacctgcgctcctggaccgcggcggacaccgtggctcagatcacccagcgcttctatgaggcagaggaatatgcagaggagttcaggacctacctggagggcgagtgcctggagttgctccgcagatacttggagaatgggaaggagacgctacagcgcgcagatcctccaaaggcacacgttgcccaccaccccatctctgaccatgaggccaccctgaggtgctgggccctgggcttctaccctgcggagatcacgctgacctggcagcgggatggggaggaacagacccaggacacagagcttgtggagaccaggcctgcaggggatggaaccttccagaagtgggccgctgtggtggtgccttctggagaggaacagagatacacatgccatgtgcagcacgaggggctgccccagcccctcatcctgagatgggagcagtctccccagcccaccatccccatcgtgggcatcgttgctggccttgttgtccttggagctgtggtcactggagctgtggtcgctgctgtgatgtggaggaagaagagctcag

SEQ ID NO: 150839 - DNA, 796 bp, Homo sapiens; identical to SEQ ID NO: 150817
  Payload ID: 9764
  Gene Symbol: HLA-F
  Gene Name: major histocompatibility complex, class I, F
  ENST ID: ENST00000454646
  CDS Start-End: 1-677

SEQ ID NO: 150840 - DNA, 1506 bp, Homo sapiens; identical to SEQ ID NO: 150811
  Payload ID: 9764
  Gene Symbol: HLA-F
  Gene Name: major histocompatibility complex, class I, F
  ENST ID: ENST00000445657
  CDS Start-End: 57-1385

SEQ ID NO: 150841 - DNA, 495 bp, Homo sapiens; identical to SEQ ID NO: 150818
  Payload ID: 9764
  Gene Symbol: HLA-F
  Gene Name: major histocompatibility complex, class I, F
  ENST ID: ENST00000452916
  CDS Start-End: 1-374

SEQ ID NO: 150842 - DNA, 796 bp, Homo sapiens; identical to SEQ ID NO: 150824
  Payload ID: 9764
  Gene Symbol: HLA-F
  Gene Name: major histocompatibility complex, class I, F
  ENST ID: ENST00000426675
  CDS Start-End: 1-677

SEQ ID NO: 150843 - DNA, 639 bp, Homo sapiens
  Payload ID: 9764
  Gene Symbol: HLA-F
  Gene Name: major histocompatibility complex, class I, F
  ENST ID: ENST00000420024
  CDS Start-End: 1-639
gcccagaccctccacccgggagagtcccaggcgcctttaccgagcacgcgtacgacggcaaggattacatctccctgaacgaggacctgcgctcctggaccgcggcggacaccgtggctcagatcacccagcgcttctatgaggcagaggaatatgcagaggagttcaggacctacctggagggcgagtgcctggagttgctccgcagatacttggagaatgggaaggagacgctacagcgcgcagatcctccaaaggcacacgttgcccaccaccccatctctgaccatgaggccaccctgaggtgctgggccctgggcttctaccctgcggagatcacgctgacctggcagcgggatggggaggaacagacccaggacacagagcttgtggagaccaggcctgcaggggatggaaccttccagaagtgggccgctgtggtggtgccttctggagaggaacagagatacacatgccatgtgcagcacgaggggctgccccagcccctcatcctgagatgggagcagtctccccagcccaccatccccatcgtgggcatcgttgctggccttgttgtccttggagctgtggtcactggagctgtggtcgctgctgtgatgtggaggaagaagagctcag

SEQ ID NO: 150844 - DNA, 1283 bp, Homo sapiens
  Payload ID: 9764
  Gene Symbol: HLA-F
  Gene Name: major histocompatibility complex, class I, F
  ENST ID: ENST00000552082
  CDS Start-End: 125-1165
tttctcactcccattgggcgtcgcgtttctagagaagccaatcagtgtcgccgcagttcccaggttctaaagtcccacgcaccccgcgggactcatatttttcccagacgcggaggttggggtcatggcgccccgaagcctcctcctgctgctctcaggggccctggccctgaccgatacttgggcgggctcccactccttgaggtatttcagcaccgctgtgtcgcggcccggccgcggggagccccgctacatcgccgtggagtacgtagacgacacgcaattcctgcggttcgacagcgacgccgcgattccgaggatggagccgcgggagccgtgggtggagcaagaggggccgcagtattgggagtggaccacagggtacgccaaggccaacgcacagactgaccgagtggccctgaggaacctgctccgccgctacaaccagagcgaggctgggtctcacaccctccagggaatgaatggctgcgacatggggcccgacggacgcctcctccgcgggtatcaccagcacgcgtacgacggcaaggattacatctccctgaacgaggacctgcgctcctggaccgcggcggacaccgtggctcagatcacccagcgcttctatgaggcagaggaatatgcagaggagttcaggacctacctggagggcgagtgcctggagttgctccgcagatacttggagaatgggaaggagacgctacagcgcgcagatcctccaaaggcacacgttgcccaccaccccatctctgaccatgaggccaccctgaggtgctgggccctgggcttctaccctgcggagatcacgctgacctggcagcgggatggggaggaacagacccaggacacagagcttgtggagaccaggcctgcaggggatggaaccttccagaagtgggccgctgtggtggtgccttctggagaggaacagagatacacatgccatgtgcagcacgaggggctgccccagcccctcatcctgagatgggagcagtctccccagcccaccatccccatcgtgggcatcgttgctggccttgttgtccttggagctgtggtcactggagctgtggtcgctgctgtgatgtggaggaagaagagctcagatagaaacagagggagctactctcaggctgcagtgtgagacagcttccttgtgtgggactgagaagcaagatatcaatgtagcagaattgcacttgtgcctcacgaacatacataaattttaaaaataaagaataaaaatatatctttttatagat

SEQ ID NO: 150845 - DNA, 1283 bp, Homo sapiens; identical to SEQ ID NO: 150844
  Payload ID: 9764
  Gene Symbol: HLA-F
  Gene Name: major histocompatibility complex, class I, F
  ENST ID: ENST00000551780
  CDS Start-End: 125-1165

SEQ ID NO: 150846 - DNA, 1283 bp, Homo sapiens; identical to SEQ ID NO: 150844
  Payload ID: 9764
  Gene Symbol: HLA-F
  Gene Name: major histocompatibility complex, class I, F
  ENST ID: ENST00000551832
  CDS Start-End: 125-1165

SEQ ID NO: 150847 - DNA, 1283 bp, Homo sapiens
  Payload ID: 9764
  Gene Symbol: HLA-F
  Gene Name: major histocompatibility complex, class I, F
  ENST ID: ENST00000549422
  CDS Start-End: 125-1165
tttctcactcccattgggcgtcgggtttctagagaagccaatcagtgtcgccgcagttcccaggttctaaagtcccacgcaccccgcgggactcatatttttcccagacgcggaggttggggtcatggcgccccgaagcctcctcctgctgctctcaggggccctggccctgaccgatacttgggcaggctcccactccttgaggtatttcagcaccgctgtgtcgcggcccggccgcggggagccccgctacatcgccgtggagtacgtagacgacacgcaattcctgcggttcgacagcgacgccgcgattccgaggatggagccgcgggagccgtgggtggagcaagaggggccgcagtattgggagtggaccacagggtacgccaaggccaacgcacagactgaccgagtggccctgaggaacctgctccgccgctacaaccagagcgaggctgggtctcacaccctccagggaatgaatggctgcgacatggggcccgacggacgcctcctccgcgggtatcaccagcacgcgtacgacggcaaggattacatctccctgaacgaggacctgcgctcctggaccgcggcggacaccgtggctcagatcacccagcgcttctatgaggcagaggaatatgcagaggagttcaggacctacctggagggcgagtgcctggagttgctccgcagatacttggagaatgggaaggagacgctacagcgcgcagatcctccaaaggcacacgttgcccaccaccccatctctgaccatgaggccaccctgaggtgctgggccctgggcttctaccctgcggagatcacgctgacctggcagcgggatggggaggaacagacccaggacacagagcttgtggagaccaggcctgcaggggatggaaccttccagaagtgggccgctgtggtggtgccttctggagaggaacagagatacacatgccatgtgcagcacgaggggctgccccagcccctcatcctgagatgggagcagtctccccagcccaccatccccatcgtgggcatcgttgctggccttgttgtccttggagctgtggtcactggagctgtggtcgctgctgtgatgtggaggaagaagagctcagatagaaacagagggagctactctcaggctgcagtgtgagacagcttccttgtgtgggactgagaagcaagatatcaatgtagcagaattgcacttgtgcctcacgaacatacataaattttaaaaataaagaataaaaatatatctttttatagat

SEQ ID NO: 150848 - DNA, 1283 bp, Homo sapiens; identical to SEQ ID NO: 150844
  Payload ID: 9764
  Gene Symbol: HLA-F
  Gene Name: major histocompatibility complex, class I, F
  ENST ID: ENST00000550932
  CDS Start-End: 125-1165

SEQ ID NO: 150849 - DNA, 1017 bp, Homo sapiens
  Payload ID: 9764
  Gene Symbol: HLA-F
  Gene Name: major histocompatibility complex, class I, F
  ENST ID: ENST00000617604
  CDS Start-End: 1-1017
ggctcccactccttgaggtatttcagcaccgctgtgtcgcggcccggccgcggggagccccgctacatcgccgtggagtacgtagacgacacgcaattcctgcggttcgacagcgacgccgcgattccgaggatggagccgcgggagccgtgggtggagcaagaggggccgcagtattgggagtggaccacagggtacgccaaggccaacgcacagactgaccgagtggccctgaggaacctgctccgccgctacaaccagagcgaggctgggtctcacaccctccagggaatgaatggctgcgacatggggcccgacggacgcctcctccgcgggtatcaccagcacgcgtacgacggcaaggattacatctccctgaacgaggacctgcgctcctggaccgcggcggacaccgtggctcagatcacccagcgcttctatgaggcagaggaatatgcagaggagttcaggacctacctggagggcgagtgcctggagttgctccgcagatacttggagaatgggaaggagacgctacagcgcgcagatcctccaaaggcacacgttgcccaccaccccatctctgaccatgaggccaccctgaggtgctgggccctgggcttctaccctgcggagatcacgctgacctggcagcgggatggggaggaacagacccaggacacagagcttgtggagaccaggcctgcaggggatggaaccttccagaagtgggccgctgtggtggtgccttctggagaggaacagagatacacatgccatgtgcagcacgaggggctgccccagcccctcatcctgagatgggagcagtctccccagcccaccatccccatcgtgggcatcgttgctggccttgttgtccttggagttgctgtaatcactgtagctgtggtcgctgctgtgatgtggaggaataagatcccaggtaggaaaggggtgagctctgagtttccttcttccaggaacagtacccagggctctgatgtgtctctcaaggct

SEQ ID NO: 150850 - DNA, 762 bp, Homo sapiens
  Payload ID: 9764
  Gene Symbol: HLA-F
  Gene Name: major histocompatibility complex, class I, F
  ENST ID: ENST00000613731
  CDS Start-End: 1-762
atggcgccccgaagcctcctcctgctgctctcaggggccctggccctgaccgatacttgggcgggctcccactccttgaggtatttcagcaccgctgtgtcgcggcccggccgcggggagccccgctacatcgccgtggagtacgtagacgacacgcaattcctgcggttcgacagcgacgccgcgattccgaggatggagccgcgggagccgtgggtggagcaagaggggccgcagtattgggagtggaccacagggtacgccaaggccaacgcacagactgaccgagtggccctgaggaacctgctccgccgctacaaccagagcgaggctgggtctcacaccctccagggaatgaatggctgcgacatggggcccgacggacgcctcctccgcgggtatcaccagcacgcgtacgacggcaaggattacatctccctgaacgaggacctgcgctcctggaccgcggcggacaccgtggctcagatcacccagcgcttctatgaggcagaggaatatgcagaggagttcaggacctacctggagggcgagtgcctggagttgctccgcagatacttggagaatgggaaggagacgctacagcgcgcagagcagtctccccagcccaccatccccatcgtgggcatcgttgctggccttgttgtccttggagctgtggtcactggagctgtggtcgctgctgtgatgtggaggaagaagagctcaggtaggaagggcagtcacaaatcacaggggaaggtc

SEQ ID NO: 150851 - DNA, 1038 bp, Homo sapiens
  Payload ID: 9764
  Gene Symbol: HLA-F
  Gene Name: major histocompatibility complex, class I, F
  ENST ID: ENST00000622145
  CDS Start-End: 1-1038
atggcgccccgaagcctcctcctgctgctctcaggggccctggccctgaccgatacttgggcgggctcccactccttgaggtatttcagcaccgctgtgtcgcggcccggccgcggggagccccgctacatcgccgtggagtacgtagacgacacgcaattcctgcggttcgacagcgacgccgcgattccgaggatggagccgcgggagccgtgggtggagcaagaggggccgcagtattgggagtggaccacagggtacgccaaggccaacgcacagactgaccgagtggccctgaggaacctgctccgccgctacaaccagagcgaggctgggtctcacaccctccagggaatgaatggctgcgacatggggcccgacggacgcctcctccgcgggtatcaccagcacgcgtacgacggcaaggattacatctccctgaacgaggacctgcgctcctggaccgcggcggacaccgtggctcagatcacccagcgcttctatgaggcagaggaatatgcagaggagttcaggacctacctggagggcgagtgcctggagttgctccgcagatacttggagaatgggaaggagacgctacagcgcgcagatcctccaaaggcacacgttgcccaccaccccatctctgaccatgaggccaccctgaggtgctgggccctgggcttctaccctgcggagatcacgctgacctggcagcgggatggggaggaacagacccaggacacagagcttgtggagaccaggcctgcaggggatggaaccttccagaagtgggccgctgtggtggtgccttctggagaggaacagagatacacatgccatgtgcagcacgaggggctgccccagcccctcatcctgagatgggagcagtctccccagcccaccatccccatcgtgggcatcgttgctggccttgttgtccttggagctgtggtcactggagctgtggtcgctgctgtgatgtggaggaagaagagctcaggtaggaagggcagtcacaaatcacaggggaaggtc

SEQ ID NO: 150852 - DNA, 1505 bp, Homo sapiens
  Payload ID: 9764
  Gene Symbol: HLA-F
  Gene Name: major histocompatibility complex, class I, F
  ENST ID: ENST00000475996
  CDS Start-End: 1-217
tccccagcccaccatccccatcgtgggcatcgttgctggccttgttgtccttggagctgtggtcactggagctgtggtcgctgctgtgatgtggaggaagaagagctcaggcccagctcctgagtgtctctacctctcaaacaagtattctcatccaggagcaattttcccaccagaggacattagctatgtctggaaaaatgttttgttgccatgactggagtgaggaggaggtgctaccagcatcttgtggggaatgaccagggatgctgaacatcctgcagtgcacaagtcagcccaatcacccacataacagataattatccagccccaataccaagattgccaagggtaaggaggcctgccaggactttctctcccttgagtacaagcttccttgaactgagggacaccctgaaggaaaagtgtggtcccaccccagtcatctctcccttccctggagctccatctgtatgcctgtagtgcttaggcctgtaacctggggtccaggaacccaccttcccatgagactgcatgcagaagtgatgatatgtgcacacatgacttcattacagggcattggatgttgatattcatcaggtcagctggggcccaagacactactcttctgccaacaggccgcaatcctctgcattagagagagggtaaagattgagggaggccctaacttcaaaccttctatcactgctagtgaagtgccaaaaagaagtgcaaggtcatctgcccttgtaggaaccacacaggaaggcagagtgtccaccaatgtcaaattccatcaaagaaataatattttgacaaaaaatgcaagtcacctttctaagtcccagacagcagctcaaaataaaaagcattaaacccctcaaatcttagaccaggtgaaattattgaagctgcagtaaggtcttgtgggacctgcagttagagagaagggacaactcaatttgggactgcagcagaaacccctacatcatggggttcctggaagggaccctctcccttcagcgacgcattgtgaggccatttctaggtaaaaaggtagaatttccttggattcctgaggtttattttacacttactgcttattctttgactttatagaagccaacttcagtttgaacatcttgcaattaattttttttggctctaagtggagaatttgaacttgtttctgaagaaaaccaggggctccttatgtgagcaagcaaccctccctgtggcccccttatgcaataaacataagccattgtgagccagcaaaatttaaagcaaggaaagcagtaaaccctccatttcagcatgtttcagcctgtctagtgatgttctagtcttgcctcactcttaacattttaaaatttataattttatttgattttgatttaataagaattcatatgtattcatttcttttgggtttgtcaccaaaagcctcctccaatcacctgtggagtaaagacaagtaaataaatgcatggtgttcccattta

SEQ ID NO: 150853 - DNA, 623 bp, Homo sapiens
  Payload ID: 9764
  Gene Symbol: HLA-F
  Gene Name: major histocompatibility complex, class I, F
  ENST ID: ENST00000465459
  CDS Start-End: 1-432
caccaccccatctctgaccatgaggccaccctgaggtgctgggccctgggcttctaccctgcggagatcacgctgacctggcagcgggatggggaggaacagacccaggacacagagcttgtggagaccaggcctgcaggggatggaaccttccagaagtgggccgctgtggtggtgcctcctggagaggaacagagatacacatgccatgtgcagcacgaggggctgccccagcccctcatcctgagatgggagcagtctccccagcccaccatccccatcgtgggcatcgttgctggccttgttgtccttggagctgtggtcactggagctgtggtcgctgctgtgatgtggaggaagaagagctcagatagaaacagagggagctactctcaggctgcaggaaagttgactcatactggtgtccagtgaagaaacccaggcgcataagagggacagttggatctcagggaggactgtcttcttctcacctccccggacgatgcttcttgacacaggaaagaggatgtgctgctagggtcatcatgtcctggtttattgtgttgtcagtagaatgaaatcaaaatacatacttcataaataataaaataacccataataag

SEQ ID NO: 150854 - DNA, 1427 bp, Homo sapiens
  Payload ID: 9765
  Gene Symbol: HLA-G
  Gene Name: major histocompatibility complex, class I, G
  Uniprot ID: P17693
  ENST ID: ENST00000360323
  CDS Start-End: 25-1041
actcattctccccagacgccaaggatggtggtcatggcgccccgaaccctcttcctgctgctctcgggggccctgaccctgaccgagacctgggcgggctcccactccatgaggtatttcagcgccgccgtgtcccggcccggccgcggggagccccgcttcatcgccatgggctacgtggacgacacgcagttcgtgcggttcgacagcgactcggcgtgtccgaggatggagccgcgggcgccgtgggtggagcaggaggggccggagtattgggaagaggagacacggaacaccaaggcccacgcacagactgacagaatgaacctgcagaccctgcgcggctactacaaccagagcgaggccagttctcacaccctccagtggatgattggctgcgacctggggtccgacggacgcctcctccgcgggtatgaacagtatgcctacgatggcaaggattacctcgccctgaacgaggacctgcgctcctggaccgcagcggacactgcggctcagatctccaagcgcaagtgtgaggcggccaatgtggctgaacaaaggagagcctacctggagggcacgtgcgtggagtggctccacagatacctggagaacgggaaggagatgctgcagcgcgcggacccccccaagacacacgtgacccaccaccctgtctttgactatgaggccaccctgaggtgctgggccctgggcttctaccctgcggagatcatactgacctggcagcgggatggggaggaccagacccaggacgtggagctcgtggagaccaggcctgcaggggatggaaccttccagaagtgggcagctgtggtggtgccttctggagaggagcagagatacacgtgccatgtgcagcatgaggggctgccggagcccctcatgctgagatggaagcagtcttccctgcccaccatccccatcatgggtatcgttgctggcctggttgtccttgcagctgtagtcactggagctgcggtcgctgctgtgctgtggagaaagaagagctcagattgaaaaggagggagctactctcaggctgcaatgtgaaacagctgccctgtgtgggactgagtggcaagtccctttgtgacttcaagaaccctgactcctctttgtgcagagaccagcccacccctgtgcccaccatgaccctcttcctcatgctgaactgcattccttccccaatcacctttcctgttccagaaaaggggctgggatgtctccgtctctgtctcaaatttgtggtccactgagctataacttacttctgtattaaaattagaatctgagtataaatttactttttcaaattatttccaagagagattgatgggttaattaaaggagaagattcctgaaatttgagagacaaaataaatggaagacatgagaactttcca

SEQ ID NO: 150855 - DNA, 851 bp, Homo sapiens
  Payload ID: 9765
  Gene Symbol: HLA-G
  Gene Name: major histocompatibility complex, class I, G
  ENST ID: ENST00000376815
  CDS Start-End: 1-465
atggtggtcatggcgccccgaaccctcttcctgctgctctcgggggccctgaccctgaccgagacctgggcgggctcccactccatgaggtatttcagcgccgccgtgtcccggcccggccgcggggagccccgcttcatcgccatgggctacgtggacgacacgcagttcgtgcggttcgacagcgactcggcgtgtccgaggatggagccgcgggcgccgtgggtggagcaggaggggccggagtattgggaagaggagacacggaacaccaaggcccacgcacagactgacagaatgaacctgcagaccctgcgcggctactacaaccagagcgaggccaagcagtcttccctgcccaccatccccatcatgggtatcgttgctggcctggttgtccttgcagctgtagtcactggagctgcggtcgctgctgtgctgtggagaaagaagagctcagattgaaaaggagggagctactctcaggctgcaatgtgaaacagctgccctgtgtgggactgagtggcaagtccctttgtgacttcaagaaccctgactcctctttgtgcagagaccagcccacccctgtgcccaccatgaccctcttcctcatgctgaactgcattccttccccaatcacctttcctgttccagaaaaggggctgggatgtctccgtctctgtctcaaatttgtggtccactgagctataacttacttctgtattaaaattagaatctgagtataaatttactttttcaaattatttccaagagagattgatgggttaattaaaggagaagattcctgaaatttgagagacaaaataaatggaagacatgagaactttcca

SEQ ID NO: 150856 - DNA, 1127 bp, Homo sapiens
  Payload ID: 9765
  Gene Symbol: HLA-G
  Gene Name: major histocompatibility complex, class I, G
  ENST ID: ENST00000376818
  CDS Start-End: 1-741
atggtggtcatggcgccccgaaccctcttcctgctgctctcgggggccctgaccctgaccgagacctgggcgggctcccactccatgaggtatttcagcgccgccgtgtcccggcccggccgcggggagccccgcttcatcgccatgggctacgtggacgacacgcagttcgtgcggttcgacagcgactcggcgtgtccgaggatggagccgcgggcgccgtgggtggagcaggaggggccggagtattgggaagaggagacacggaacaccaaggcccacgcacagactgacagaatgaacctgcagaccctgcgcggctactacaaccagagcgaggccaacccccccaagacacacgtgacccaccaccctgtctttgactatgaggccaccctgaggtgctgggccctgggcttctaccctgcggagatcatactgacctggcagcgggatggggaggaccagacccaggacgtggagctcgtggagaccaggcctgcaggggatggaaccttccagaagtgggcagctgtggtggtgccttctggagaggagcagagatacacgtgccatgtgcagcatgaggggctgccggagcccctcatgctgagatggaagcagtcttccctgcccaccatccccatcatgggtatcgttgctggcctggttgtccttgcagctgtagtcactggagctgcggtcgctgctgtgctgtggagaaagaagagctcagattgaaaaggagggagctactctcaggctgcaatgtgaaacagctgccctgtgtgggactgagtggcaagtccctttgtgacttcaagaaccctgactcctctttgtgcagagaccagcccacccctgtgcccaccatgaccctcttcctcatgctgaactgcattccttccccaatcacctttcctgttccagaaaaggggctgggatgtctccgtctctgtctcaaatttgtggtccactgagctataacttacttctgtattaaaattagaatctgagtataaatttactttttcaaattatttccaagagagattgatgggttaattaaaggagaagattcctgaaatttgagagacaaaataaatggaagacatgagaactttcca

SEQ ID NO: 150857 - DNA, 1490 bp, Homo sapiens
  Payload ID: 9765
  Gene Symbol: HLA-G
  Gene Name: major histocompatibility complex, class I, G
  ENST ID: ENST00000376828
  CDS Start-End: 73-1104
atatagtaacatagtgtggtactttgtcttgaggagatgtcctggactcacacggaaacttagggctacggaatgaagacgccaaggatggtggtcatggcgccccgaaccctcttcctgctgctctcgggggccctgaccctgaccgagacctgggcgggctcccactccatgaggtatttcagcgccgccgtgtcccggcccggccgcggggagccccgcttcatcgccatgggctacgtggacgacacgcagttcgtgcggttcgacagcgactcggcgtgtccgaggatggagccgcgggcgccgtgggtggagcaggaggggccggagtattgggaagaggagacacggaacaccaaggcccacgcacagactgacagaatgaacctgcagaccctgcgcggctactacaaccagagcgaggccagttctcacaccctccagtggatgattggctgcgacctggggtccgacggacgcctcctccgcgggtatgaacagtatgcctacgatggcaaggattacctcgccctgaacgaggacctgcgctcctggaccgcagcggacactgcggctcagatctccaagcgcaagtgtgaggcggccaatgtggctgaacaaaggagagcctacctggagggcacgtgcgtggagtggctccacagatacctggagaacgggaaggagatgctgcagcgcgcggacccccccaagacacacgtgacccaccaccctgtctttgactatgaggccaccctgaggtgctgggccctgggcttctaccctgcggagatcatactgacctggcagcgggatggggaggaccagacccaggacgtggagctcgtggagaccaggcctgcaggggatggaaccttccagaagtgggcagctgtggtggtgccttctggagaggagcagagatacacgtgccatgtgcagcatgaggggctgccggagcccctcatgctgagatggaagcagtcttccctgcccaccatccccatcatgggtatcgttgctggcctggttgtccttgcagctgtagtcactggagctgcggtcgctgctgtgctgtggagaaagaagagctcagattgaaaaggagggagctactctcaggctgcaatgtgaaacagctgccctgtgtgggactgagtggcaagtccctttgtgacttcaagaaccctgactcctctttgtgcagagaccagcccacccctgtgcccaccatgaccctcttcctcatgctgaactgcattccttccccaatcacctttcctgttccagaaaaggggctgggatgtctccgtctctgtctcaaatttgtggtccactgagctataacttacttctgtattaaaattagaatctgagtataaatttactttttcaaattatttccaagagagattgatgggttaattaaaggagaagattcctgaaatttgagagacaaaataaatggaagacatgagaactttcca

SEQ ID NO: 150858 - DNA, 1443 bp, Homo sapiens
  Payload ID: 9765
  Gene Symbol: HLA-G
  Gene Name: major histocompatibility complex, class I, G
  Uniprot ID: P17693
  ENST ID: ENST00000383621
  CDS Start-End: 25-1041
actcattctccccagacgccaaggatggtggtcatggcaccccgaaccctcttcctgctactctcgggggccctgaccctgaccgagacctgggcgggctcccactccatgaggtatttcagcgccgccgtgtcccggcccggccgcggggagccccgcttcatcgccatgggctacgtggacgacacgcagttcgtgcggttcgacagcgactcggcgtgtccgaggatggagccgcgggcgccgtgggtggagcaggaggggccagagtattgggaagaggagacacggaacaccaaggcccacgcacagactgacagaatgaacctgcagaccctgcgcggctactacaaccagagcgaggccagttctcataccctccagtggatgattggctgcgacctggggtccgacggacgcctcctccgcgggtatgaacagtatgcctacgatggcaaggattacctcgccctgaacgaggacctgcgctcctggaccgcagcggacactgcggctcagatctccaagcgcaagtgtgaggcggccaatgtggctgaacaaaggagagcctacctggagggcacgtgcgtggagtggctccacagatacctggagaacgggaaggagatgctgcagcgcgcggacccccccaagacacacgtgacccaccaccctgtctttgactatgaggccaccctgaggtgctgggccctgggcttctaccctgcggagatcatactgacctggcagcgggatggggaggaccagacccaggacgtggagctcgtggagaccaggcctgcaggggatggaaccttccagaagtgggcagctgtggtggtgccttctggagaggagcagagatacacgtgccatgtgcagcatgaggggctgccggagcccctcatgctgagatggaagcagtcttccctgcccaccatccccatcatgggtatcgttgctggtctggttgtccttgcagctgtagtcactggagctgcggtcgctgctgtgctgtggaggaagaagagctcagattgaaaaggagggagctactctcaggctgcaatgtgaaacagctgccctgtgtgggactgagtggcaagatttgttcatgccttccctttgtgacttcaagaaccctgacttctctttctgcagagaccagcccacccctgtgcccaccatgaccctcttcctcatgctgaactgcattccttccccaatcacctttcctgttccagaaaaggggctgggatgtctccgtctctgtctcaaatttgtggtgcactgagctataacttacttctgtattaaaattagaatctgagtataaatttagtttttcaaattatttccaagagagattgatgggttaattaaaggagaagattcctgaaatttgagagacaaaataaatggaagacatgagaactttccaca

SEQ ID NO: 150859 - DNA, 867 bp, Homo sapiens
  Payload ID: 9765
  Gene Symbol: HLA-G
  Gene Name: major histocompatibility complex, class I, G
  ENST ID: ENST00000383622
  CDS Start-End: 1-465
atggtggtcatggcaccccgaaccctcttcctgctactctcgggggccctgaccctgaccgagacctgggcgggctcccactccatgaggtatttcagcgccgccgtgtcccggcccggccgcggggagccccgcttcatcgccatgggctacgtggacgacacgcagttcgtgcggttcgacagcgactcggcgtgtccgaggatggagccgcgggcgccgtgggtggagcaggaggggccagagtattgggaagaggagacacggaacaccaaggcccacgcacagactgacagaatgaacctgcagaccctgcgcggctactacaaccagagcgaggccaagcagtcttccctgcccaccatccccatcatgggtatcgttgctggtctggttgtccttgcagctgtagtcactggagctgcggtcgctgctgtgctgtggaggaagaagagctcagattgaaaaggagggagctactctcaggctgcaatgtgaaacagctgccctgtgtgggactgagtggcaagatttgttcatgccttccctttgtgacttcaagaaccctgacttctctttctgcagagaccagcccacccctgtgcccaccatgaccctcttcctcatgctgaactgcattccttccccaatcacctttcctgttccagaaaaggggctgggatgtctccgtctctgtctcaaatttgtggtgcactgagctataacttacttctgtattaaaattagaatctgagtataaatttagtttttcaaattatttccaagagagattgatgggttaattaaaggagaagattcctgaaatttgagagacaaaataaatggaagacatgagaactttccaca

SEQ ID NO: 150860 - DNA, 1143 bp, Homo sapiens
  Payload ID: 9765
  Gene Symbol: HLA-G
  Gene Name: major histocompatibility complex, class I, G
  ENST ID: ENST00000383623
  CDS Start-End: 1-741
atggtggtcatggcaccccgaaccctcttcctgctactctcgggggccctgaccctgaccgagacctgggcgggctcccactccatgaggtatttcagcgccgccgtgtcccggcccggccgcggggagccccgcttcatcgccatgggctacgtggacgacacgcagttcgtgcggttcgacagcgactcggcgtgtccgaggatggagccgcgggcgccgtgggtggagcaggaggggccagagtattgggaagaggagacacggaacaccaaggcccacgcacagactgacagaatgaacctgcagaccctgcgcggctactacaaccagagcgaggccaacccccccaagacacacgtgacccaccaccctgtctttgactatgaggccaccctgaggtgctgggccctgggcttctaccctgcggagatcatactgacctggcagcgggatggggaggaccagacccaggacgtggagctcgtggagaccaggcctgcaggggatggaaccttccagaagtgggcagctgtggtggtgccttctggagaggagcagagatacacgtgccatgtgcagcatgaggggctgccggagcccctcatgctgagatggaagcagtcttccctgcccaccatccccatcatgggtatcgttgctggtctggttgtccttgcagctgtagtcactggagctgcggtcgctgctgtgctgtggaggaagaagagctcagattgaaaaggagggagctactctcaggctgcaatgtgaaacagctgccctgtgtgggactgagtggcaagatttgttcatgccttccctttgtgacttcaagaaccctgacttctctttctgcagagaccagcccacccctgtgcccaccatgaccctcttcctcatgctgaactgcattccttccccaatcacctttcctgttccagaaaaggggctgggatgtctccgtctctgtctcaaatttgtggtgcactgagctataacttacttctgtattaaaattagaatctgagtataaatttagtttttcaaattatttccaagagagattgatgggttaattaaaggagaagattcctgaaatttgagagacaaaataaatggaagacatgagaactttccaca

SEQ ID NO: 150861 - DNA, 1497 bp, Homo sapiens
  Payload ID: 9765
  Gene Symbol: HLA-G
  Gene Name: major histocompatibility complex, class I, G
  ENST ID: ENST00000400665
  CDS Start-End: 73-1104
atatagtaacatagtgtggtactttgtcttgaggagatgtcctggactcacacggaaacttagggctacggaatgaagacgccaaggatggtggtcatggcaccccgaaccctcttcctgctactctcgggggccctgaccctgaccgagacctgggcgggctcccactccatgaggtatttcagcgccgccgtgtcccggcccggccgcggggagccccgcttcatcgccatgggctacgtggacgacacgcagttcgtgcggttcgacagcgactcggcgtgtccgaggatggagccgcgggcgccgtgggtggagcaggaggggccagagtattgggaagaggagacacggaacaccaaggcccacgcacagactgacagaatgaacctgcagaccctgcgcggctactacaaccagagcgaggccagttctcataccctccagtggatgattggctgcgacctggggtccgacggacgcctcctccgcgggtatgaacagtatgcctacgatggcaaggattacctcgccctgaacgaggacctgcgctcctggaccgcagcggacactgcggctcagatctccaagcgcaagtgtgaggcggccaatgtggctgaacaaaggagagcctacctggagggcacgtgcgtggagtggctccacagatacctggagaacgggaaggagatgctgcagcgcgcggacccccccaagacacacgtgacccaccaccctgtctttgactatgaggccaccctgaggtgctgggccctgggcttctaccctgcggagatcatactgacctggcagcgggatggggaggaccagacccaggacgtggagctcgtggagaccaggcctgcaggggatggaaccttccagaagtgggcagctgtggtggtgccttctggagaggagcagagatacacgtgccatgtgcagcatgaggggctgccggagcccctcatgctgagatggaagcagtcttccctgcccaccatccccatcatgggtatcgttgctggtctggttgtccttgcagctgtagtcactggagctgcggtcgctgctgtgctgtggaggaagaagagctcagattgaaaaggagggagctactctcaggctgcaatgtgaaacagctgccctgtgtgggactgagtggcaagatttgttcatgccttccctttgtgacttcaagaaccctgacttctctttctgcagagaccagcccacccctgtgcccaccatgaccctcttcctcatgctgaactgcattccttccccaatcacctttcctgttccagaaaaggggctgggatgtctccgtctctgtctcaaatttgtggtgcactgagctataacttacttctgtattaaaattagaatctgagtataaatttagtttttcaaattatttccaagagagattgatgggttaattaaaggagaagattcctgaaatttgagagacaaaataaatggaagacatgagaa

SEQ ID NO: 150862 - DNA, 1506 bp, Homo sapiens
  Payload ID: 9765
  Gene Symbol: HLA-G
  Gene Name: major histocompatibility complex, class I, G
  ENST ID: ENST00000400682
  CDS Start-End: 73-1104
atatagtaacatagtgtggtactttgtcttgaggagatgtcctggactcacacggaaacttagggctacggaatgaagacgccaaggatggtggtcatggcaccccgaaccctcttcctgctactctcgggggccctgaccctgaccgagacctgggcgggctcccactccatgaggtatttcagcgccgccgtgtcccggcccggccgcggggagccccgcttcatcgccatgggctacgtggacgacacgcagttcgtgcggttcgacagcgactcggcgtgtccgaggatggagccgcgggcgccgtgggtggagcaggaggggccagagtattgggaagaggagacacggaacaccaaggcccacgcacagactgacagaatgaacctgcagaccctgcgcggctactacaaccagagcgaggccagttctcataccctccagtggatgattggctgcgacctggggtccgacggacgcctcctccgcgggtatgaacagtatgcctacgatggcaaggattacctcgccctgaacgaggacctgcgctcctggaccgcagcggacactgcggctcagatctccaagcgcaagtgtgaggcggccaatgtggctgaacaaaggagagcctacctggagggcacgtgcgtggagtggctccacagatacctggagaacgggaaggagatgctgcagcgcgcggacccccccaagacacacgtgacccaccaccctgtctttgactatgaggccaccctgaggtgctgggccctgggcttctaccctgcggagatcatactgacctggcagcgggatggggaggaccagacccaggacgtggagctcgtggagaccaggcctgcaggggatggaaccttccagaagtgggcagctgtggtggtgccttctggagaggagcagagatacacgtgccatgtgcagcatgaggggctgccggagcccctcatgctgagatggaagcagtcttccctgcccaccatccccatcatgggtatcgttgctggtctggttgtccttgcagctgtagtcactggagctgcggtcgctgctgtgctgtggaggaagaagagctcagattgaaaaggagggagctactctcaggctgcaatgtgaaacagctgccctgtgtgggactgagtggcaagatttgttcatgccttccctttgtgacttcaagaaccctgacttctctttctgcagagaccagcccacccctgtgcccaccatgaccctcttcctcatgctgaactgcattccttccccaatcacctttcctgttccagaaaaggggctgggatgtctccgtctctgtctcaaatttgtggtgcactgagctataacttacttctgtattaaaattagaatctgagtataaatttagtttttcaaattatttccaagagagattgatgggttaattaaaggagaagattcctgaaatttgagagacaaaataaatggaagacatgagaactttccaca

SEQ ID NO: 150863 - DNA, 1490 bp, Homo sapiens
  Payload ID: 9765
  Gene Symbol: HLA-G
  Gene Name: major histocompatibility complex, class I, G
  ENST ID: ENST00000422371
  CDS Start-End: 73-1104
atatagtaacatagtgtggtactttgtcttgaggagatgtcctggactcacacggaaacttagggctacggaatgaagacgccaaggatggtggtcatggcgccccgaaccctcttcctgctgctctcgggggccctgaccctgaccgagacctgggcgggctcccactccatgaggtatttcagcgccgccgtgtcccggcccggccgcggggagccccgcttcatcgccatgggctacgtggacgacacgcagttcgtgcggttcgacagcgactcggcgtgtccgaggatggagccgcgggcgccgtgggtggagcaggaggggccggagtattgggaagaggagacacggaacaccaaggcccacgcacagactgacagaatgaacctgcagaccctgcgcggctactacaaccagagcgaggccagttctcacaccctccagtggatgattggctgcgacctggggtccgacggacgcctcctccgcgggtatgaacagtatgcctacgatggcaaggattacctcgccctgaacgaggacctgcgctcctggaccgcagcggacactgcggctcagatctccaagcgcaagtgtgaggcggccaatgtggctgaacaaaggagagcctacctggagggcacgtgcgtggagtggctccacagatacctggagaacgggaaggagatgctgcagcgcgcggacccccccaagacacacgtgacccaccaccctgtctttgactatgaggccaccctgaggtgctgggccctgggcttctaccctgcggagatcatactgacctggcagcgggatggggaggaccagacccaggacgtggagctcgtggagaccaggcctgcaggggatggaaccttccagaagtgggcagctgtggtggtgccttctggagaggagcagagatacacgtgccatgtgcagcatgaggggctgccggagcccctcatgctgagatggaagcagtcttccctgcccaccatccccatcatgggtatcgttgctggcctggttgtccttgcagctgtagtcactggagctgcggtcgctgctgtgctgtggagaaagaagagctcagattgaaaaggagggagctactctcaggctgcaatgtgaaacagctgccctgtgtgggactgagtggcaagtccctttgtgacttcaagaaccctgacttctctttgtgcagagaccagcccacccctgtgcccaccatgaccctcttcctcatgctgaactgcattccttccccaatcacctttcctgttccagaaaaggggctgggatgtctccgtctctgtctcaaatttgtggtccactgagctataacttacttctgtattaaaattagaatctgagtataaatttactttttcaaattatttccaagagagattgataggttaattaaaggagaagattcctgaaatttgagagacaaaataaatggaagacatgagaactttcca

SEQ ID NO: 150864 - DNA, 1427 bp, Homo sapiens
  Payload ID: 9765
  Gene Symbol: HLA-G
  Gene Name: major histocompatibility complex, class I, G
  Uniprot ID: P17693
  ENST ID: ENST00000428952
  CDS Start-End: 25-1041
actcattctccccagacgccaaggatggtggtcatggcgccccgaaccctcttcctgctgctctcgggggccctgaccctgaccgagacctgggcgggctcccactccatgaggtatttcagcgccgccgtgtcccggcccggccgcggggagccccgcttcatcgccatgggctacgtggacgacacgcagttcgtgcggttcgacagcgactcggcgtgtccgaggatggagccgcgggcgccgtgggtggagcaggaggggccggagtattgggaagaggagacacggaacaccaaggcccacgcacagactgacagaatgaacctgcagaccctgcgcggctactacaaccagagcgaggccagttctcacaccctccagtggatgattggctgcgacctggggtccgacggacgcctcctccgcgggtatgaacagtatgcctacgatggcaaggattacctcgccctgaacgaggacctgcgctcctggaccgcagcggacactgcggctcagatctccaagcgcaagtgtgaggcggccaatgtggctgaacaaaggagagcctacctggagggcacgtgcgtggagtggctccacagatacctggagaacgggaaggagatgctgcagcgcgcggacccccccaagacacacgtgacccaccaccctgtctttgactatgaggccaccctgaggtgctgggccctgggcttctaccctgcggagatcatactgacctggcagcgggatggggaggaccagacccaggacgtggagctcgtggagaccaggcctgcaggggatggaaccttccagaagtgggcagctgtggtggtgccttctggagaggagcagagatacacgtgccatgtgcagcatgaggggctgccggagcccctcatgctgagatggaagcagtcttccctgcccaccatccccatcatgggtatcgttgctggcctggttgtccttgcagctgtagtcactggagctgcggtcgctgctgtgctgtggagaaagaagagctcagattgaaaaggagggagctactctcaggctgcaatgtgaaacagctgccctgtgtgggactgagtggcaagtccctttgtgacttcaagaaccctgacttctctttgtgcagagaccagcccacccctgtgcccaccatgaccctcttcctcatgctgaactgcattccttccccaatcacctttcctgttccagaaaaggggctgggatgtctccgtctctgtctcaaatttgtggtccactgagctataacttacttctgtattaaaattagaatctgagtataaatttactttttcaaattatttccaagagagattgataggttaattaaaggagaagattcctgaaatttgagagacaaaataaatggaagacatgagaactttcca

SEQ ID NO: 150865 - DNA, 1441 bp, Homo sapiens
  Payload ID: 9765
  Gene Symbol: HLA-G
  Gene Name: major histocompatibility complex, class I, G
  Uniprot ID: P17693
  ENST ID: ENST00000423011
  CDS Start-End: 25-1041
actcattctccccagacgccaaggatggtggtcatggcaccccgaaccctcttcctgctactctcgggggccctgaccctgaccgagacctgggcgggctcccactccatgaggtatttcagcgccgccgtgtcccggcccggccgcggggagccccgcttcatcgccatgggctacgtggacgacacgcagttcgtgcggttcgacagcgactcggcttgtccgaggatggagccgcgggcgccgtgggtggagcaggaggggccagagtattgggaagaggagacacggaacaccaaggcccacgcacagactgacagaatgaacctgcagaccctgcgcggctactacaaccagagcgaggccagttctcataccctccagtggatgattggctgcgacctggggtccgacggacgcctcctccgcgggtatgaacagtatgcctacgatggcaaggattacctcgccctgaacgaggacctgcgctcctggaccgcagcggacactgcggctcagatctccaagcgcaagtgtgaggcggccaatgtggctgaacaaaggagagcctacctggagggcacgtgcgtggagtggctccacagatacctggagaacgggaaggagatgctgcagcgcgcggacccccccaagacacacgtgacccaccaccctgtctttgactatgaggccaccctgaggtgctgggccctgggcttctaccctgcggagatcatactgacctggcagcgggatggggaggaccagacccaggacgtggagctcgtggagaccaggcctgcaggggatggaaccttccagaagtgggcagctgtggtggtgccttctggagaggagcagagatacacgtgccatgtgcagcatgaggggctgccggagcccctcatgctgagatggaagcagtcttccctgcccaccatccccatcatgggtatcgttgctggcctggttgtccttgcagctgtagtcactggagctgcggtcgctgctgtgctgtggaggaagaagagctcagattgaaaaggagggagctactctcaggctgcaatgtgaaacagctgccctgtgtgggactgagtggcaagatttgttcatgccttccctttgtgacttcaagaaccctgacttctctttctgcagagaccagcccacccctgtgcccaccatgaccctcttcctcatgctgaactgcattccttccccaatcacctttcctgttccagaaaaggggctgggatgtctccgtctctgtctcaaatttgtggtgcactgagctataacttacttctgtattaaaattagaatctgagtataaatttagtttttcaaattatttccaagagagattgatgggttaattaaaggagaagattcctgaaatttgagagacaaaataaatggaagacatgagaactttcca

SEQ ID NO: 150866 - DNA, 851 bp, Homo sapiens
  Payload ID: 9765
  Gene Symbol: HLA-G
  Gene Name: major histocompatibility complex, class I, G
  ENST ID: ENST00000415687
  CDS Start-End: 1-465
atggtggtcatggcgccccgaaccctcttcctgctgctctcgggggccctgaccctgaccgagacctgggcgggctcccactccatgaggtatttcagcgccgccgtgtcccggcccggccgcggggagccccgcttcatcgccatgggctacgtggacgacacgcagttcgtgcggttcgacagcgactcggcgtgtccgaggatggagccgcgggcgccgtgggtggagcaggaggggccggagtattgggaagaggagacacggaacaccaaggcccacgcacagactgacagaatgaacctgcagaccctgcgcggctactacaaccagagcgaggccaagcagtcttccctgcccaccatccccatcatgggtatcgttgctggcctggttgtccttgcagctgtagtcactggagctgcggtcgctgctgtgctgtggagaaagaagagctcagattgaaaaggagggagctactctcaggctgcaatgtgaaacagctgccctgtgtgggactgagtggcaagtccctttgtgacttcaagaaccctgacttctctttgtgcagagaccagcccacccctgtgcccaccatgaccctcttcctcatgctgaactgcattccttccccaatcacctttcctgttccagaaaaggggctgggatgtctccgtctctgtctcaaatttgtggtccactgagctataacttacttctgtattaaaattagaatctgagtgtaaatttactttttcaaattatttccaagagagattgatgggttaattaaaggagaagattcctgaaatttgagagacaaaataaatggaagacatgagaactttcca

SEQ ID NO: 150867 - DNA, 1134 bp, Homo sapiens
  Payload ID: 9765
  Gene Symbol: HLA-G
  Gene Name: major histocompatibility complex, class I, G
  ENST ID: ENST00000452715
  CDS Start-End: 1-741
atggtggtcatggcaccccgaaccctcttcctgctactctcgggggccctgaccctgaccgagacctgggcgggctcccactccatgaggtatttcagcgccgccgtgtcccggcccggccgcggggagccccgcttcatcgccatgggctacgtggacgacacgcagttcgtgcggttcgacagcgactcggcgtgtccgaggatggagccgcgggcgccgtgggtggagcaggaggggccagagtattgggaagaggagacacggaacaccaaggcccacgcacagactgacagaatgaacctgcagaccctgcgcggctactacaaccagagcgaggccaacccccccaagacacacgtgacccaccaccctgtctttgactatgaggccaccctgaggtgctgggccctgggcttctaccctgcggagatcatactgacctggcagcgggatggggaggaccagacccaggacgtggagctcgtggagaccaggcctgcaggggatggaaccttccagaagtgggcagctgtggtggtgccttctggagaggagcagagatacacgtgccatgtgcagcatgaggggctgccggagcccctcatgctgagatggaagcagtcttccctgcccaccatccccatcatgggtatcgttgctggtctggttgtccttgcagctgtagtcactggagctgcggtcgctgctgtgctgtggaggaagaagagctcagattgaaaaggagggagctactctcaggctgcaatgtgaaacagctgccctgtgtgggactgagtggcaagatttgttcatgccttccctttgtgacttcaagaaccctgacttctctttctgcagagaccagcccacccctgtgcccaccatgaccctcttcctcatgctgaactgcattccttccccaatcacctttcctgttccagaaaaggggctgggatgtctccgtctctgtctcaaatttgtggtgcactgagctataacttacttctgtattaaaattagaatctgagtataaatttagtttttcaaattatttccaagagagattgatgggttaattaaaggagaagattcctgaaatttgagagacaaaataaatggaagacatgagaa

SEQ ID NO: 150868 - DNA, 1127 bp, Homo sapiens
  Payload ID: 9765
  Gene Symbol: HLA-G
  Gene Name: major histocompatibility complex, class I, G
  ENST ID: ENST00000426863
  CDS Start-End: 1-741
atggtggtcatggcgccccgaaccctcttcctgctgctctcgggggccctgaccctgaccgagacctgggcgggctcccactccatgaggtatttcagcgccgccgtgtcccggcccggccgcggggagccccgcttcatcgccatgggctacgtggacgacacgcagttcgtgcggttcgacagcgactcggcgtgtccgaggatggagccgcgggcgccgtgggtggagcaggaggggccggagtattgggaagaggagacacggaacaccaaggcccacgcacagactgacagaatgaacctgcagaccctgcgcggctactacaaccagagcgaggccaacccccccaagacacacgtgacccaccaccctgtctttgactatgaggccaccctgaggtgctgggccctgggcttctaccctgcggagatcatactgacctggcagcgggatggggaggaccagacccaggacgtggagctcgtggagaccaggcctgcaggggatggaaccttccagaagtgggcagctgtggtggtgccttctggagaggagcagagatacacgtgccatgtgcagcatgaggggctgccggagcccctcatgctgagatggaagcagtcttccctgcccaccatccccatcatgggtatcgttgctggcctggttgtccttgcagctgtagtcactggagctgcggtcgctgctgtgctgtggagaaagaagagctcagattgaaaaggagggagctactctcaggctgcaatgtgaaacagctgccctgtgtgggactgagtggcaagtccctttgtgacttcaagaaccctgacttctctttgtgcagagaccagcccacccctgtgcccaccatgaccctcttcctcatgctgaactgcattccttccccaatcacctttcctgttccagaaaaggggctgggatgtctccgtctctgtctcaaatttgtggtccactgagctataacttacttctgtattaaaattagaatctgagtataaatttactttttcaaattatttccaagagagattgataggttaattaaaggagaagattcctgaaatttgagagacaaaataaatggaagacatgagaactttcca

SEQ ID NO: 150869 - DNA, 1504 bp, Homo sapiens
  Payload ID: 9765
  Gene Symbol: HLA-G
  Gene Name: major histocompatibility complex, class I, G
  ENST ID: ENST00000434881
  CDS Start-End: 73-1104
atatagtaacatagtgtggtactttgtcttgaggagatgtcctggactcacacggaaacttagggctacggaatgaagacgccaaggatggtggtcatggcaccccgaaccctcttcctgctactctcgggggccctgaccctgaccgagacctgggcgggctcccactccatgaggtatttcagcgccgccgtgtcccggcccggccgcggggagccccgcttcatcgccatgggctacgtggacgacacgcagttcgtgcggttcgacagcgactcggcttgtccgaggatggagccgcgggcgccgtgggtggagcaggaggggccagagtattgggaagaggagacacggaacaccaaggcccacgcacagactgacagaatgaacctgcagaccctgcgcggctactacaaccagagcgaggccagttctcataccctccagtggatgattggctgcgacctggggtccgacggacgcctcctccgcgggtatgaacagtatgcctacgatggcaaggattacctcgccctgaacgaggacctgcgctcctggaccgcagcggacactgcggctcagatctccaagcgcaagtgtgaggcggccaatgtggctgaacaaaggagagcctacctggagggcacgtgcgtggagtggctccacagatacctggagaacgggaaggagatgctgcagcgcgcggacccccccaagacacacgtgacccaccaccctgtctttgactatgaggccaccctgaggtgctgggccctgggcttctaccctgcggagatcatactgacctggcagcgggatggggaggaccagacccaggacgtggagctcgtggagaccaggcctgcaggggatggaaccttccagaagtgggcagctgtggtggtgccttctggagaggagcagagatacacgtgccatgtgcagcatgaggggctgccggagcccctcatgctgagatggaagcagtcttccctgcccaccatccccatcatgggtatcgttgctggcctggttgtccttgcagctgtagtcactggagctgcggtcgctgctgtgctgtggaggaagaagagctcagattgaaaaggagggagctactctcaggctgcaatgtgaaacagctgccctgtgtgggactgagtggcaagatttgttcatgccttccctttgtgacttcaagaaccctgacttctctttctgcagagaccagcccacccctgtgcccaccatgaccctcttcctcatgctgaactgcattccttccccaatcacctttcctgttccagaaaaggggctgggatgtctccgtctctgtctcaaatttgtggtgcactgagctataacttacttctgtattaaaattagaatctgagtataaatttagtttttcaaattatttccaagagagattgatgggttaattaaaggagaagattcctgaaatttgagagacaaaataaatggaagacatgagaactttcca

SEQ ID NO: 150870 - DNA, 1189 bp, Homo sapiens
  Payload ID: 9765
  Gene Symbol: HLA-G
  Gene Name: major histocompatibility complex, class I, G
  ENST ID: ENST00000430253
  CDS Start-End: 1-741
atggtggtcatggcaccccgaaccctcttcctgctactctcgggggccctgaccctgaccgagacctgggcgggctcccactccatgaggtatttcagcgccgccgtgtcccggcccggccgcggggagccccgcttcatcgccatgggctacgtggacgacacgcagttcgtgcggttcgacagcgactcggcttgtccgaggatggagccgcgggcgccgtgggtggagcaggaggggccagagtattgggaagaggagacacggaacaccaaggcccacgcacagactgacagaatgaacctgcagaccctgcgcggctactacaaccagagcgaggccaacccccccaagacacacgtgacccaccaccctgtctttgactatgaggccaccctgaggtgctgggccctgggcttctaccctgcggagatcatactgacctggcagcgggatggggaggaccagacccaggacgtggagctcgtggagaccaggcctgcaggggatggaaccttccagaagtgggcagctgtggtggtgccttctggagaggagcagagatacacgtgccatgtgcagcatgaggggctgccggagcccctcatgctgagatggaagcagtcttccctgcccaccatccccatcatgggtatcgttgctggcctggttgtccttgcagctgtagtcactggagctgcggtcgctgctgtgctgtggaggaagaagagctcagattgaaaaggagggagctactctcaggctgcaagcagtgacagtgcccagggctctaatgtgtctctcacggcttgtaaattgtgaaacagctgccctgtgtgggactgagtggcaagatttgttcatgccttccctttgtgacttcaagaaccctgacttctctttctgcagagaccagcccacccctgtgcccaccatgaccctcttcctcatgctgaactgcattccttccccaatcacctttcctgttccagaaaaggggctgggatgtctccgtctctgtctcaaatttgtggtgcactgagctataacttacttctgtattaaaattagaatctgagtataaatttagtttttcaaattatttccaagagagattgatgggttaattaaaggagaagattcctgaaatttgagagacaaaataaatggaagacatgagaactttcca

SEQ ID NO: 150871 - DNA, 1490 bp, Homo sapiens
  Payload ID: 9765
  Gene Symbol: HLA-G
  Gene Name: major histocompatibility complex, class I, G
  ENST ID: ENST00000420559
  CDS Start-End: 73-1104
atatagtaacatagtgtggtactttgtcttgaggagatgtcctggactcacacggaaacttagggctacggaatgaagacgccaaggatggtggtcatggcgccccgaaccctcttcctgctgctctcgggggccctgaccctgaccgagacctgggcgggctcccactccatgaggtatttcagcgccgccgtgtcccggcccggccgcggggagccccgcttcatcgccatgggctacgtggacgacacgcagttcgtgcggttcgacagcgactcggcgtgtccgaggatggagccgcgggcgccgtgggtggagcaggaggggccggagtattgggaagaggagacacggaacaccaaggcccacgcacagactgacagaatgaacctgcagaccctgcgcggctactacaaccagagcgaggccagttctcacaccctccagtggatgattggctgcgacctggggtccgacggacgcctcctccgcgggtatgaacagtatgcctacgatggcaaggattacctcgccctgaacgaggacctgcgctcctggaccgcagcggacactgcggctcagatctccaagcgcaagtgtgaggcggccaatgtggctgaacaaaggagagcctacctggagggcacgtgcgtggagtggctccacagatacctggagaacgggaaggagatgctgcagcgcgcggacccccccaagacacacgtgacccaccaccctgtctttgactatgaggccaccctgaggtgctgggccctgggcttctaccctgcggagatcatactgacctggcagcgggatggggaggaccagacccaggacgtggagctcgtggagaccaggcctgcaggggatggaaccttccagaagtgggcagctgtggtggtgccttctggagaggagcagagatacacgtgccatgtgcagcatgaggggctgccggagcccctcatgctgagatggaagcagtcttccctgcccaccatccccatcatgggtatcgttgctggcctggttgtccttgcagctgtagtcactggagctgcggtcgctgctgtgctgtggagaaagaagagctcagattgaaaaggagggagctactctcaggctgcaatgtgaaacagctgccctgtgtgggactgagtggcaagtccctttgtgacttcaagaaccctgacttctctttgtgcagagaccagcccacccctgtgcccaccatgaccctcttcctcatgctgaactgcattccttccccaatcacctttcctgttccagaaaaggggctgggatgtctccgtctctgtctcaaatttgtggtccactgagctataacttacttctgtattaaaattagaatctgagtgtaaatttactttttcaaattatttccaagagagattgatgggttaattaaaggagaagattcctgaaatttgagagacaaaataaatggaagacatgagaactttcca

SEQ ID NO: 150872 - DNA, 1127 bp, Homo sapiens
  Payload ID: 9765
  Gene Symbol: HLA-G
  Gene Name: major histocompatibility complex, class I, G
  ENST ID: ENST00000412263
  CDS Start-End: 1-741
atggtggtcatggcgccccgaaccctcttcctgctgctctcgggggccctgaccctgaccgagacctgggcgggctcccactccatgaggtatttcagcgccgccgtgtcccggcccggccgcggggagccccgcttcatcgccatgggctacgtggacgacacgcagttcgtgcggttcgacagcgactcggcgtgtccgaggatggagccgcgggcgccgtgggtggagcaggaggggccggagtattgggaagaggagacacggaacaccaaggcccacgcacagactgacagaatgaacctgcagaccctgcgcggctactacaaccagagcgaggccaacccccccaagacacacgtgacccaccaccctgtctttgactatgaggccaccctgaggtgctgggccctgggcttctaccctgcggagatcatactgacctggcagcgggatggggaggaccagacccaggacgtggagctcgtggagaccaggcctgcaggggatggaaccttccagaagtgggcagctgtggtggtgccttctggagaggagcagagatacacgtgccatgtgcagcatgaggggctgccggagcccctcatgctgagatggaagcagtcttccctgcccaccatccccatcatgggtatcgttgctggcctggttgtccttgcagctgtagtcactggagctgcggtcgctgctgtgctgtggagaaagaagagctcagattgaaaaggagggagctactctcaggctgcaatgtgaaacagctgccctgtgtgggactgagtggcaagtccctttgtgacttcaagaaccctgacttctctttgtgcagagaccagcccacccctgtgcccaccatgaccctcttcctcatgctgaactgcattccttccccaatcacctttcctgttccagaaaaggggctgggatgtctccgtctctgtctcaaatttgtggtccactgagctataacttacttctgtattaaaattagaatctgagtgtaaatttactttttcaaattatttccaagagagattgatgggttaattaaaggagaagattcctgaaatttgagagacaaaataaatggaagacatgagaactttcca

SEQ ID NO: 150873 - DNA, 1434 bp, Homo sapiens
  Payload ID: 9765
  Gene Symbol: HLA-G
  Gene Name: major histocompatibility complex, class I, G
  Uniprot ID: P17693
  ENST ID: ENST00000444098
  CDS Start-End: 25-1041
actcattctccccagacgccaaggatggtggtcatggcaccccgaaccctcttcctgctactctcgggggccctgaccctgaccgagacctgggcgggctcccactccatgaggtatttcagcgccgccgtgtcccggcccggccgcggggagccccgcttcatcgccatgggctacgtggacgacacgcagttcgtgcggttcgacagcgactcggcgtgtccgaggatggagccgcgggcgccgtgggtggagcaggaggggccagagtattgggaagaggagacacggaacaccaaggcccacgcacagactgacagaatgaacctgcagaccctgcgcggctactacaaccagagcgaggccagttctcataccctccagtggatgattggctgcgacctggggtccgacggacgcctcctccgcgggtatgaacagtatgcctacgatggcaaggattacctcgccctgaacgaggacctgcgctcctggaccgcagcggacactgcggctcagatctccaagcgcaagtgtgaggcggccaatgtggctgaacaaaggagagcctacctggagggcacgtgcgtggagtggctccacagatacctggagaacgggaaggagatgctgcagcgcgcggacccccccaagacacacgtgacccaccaccctgtctttgactatgaggccaccctgaggtgctgggccctgggcttctaccctgcggagatcatactgacctggcagcgggatggggaggaccagacccaggacgtggagctcgtggagaccaggcctgcaggggatggaaccttccagaagtgggcagctgtggtggtgccttctggagaggagcagagatacacgtgccatgtgcagcatgaggggctgccggagcccctcatgctgagatggaagcagtcttccctgcccaccatccccatcatgggtatcgttgctggtctggttgtccttgcagctgtagtcactggagctgcggtcgctgctgtgctgtggaggaagaagagctcagattgaaaaggagggagctactctcaggctgcaatgtgaaacagctgccctgtgtgggactgagtggcaagatttgttcatgccttccctttgtgacttcaagaaccctgacttctctttctgcagagaccagcccacccctgtgcccaccatgaccctcttcctcatgctgaactgcattccttccccaatcacctttcctgttccagaaaaggggctgggatgtctccgtctctgtctcaaatttgtggtgcactgagctataacttacttctgtattaaaattagaatctgagtataaatttagtttttcaaattatttccaagagagattgatgggttaattaaaggagaagattcctgaaatttgagagacaaaataaatggaagacatgagaa

SEQ ID NO: 150874 - DNA, 851 bp, Homo sapiens
  Payload ID: 9765
  Gene Symbol: HLA-G
  Gene Name: major histocompatibility complex, class I, G
  ENST ID: ENST00000429890
  CDS Start-End: 1-465
atggtggtcatggcgccccgaaccctcttcctgctgctctcgggggccctgaccctgaccgagacctgggcgggctcccactccatgaggtatttcagcgccgccgtgtcccggcccggccgcggggagccccgcttcatcgccatgggctacgtggacgacacgcagttcgtgcggttcgacagcgactcggcgtgtccgaggatggagccgcgggcgccgtgggtggagcaggaggggccggagtattgggaagaggagacacggaacaccaaggcccacgcacagactgacagaatgaacctgcagaccctgcgcggctactacaaccagagcgaggccaagcagtcttccctgcccaccatccccatcatgggtatcgttgctggcctggttgtccttgcagctgtagtcactggagctgcggtcgctgctgtgctgtggagaaagaagagctcagattgaaaaggagggagctactctcaggctgcaatgtgaaacagctgccctgtgtgggactgagtggcaagtccctttgtgacttcaagaaccctgacttctctttgtgcagagaccagcccacccctgtgcccaccatgaccctcttcctcatgctgaactgcattccttccccaatcacctttcctgttccagaaaaggggctgggatgtctccgtctctgtctcaaatttgtggtccactgagctataacttacttctgtattaaaattagaatctgagtataaatttactttttcaaattatttccaagagagattgataggttaattaaaggagaagattcctgaaatttgagagacaaaataaatggaagacatgagaactttcca

SEQ ID NO: 150875 - DNA, 1427 bp, Homo sapiens
  Payload ID: 9765
  Gene Symbol: HLA-G
  Gene Name: major histocompatibility complex, class I, G
  Uniprot ID: P17693
  ENST ID: ENST00000423373
  CDS Start-End: 25-1041
actcattctccccagacgccaaggatggtggtcatggcgccccgaaccctcttcctgctgctctcgggggccctgaccctgaccgagacctgggcgggctcccactccatgaggtatttcagcgccgccgtgtcccggcccggccgcggggagccccgcttcatcgccatgggctacgtggacgacacgcagttcgtgcggttcgacagcgactcggcgtgtccgaggatggagccgcgggcgccgtgggtggagcaggaggggccggagtattgggaagaggagacacggaacaccaaggcccacgcacagactgacagaatgaacctgcagaccctgcgcggctactacaaccagagcgaggccagttctcacaccctccagtggatgattggctgcgacctggggtccgacggacgcctcctccgcgggtatgaacagtatgcctacgatggcaaggattacctcgccctgaacgaggacctgcgctcctggaccgcagcggacactgcggctcagatctccaagcgcaagtgtgaggcggccaatgtggctgaacaaaggagagcctacctggagggcacgtgcgtggagtggctccacagatacctggagaacgggaaggagatgctgcagcgcgcggacccccccaagacacacgtgacccaccaccctgtctttgactatgaggccaccctgaggtgctgggccctgggcttctaccctgcggagatcatactgacctggcagcgggatggggaggaccagacccaggacgtggagctcgtggagaccaggcctgcaggggatggaaccttccagaagtgggcagctgtggtggtgccttctggagaggagcagagatacacgtgccatgtgcagcatgaggggctgccggagcccctcatgctgagatggaagcagtcttccctgcccaccatccccatcatgggtatcgttgctggcctggttgtccttgcagctgtagtcactggagctgcggtcgctgctgtgctgtggagaaagaagagctcagattgaaaaggagggagctactctcaggctgcaatgtgaaacagctgccctgtgtgggactgagtggcaagtccctttgtgacttcaagaaccctgacttctctttgtgcagagaccagcccacccctgtgcccaccatgaccctcttcctcatgctgaactgcattccttccccaatcacctttcctgttccagaaaaggggctgggatgtctccgtctctgtctcaaatttgtggtccactgagctataacttacttctgtattaaaattagaatctgagtgtaaatttactttttcaaattatttccaagagagattgatgggttaattaaaggagaagattcctgaaatttgagagacaaaataaatggaagacatgagaactttcca

SEQ ID NO: 150876 - DNA, 1141 bp, Homo sapiens
  Payload ID: 9765
  Gene Symbol: HLA-G
  Gene Name: major histocompatibility complex, class I, G
  ENST ID: ENST00000434907
  CDS Start-End: 1-741
atggtggtcatggcaccccgaaccctcttcctgctactctcgggggccctgaccctgaccgagacctgggcgggctcccactccatgaggtatttcagcgccgccgtgtcccggcccggccgcggggagccccgcttcatcgccatgggctacgtggacgacacgcagttcgtgcggttcgacagcgactcggcttgtccgaggatggagccgcgggcgccgtgggtggagcaggaggggccagagtattgggaagaggagacacggaacaccaaggcccacgcacagactgacagaatgaacctgcagaccctgcgcggctactacaaccagagcgaggccaacccccccaagacacacgtgacccaccaccctgtctttgactatgaggccaccctgaggtgctgggccctgggcttctaccctgcggagatcatactgacctggcagcgggatggggaggaccagacccaggacgtggagctcgtggagaccaggcctgcaggggatggaaccttccagaagtgggcagctgtggtggtgccttctggagaggagcagagatacacgtgccatgtgcagcatgaggggctgccggagcccctcatgctgagatggaagcagtcttccctgcccaccatccccatcatgggtatcgttgctggcctggttgtccttgcagctgtagtcactggagctgcggtcgctgctgtgctgtggaggaagaagagctcagattgaaaaggagggagctactctcaggctgcaatgtgaaacagctgccctgtgtgggactgagtggcaagatttgttcatgccttccctttgtgacttcaagaaccctgacttctctttctgcagagaccagcccacccctgtgcccaccatgaccctcttcctcatgctgaactgcattccttccccaatcacctttcctgttccagaaaaggggctgggatgtctccgtctctgtctcaaatttgtggtgcactgagctataacttacttctgtattaaaattagaatctgagtataaatttagtttttcaaattatttccaagagagattgatgggttaattaaaggagaagattcctgaaatttgagagacaaaataaatggaagacatgagaactttcca

SEQ ID NO: 150877 - DNA, 1427 bp, Homo sapiens; identical to SEQ ID NO: 150875
  Payload ID: 9765
  Gene Symbol: HLA-G
  Gene Name: major histocompatibility complex, class I, G
  Uniprot ID: P17693
  ENST ID: ENST00000449127
  CDS Start-End: 25-1041

SEQ ID NO: 150878 - DNA, 1490 bp, Homo sapiens; identical to SEQ ID NO: 150871
  Payload ID: 9765
  Gene Symbol: HLA-G
  Gene Name: major histocompatibility complex, class I, G
  ENST ID: ENST00000450984
  CDS Start-End: 73-1104

SEQ ID NO: 150879 - DNA, 851 bp, Homo sapiens; identical to SEQ ID NO: 150866
  Payload ID: 9765
  Gene Symbol: HLA-G
  Gene Name: major histocompatibility complex, class I, G
  ENST ID: ENST00000457132
  CDS Start-End: 1-465

SEQ ID NO: 150880 - DNA, 1578 bp, Homo sapiens
  Payload ID: 9765
  Gene Symbol: HLA-G
  Gene Name: major histocompatibility complex, class I, G
  Uniprot ID: P17693
  ENST ID: ENST00000428701
  CDS Start-End: 179-1195
agtgtggtactttgtcttgaggagatgtcctggactcacacggaaacttagggctacggaatgaagttctcactcccattaggtgacaggtttttagagaagccaatcagcgtcgccgcggtcctggttctaaagtcctcgctcacccacccggactcattctccccagacgccaaggatggtggtcatggcgccccgaaccctcttcctgctgctctcgggggccctgaccctgaccgagacctgggcgggctcccactccatgaggtatttcagcgccgccgtgtcccggcccggccgcggggagccccgcttcatcgccatgggctacgtggacgacacgcagttcgtgcggttcgacagcgactcggcgtgtccgaggatggagccgcgggcgccgtgggtggagcaggaggggccggagtattgggaagaggagacacggaacaccaaggcccacgcacagactgacagaatgaacctgcagaccctgcgcggctactacaaccagagcgaggccagttctcacaccctccagtggatgattggctgcgacctggggtccgacggacgcctcctccgcgggtatgaacagtatgcctacgatggcaaggattacctcgccctgaacgaggacctgcgctcctggaccgcagcggacactgcggctcagatctccaagcgcaagtgtgaggcggccaatgtggctgaacaaaggagagcctacctggagggcacgtgcgtggagtggctccacagatacctggagaacgggaaggagatgctgcagcgcgcggacccccccaagacacacgtgacccaccaccctgtctttgactatgaggccaccctgaggtgctgggccctgggcttctaccctgcggagatcatactgacctggcagcgggatggggaggaccagacccaggacgtggagctcgtggagaccaggcctgcaggggatggaaccttccagaagtgggcagctgtggtggtgccttctggagaggagcagagatacacgtgccatgtgcagcatgaggggctgccggagcccctcatgctgagatggaagcagtcttccctgcccaccatccccatcatgggtatcgttgctggcctggttgtccttgcagctgtagtcactggagctgcggtcgctgctgtgctgtggagaaagaagagctcagattgaaaaggagggagctactctcaggctgcaatgtgaaacagctgccctgtgtgggactgagtggcaagtccctttgtgacttcaagaaccctgactcctctttgtgcagagaccagcccacccctgtgcccaccatgaccctcttcctcatgctgaactgcattccttccccaatcacctttcctgttccagaaaaggggctgggatgtctccgtctctgtctcaaatttgtggtccactgagctataacttacttctgtattaaaattagaatctgagtataaatttactttttcaaattatttccaagagagattgatgggttaattaaaggagaagattcctgaaatttgagagacaaaataaatggaagacatgagaacttt

SEQ ID NO: 150881 - DNA, 865 bp, Homo sapiens
  Payload ID: 9765
  Gene Symbol: HLA-G
  Gene Name: major histocompatibility complex, class I, G
  ENST ID: ENST00000448306
  CDS Start-End: 1-465
atggtggtcatggcaccccgaaccctcttcctgctactctcgggggccctgaccctgaccgagacctgggcgggctcccactccatgaggtatttcagcgccgccgtgtcccggcccggccgcggggagccccgcttcatcgccatgggctacgtggacgacacgcagttcgtgcggttcgacagcgactcggcttgtccgaggatggagccgcgggcgccgtgggtggagcaggaggggccagagtattgggaagaggagacacggaacaccaaggcccacgcacagactgacagaatgaacctgcagaccctgcgcggctactacaaccagagcgaggccaagcagtcttccctgcccaccatccccatcatgggtatcgttgctggcctggttgtccttgcagctgtagtcactggagctgcggtcgctgctgtgctgtggaggaagaagagctcagattgaaaaggagggagctactctcaggctgcaatgtgaaacagctgccctgtgtgggactgagtggcaagatttgttcatgccttccctttgtgacttcaagaaccctgacttctctttctgcagagaccagcccacccctgtgcccaccatgaccctcttcctcatgctgaactgcattccttccccaatcacctttcctgttccagaaaaggggctgggatgtctccgtctctgtctcaaatttgtggtgcactgagctataacttacttctgtattaaaattagaatctgagtataaatttagtttttcaaattatttccaagagagattgatgggttaattaaaggagaagattcctgaaatttgagagacaaaataaatggaagacatgagaactttcca

SEQ ID NO: 150882 - DNA, 1127 bp, Homo sapiens; identical to SEQ ID NO: 150872
  Payload ID: 9765
  Gene Symbol: HLA-G
  Gene Name: major histocompatibility complex, class I, G
  ENST ID: ENST00000452577
  CDS Start-End: 1-741

SEQ ID NO: 150883 - DNA, 858 bp, Homo sapiens
  Payload ID: 9765
  Gene Symbol: HLA-G
  Gene Name: major histocompatibility complex, class I, G
  ENST ID: ENST00000445373
  CDS Start-End: 1-465
atggtggtcatggcaccccgaaccctcttcctgctactctcgggggccctgaccctgaccgagacctgggcgggctcccactccatgaggtatttcagcgccgccgtgtcccggcccggccgcggggagccccgcttcatcgccatgggctacgtggacgacacgcagttcgtgcggttcgacagcgactcggcgtgtccgaggatggagccgcgggcgccgtgggtggagcaggaggggccagagtattgggaagaggagacacggaacaccaaggcccacgcacagactgacagaatgaacctgcagaccctgcgcggctactacaaccagagcgaggccaagcagtcttccctgcccaccatccccatcatgggtatcgttgctggtctggttgtccttgcagctgtagtcactggagctgcggtcgctgctgtgctgtggaggaagaagagctcagattgaaaaggagggagctactctcaggctgcaatgtgaaacagctgccctgtgtgggactgagtggcaagatttgttcatgccttccctttgtgacttcaagaaccctgacttctctttctgcagagaccagcccacccctgtgcccaccatgaccctcttcctcatgctgaactgcattccttccccaatcacctttcctgttccagaaaaggggctgggatgtctccgtctctgtctcaaatttgtggtgcactgagctataacttacttctgtattaaaattagaatctgagtataaatttagtttttcaaattatttccaagagagattgatgggttaattaaaggagaagattcctgaaatttgagagacaaaataaatggaagacatgagaa

SEQ ID NO: 150884 - DNA, 1191 bp, Homo sapiens
  Payload ID: 9765
  Gene Symbol: HLA-G
  Gene Name: major histocompatibility complex, class I, G
  ENST ID: ENST00000469472
  CDS Start-End: 1-741
atggtggtcatggcaccccgaaccctcttcctgctactctcgggggccctgaccctgaccgagacctgggcgggctcccactccatgaggtatttcagcgccgccgtgtcccggcccggccgcggggagccccgcttcatcgccatgggctacgtggacgacacgcagttcgtgcggttcgacagcgactcggcgtgtccgaggatggagccgcgggcgccgtgggtggagcaggaggggccagagtattgggaagaggagacacggaacaccaaggcccacgcacagactgacagaatgaacctgcagaccctgcgcggctactacaaccagagcgaggccaacccccccaagacacacgtgacccaccaccctgtctttgactatgaggccaccctgaggtgctgggccctgggcttctaccctgcggagatcatactgacctggcagcgggatggggaggaccagacccaggacgtggagctcgtggagaccaggcctgcaggggatggaaccttccagaagtgggcagctgtggtggtgccttctggagaggagcagagatacacgtgccatgtgcagcatgaggggctgccggagcccctcatgctgagatggaagcagtcttccctgcccaccatccccatcatgggtatcgttgctggtctggttgtccttgcagctgtagtcactggagctgcggtcgctgctgtgctgtggaggaagaagagctcagattgaaaaggagggagctactctcaggctgcaagcagtgacagtgcccagggctctaatgtgtctctcacggcttgtaaattgtgaaacagctgccctgtgtgggactgagtggcaagatttgttcatgccttccctttgtgacttcaagaaccctgacttctctttctgcagagaccagcccacccctgtgcccaccatgaccctcttcctcatgctgaactgcattccttccccaatcacctttcctgttccagaaaaggggctgggatgtctccgtctctgtctcaaatttgtggtgcactgagctataacttacttctgtattaaaattagaatctgagtataaatttagtttttcaaattatttccaagagagattgatgggttaattaaaggagaagattcctgaaatttgagagacaaaataaatggaagacatgagaactttccaca

SEQ ID NO: 150885 - DNA, 1182 bp, Homo sapiens
  Payload ID: 9765
  Gene Symbol: HLA-G
  Gene Name: major histocompatibility complex, class I, G
  ENST ID: ENST00000486553
  CDS Start-End: 1-741
atggtggtcatggcaccccgaaccctcttcctgctactctcgggggccctgaccctgaccgagacctgggcgggctcccactccatgaggtatttcagcgccgccgtgtcccggcccggccgcggggagccccgcttcatcgccatgggctacgtggacgacacgcagttcgtgcggttcgacagcgactcggcgtgtccgaggatggagccgcgggcgccgtgggtggagcaggaggggccagagtattgggaagaggagacacggaacaccaaggcccacgcacagactgacagaatgaacctgcagaccctgcgcggctactacaaccagagcgaggccaacccccccaagacacacgtgacccaccaccctgtctttgactatgaggccaccctgaggtgctgggccctgggcttctaccctgcggagatcatactgacctggcagcgggatggggaggaccagacccaggacgtggagctcgtggagaccaggcctgcaggggatggaaccttccagaagtgggcagctgtggtggtgccttctggagaggagcagagatacacgtgccatgtgcagcatgaggggctgccggagcccctcatgctgagatggaagcagtcttccctgcccaccatccccatcatgggtatcgttgctggtctggttgtccttgcagctgtagtcactggagctgcggtcgctgctgtgctgtggaggaagaagagctcagattgaaaaggagggagctactctcaggctgcaagcagtgacagtgcccagggctctaatgtgtctctcacggcttgtaaattgtgaaacagctgccctgtgtgggactgagtggcaagatttgttcatgccttccctttgtgacttcaagaaccctgacttctctttctgcagagaccagcccacccctgtgcccaccatgaccctcttcctcatgctgaactgcattccttccccaatcacctttcctgttccagaaaaggggctgggatgtctccgtctctgtctcaaatttgtggtgcactgagctataacttacttctgtattaaaattagaatctgagtataaatttagtttttcaaattatttccaagagagattgatgggttaattaaaggagaagattcctgaaatttgagagacaaaataaatggaagacatgagaa

SEQ ID NO: 150886 - DNA, 1175 bp, Homo sapiens
  Payload ID: 9765
  Gene Symbol: HLA-G
  Gene Name: major histocompatibility complex, class I, G
  ENST ID: ENST00000466488
  CDS Start-End: 1-741
atggtggtcatggcgccccgaaccctcttcctgctgctctcgggggccctgaccctgaccgagacctgggcgggctcccactccatgaggtatttcagcgccgccgtgtcccggcccggccgcggggagccccgcttcatcgccatgggctacgtggacgacacgcagttcgtgcggttcgacagcgactcggcgtgtccgaggatggagccgcgggcgccgtgggtggagcaggaggggccggagtattgggaagaggagacacggaacaccaaggcccacgcacagactgacagaatgaacctgcagaccctgcgcggctactacaaccagagcgaggccaacccccccaagacacacgtgacccaccaccctgtctttgactatgaggccaccctgaggtgctgggccctgggcttctaccctgcggagatcatactgacctggcagcgggatggggaggaccagacccaggacgtggagctcgtggagaccaggcctgcaggggatggaaccttccagaagtgggcagctgtggtggtgccttctggagaggagcagagatacacgtgccatgtgcagcatgaggggctgccggagcccctcatgctgagatggaagcagtcttccctgcccaccatccccatcatgggtatcgttgctggcctggttgtccttgcagctgtagtcactggagctgcggtcgctgctgtgctgtggagaaagaagagctcagattgaaaaggagggagctactctcaggctgcaagcagtgacagtgcccagggctctaatgtgtctctcacggcttgtaaattgtgaaacagctgccctgtgtgggactgagtggcaagtccctttgtgacttcaagaaccctgacttctctttgtgcagagaccagcccacccctgtgcccaccatgaccctcttcctcatgctgaactgcattccttccccaatcacctttcctgttccagaaaaggggctgggatgtctccgtctctgtctcaaatttgtggtccactgagctataacttacttctgtattaaaattagaatctgagtgtaaatttactttttcaaattatttccaagagagattgatgggttaattaaaggagaagattcctgaaatttgagagacaaaataaatggaagacatgagaactttcca

SEQ ID NO: 150887 - DNA, 1175 bp, Homo sapiens
  Payload ID: 9765
  Gene Symbol: HLA-G
  Gene Name: major histocompatibility complex, class I, G
  ENST ID: ENST00000467814
  CDS Start-End: 1-741
atggtggtcatggcgccccgaaccctcttcctgctgctctcgggggccctgaccctgaccgagacctgggcgggctcccactccatgaggtatttcagcgccgccgtgtcccggcccggccgcggggagccccgcttcatcgccatgggctacgtggacgacacgcagttcgtgcggttcgacagcgactcggcgtgtccgaggatggagccgcgggcgccgtgggtggagcaggaggggccggagtattgggaagaggagacacggaacaccaaggcccacgcacagactgacagaatgaacctgcagaccctgcgcggctactacaaccagagcgaggccaacccccccaagacacacgtgacccaccaccctgtctttgactatgaggccaccctgaggtgctgggccctgggcttctaccctgcggagatcatactgacctggcagcgggatggggaggaccagacccaggacgtggagctcgtggagaccaggcctgcaggggatggaaccttccagaagtgggcagctgtggtggtgccttctggagaggagcagagatacacgtgccatgtgcagcatgaggggctgccggagcccctcatgctgagatggaagcagtcttccctgcccaccatccccatcatgggtatcgttgctggcctggttgtccttgcagctgtagtcactggagctgcggtcgctgctgtgctgtggagaaagaagagctcagattgaaaaggagggagctactctcaggctgcaagcagtgacagtgcccagggctctaatgtgtctctcacggcttgtaaattgtgaaacagctgccctgtgtgggactgagtggcaagtccctttgtgacttcaagaaccctgacttctctttgtgcagagaccagcccacccctgtgcccaccatgaccctcttcctcatgctgaactgcattccttccccaatcacctttcctgttccagaaaaggggctgggatgtctccgtctctgtctcaaatttgtggtccactgagctataacttacttctgtattaaaattagaatctgagtataaatttactttttcaaattatttccaagagagattgataggttaattaaaggagaagattcctgaaatttgagagacaaaataaatggaagacatgagaactttcca

SEQ ID NO: 150888 - DNA, 1175 bp, Homo sapiens
  Payload ID: 9765
  Gene Symbol: HLA-G
  Gene Name: major histocompatibility complex, class I, G
  ENST ID: ENST00000478519
  CDS Start-End: 1-741
atggtggtcatggcgccccgaaccctcttcctgctgctctcgggggccctgaccctgaccgagacctgggcgggctcccactccatgaggtatttcagcgccgccgtgtcccggcccggccgcggggagccccgcttcatcgccatgggctacgtggacgacacgcagttcgtgcggttcgacagcgactcggcgtgtccgaggatggagccgcgggcgccgtgggtggagcaggaggggccggagtattgggaagaggagacacggaacaccaaggcccacgcacagactgacagaatgaacctgcagaccctgcgcggctactacaaccagagcgaggccaacccccccaagacacacgtgacccaccaccctgtctttgactatgaggccaccctgaggtgctgggccctgggcttctaccctgcggagatcatactgacctggcagcgggatggggaggaccagacccaggacgtggagctcgtggagaccaggcctgcaggggatggaaccttccagaagtgggcagctgtggtggtgccttctggagaggagcagagatacacgtgccatgtgcagcatgaggggctgccggagcccctcatgctgagatggaagcagtcttccctgcccaccatccccatcatgggtatcgttgctggcctggttgtccttgcagctgtagtcactggagctgcggtcgctgctgtgctgtggagaaagaagagctcagattgaaaaggagggagctactctcaggctgcaagcagtgacagtgcccagggctctaatgtgtctctcacggcttgtaaattgtgaaacagctgccctgtgtgggactgagtggcaagtccctttgtgacttcaagaaccctgactcctctttgtgcagagaccagcccacccctgtgcccaccatgaccctcttcctcatgctgaactgcattccttccccaatcacctttcctgttccagaaaaggggctgggatgtctccgtctctgtctcaaatttgtggtccactgagctataacttacttctgtattaaaattagaatctgagtataaatttactttttcaaattatttccaagagagattgatgggttaattaaaggagaagattcctgaaatttgagagacaaaataaatggaagacatgagaactttcca

SEQ ID NO: 150889 - DNA, 1175 bp, Homo sapiens; identical to SEQ ID NO: 150886
  Payload ID: 9765
  Gene Symbol: HLA-G
  Gene Name: major histocompatibility complex, class I, G
  ENST ID: ENST00000469347
  CDS Start-End: 1-741

SEQ ID NO: 150890 - DNA, 1582 bp, Homo sapiens
  Payload ID: 9765
  Gene Symbol: HLA-G
  Gene Name: major histocompatibility complex, class I, G
  Uniprot ID: P17693
  ENST ID: ENST00000546545
  CDS Start-End: 179-1195
agtgtggtactttgtcttgaggagatgtcctggactcacacggaaacttagggctacggaatgaagttctcactcccattaggtgacaggtttttagagaagccaatcagcgtcgccgcggtcctggttctaaagtcctcgctcacccacccggactcattctccccagacgccaaggatggtggtcatggcaccccgaaccctcttcctgctactctcgggggccctgaccctgaccgagacctgggcgggctcccactccatgaggtatttcagcgccgccgtgtcccggcccggccgcggggagccccgcttcatcgccatgggctacgtggacgacacgcagttcgtgcggttcgacagcgactcggcgtgtccgaggatggagccgcgggcgccgtgggtggagcaggaggggccagagtattgggaagaggagacacggaacaccaaggcccacgcacagactgacagaatgaacctgcagaccctgcgcggctactacaaccagagcgaggccagttctcataccctccagtggatgattggctgcgacctggggtccgacggacgcctcctccgcgggtatgaacagtatgcctacgatggcaaggattacctcgccctgaacgaggacctgcgctcctggaccgcagcggacactgcggctcagatctccaagcgcaagtgtgaggcggccaatgtggctgaacaaaggagagcctacctggagggcacgtgcgtggagtggctccacagatacctggagaacgggaaggagatgctgcagcgcgcggacccccccaagacacacgtgacccaccaccctgtctttgactatgaggccaccctgaggtgctgggccctgggcttctaccctgcggagatcatactgacctggcagcgggatggggaggaccagacccaggacgtggagctcgtggagaccaggcctgcaggggatggaaccttccagaagtgggcagctgtggtggtgccttctggagaggagcagagatacacgtgccatgtgcagcatgaggggctgccggagcccctcatgctgagatggaagcagtcttccctgcccaccatccccatcatgggtatcgttgctggtctggttgtccttgcagctgtagtcactggagctgcggtcgctgctgtgctgtggaggaagaagagctcagattgaaaaggagggagctactctcaggctgcaagtaagtatgaaggaggctgatccctgagatccttgggatcttgtgtttgggagcccatgaaccctgacttctctttctgcagagaccagcccacccctgtgcccaccatgaccctcttcctcatgctgaactgcattccttccccaatcacctttcctgttccagaaaaggggctgggatgtctccgtctctgtctcaaatttgtggtgcactgagctataacttacttctgtattaaaattagaatctgagtataaatttagtttttcaaattatttccaagagagattgatgggttaattaaaggagaagattcctgaaatttgagagacaaaataaatggaagacatgagaacttt

SEQ ID NO: 150891 - DNA, 1578 bp, Homo sapiens
  Payload ID: 9765
  Gene Symbol: HLA-G
  Gene Name: major histocompatibility complex, class I, G
  Uniprot ID: P17693
  ENST ID: ENST00000546634
  CDS Start-End: 179-1195
agtgtggtactttgtcttgaggagatgtcctggactcacacggaaacttagggctacggaatgaagttctcactcccattaggtgacaggtttttagagaagccaatcagcgtcgccgcggtcctggttctaaagtcctcgctcacccacccggactcattctccccagacgccaaggatggtggtcatggcgccccgaaccctcttcctgctgctctcgggggccctgaccctgaccgagacctgggcgggctcccactccatgaggtatttcagcgccgccgtgtcccggcccggccgcggggagccccgcttcatcgccatgggctacgtggacgacacgcagttcgtgcggttcgacagcgactcggcgtgtccgaggatggagccgcgggcgccgtgggtggagcaggaggggccggagtattgggaagaggagacacggaacaccaaggcccacgcacagactgacagaatgaacctgcagaccctgcgcggctactacaaccagagcgaggccagttctcacaccctccagtggatgattggctgcgacctggggtccgacggacgcctcctccgcgggtatgaacagtatgcctacgatggcaaggattacctcgccctgaacgaggacctgcgctcctggaccgcagcggacactgcggctcagatctccaagcgcaagtgtgaggcggccaatgtggctgaacaaaggagagcctacctggagggcacgtgcgtggagtggctccacagatacctggagaacgggaaggagatgctgcagcgcgcggacccccccaagacacacgtgacccaccaccctgtctttgactatgaggccaccctgaggtgctgggccctgggcttctaccctgcggagatcatactgacctggcagcgggatggggaggaccagacccaggacgtggagctcgtggagaccaggcctgcaggggatggaaccttccagaagtgggcagctgtggtggtgccttctggagaggagcagagatacacgtgccatgtgcagcatgaggggctgccggagcccctcatgctgagatggaagcagtcttccctgcccaccatccccatcatgggtatcgttgctggcctggttgtccttgcagctgtagtcactggagctgcggtcgctgctgtgctgtggagaaagaagagctcagattgaaaaggagggagctactctcaggctgcaatgtgaaacagctgccctgtgtgggactgagtggcaagtccctttgtgacttcaagaaccctgacttctctttgtgcagagaccagcccacccctgtgcccaccatgaccctcttcctcatgctgaactgcattccttccccaatcacctttcctgttccagaaaaggggctgggatgtctccgtctctgtctcaaatttgtggtccactgagctataacttacttctgtattaaaattagaatctgagtgtaaatttactttttcaaattatttccaagagagattgatgggttaattaaaggagaagattcctgaaatttgagagacaaaataaatggaagacatgagaacttt

SEQ ID NO: 150892 - DNA, 1582 bp, Homo sapiens
  Payload ID: 9765
  Gene Symbol: HLA-G
  Gene Name: major histocompatibility complex, class I, G
  Uniprot ID: P17693
  ENST ID: ENST00000547241
  CDS Start-End: 179-1195
agtgtggtactttgtcttgaggagatgtcctggactcacacggaaacttagggctacggaatgaagttctcactcccattaggtgacaggtttttagagaagccaatcagcgtcgccgcggtcctggttctaaagtcctcgctcacccacccggactcattctccccagacgccaaggatggtggtcatggcaccccgaaccctcttcctgctactctcgggggccctgaccctgaccgagacctgggcgggctcccactccatgaggtatttcagcgccgccgtgtcccggcccggccgcggggagccccgcttcatcgccatgggctacgtggacgacacgcagttcgtgcggttcgacagcgactcggcttgtccgaggatggagccgcgggcgccgtgggtggagcaggaggggccagagtattgggaagaggagacacggaacaccaaggcccacgcacagactgacagaatgaacctgcagaccctgcgcggctactacaaccagagcgaggccagttctcataccctccagtggatgattggctgcgacctggggtccgacggacgcctcctccgcgggtatgaacagtatgcctacgatggcaaggattacctcgccctgaacgaggacctgcgctcctggaccgcagcggacactgcggctcagatctccaagcgcaagtgtgaggcggccaatgtggctgaacaaaggagagcctacctggagggcacgtgcgtggagtggctccacagatacctggagaacgggaaggagatgctgcagcgcgcggacccccccaagacacacgtgacccaccaccctgtctttgactatgaggccaccctgaggtgctgggccctgggcttctaccctgcggagatcatactgacctggcagcgggatggggaggaccagacccaggacgtggagctcgtggagaccaggcctgcaggggatggaaccttccagaagtgggcagctgtggtggtgccttctggagaggagcagagatacacgtgccatgtgcagcatgaggggctgccggagcccctcatgctgagatggaagcagtcttccctgcccaccatccccatcatgggtatcgttgctggcctggttgtccttgcagctgtagtcactggagctgcggtcgctgctgtgctgtggaggaagaagagctcagattgaaaaggagggagctactctcaggctgcaagtaagtatgaaggaggctgatccctgagatccttgggatcttgtgtttgggagcccatgaaccctgacttctctttctgcagagaccagcccacccctgtgcccaccatgaccctcttcctcatgctgaactgcattccttccccaatcacctttcctgttccagaaaaggggctgggatgtctccgtctctgtctcaaatttgtggtgcactgagctataacttacttctgtattaaaattagaatctgagtataaatttagtttttcaaattatttccaagagagattgatgggttaattaaaggagaagattcctgaaatttgagagacaaaataaatggaagacatgagaacttt

SEQ ID NO: 150893 - DNA, 1578 bp, Homo sapiens; identical to SEQ ID NO: 150891
  Payload ID: 9765
  Gene Symbol: HLA-G
  Gene Name: major histocompatibility complex, class I, G
  Uniprot ID: P17693
  ENST ID: ENST00000547931
  CDS Start-End: 179-1195

SEQ ID NO: 150894 - DNA, 1582 bp, Homo sapiens; identical to SEQ ID NO: 150890
  Payload ID: 9765
  Gene Symbol: HLA-G
  Gene Name: major histocompatibility complex, class I, G
  Uniprot ID: P17693
  ENST ID: ENST00000553052
  CDS Start-End: 179-1195

SEQ ID NO: 150895 - DNA, 1578 bp, Homo sapiens
  Payload ID: 9765
  Gene Symbol: HLA-G
  Gene Name: major histocompatibility complex, class I, G
  Uniprot ID: P17693
  ENST ID: ENST00000550897
  CDS Start-End: 179-1195
agtgtggtactttgtcttgaggagatgtcctggactcacacggaaacttagggctacggaatgaagttctcactcccattaggtgacaggtttttagagaagccaatcagcgtcgccgcggtcctggttctaaagtcctcgctcacccacccggactcattctccccagacgccaaggatggtggtcatggcgccccgaaccctcttcctgctgctctcgggggccctgaccctgaccgagacctgggcgggctcccactccatgaggtatttcagcgccgccgtgtcccggcccggccgcggggagccccgcttcatcgccatgggctacgtggacgacacgcagttcgtgcggttcgacagcgactcggcgtgtccgaggatggagccgcgggcgccgtgggtggagcaggaggggccggagtattgggaagaggagacacggaacaccaaggcccacgcacagactgacagaatgaacctgcagaccctgcgcggctactacaaccagagcgaggccagttctcacaccctccagtggatgattggctgcgacctggggtccgacggacgcctcctccgcgggtatgaacagtatgcctacgatggcaaggattacctcgccctgaacgaggacctgcgctcctggaccgcagcggacactgcggctcagatctccaagcgcaagtgtgaggcggccaatgtggctgaacaaaggagagcctacctggagggcacgtgcgtggagtggctccacagatacctggagaacgggaaggagatgctgcagcgcgcggacccccccaagacacacgtgacccaccaccctgtctttgactatgaggccaccctgaggtgctgggccctgggcttctaccctgcggagatcatactgacctggcagcgggatggggaggaccagacccaggacgtggagctcgtggagaccaggcctgcaggggatggaaccttccagaagtgggcagctgtggtggtgccttctggagaggagcagagatacacgtgccatgtgcagcatgaggggctgccggagcccctcatgctgagatggaagcagtcttccctgcccaccatccccatcatgggtatcgttgctggcctggttgtccttgcagctgtagtcactggagctgcggtcgctgctgtgctgtggagaaagaagagctcagattgaaaaggagggagctactctcaggctgcaatgtgaaacagctgccctgtgtgggactgagtggcaagtccctttgtgacttcaagaaccctgacttctctttgtgcagagaccagcccacccctgtgcccaccatgaccctcttcctcatgctgaactgcattccttccccaatcacctttcctgttccagaaaaggggctgggatgtctccgtctctgtctcaaatttgtggtccactgagctataacttacttctgtattaaaattagaatctgagtataaatttactttttcaaattatttccaagagagattgataggttaattaaaggagaagattcctgaaatttgagagacaaaataaatggaagacatgagaacttt

SEQ ID NO: 150896 - DNA, 1141 bp, Homo sapiens
  Payload ID: 9765
  Gene Symbol: HLA-G
  Gene Name: major histocompatibility complex, class I, G
  ENST ID: ENST00000612360
  CDS Start-End: 1-741
atggtggtcatggcaccccgaaccctcttcctgctactctcgggggccctgaccctgaccgagacctgggcgggctcccactccatgaggtatttcagcgccgccgtgtcccggcccggccgcggggagccccgcttcatcgccatgggctacgtggacgacacgcagttcgtgcggttcgacagcgactcggcgtgtccgaggatggagccgcgggcgccgtgggtggagcaggaggggccagagtattgggaagaggagacacggaacaccaaggcccacgcacagactgacagaatgaacctgcagaccctgcgcggctactacaaccagagcgaggccaacccccccaagacacacgtgacccaccaccctgtctttgactatgaggccaccctgaggtgctgggccctgggcttctaccctgcggagatcatactgacctggcagcgggatggggaggaccagacccaggacgtggagctcgtggagaccaggcctgcaggggatggaaccttccagaagtgggcagctgtggtggtgccttctggagaggagcagagatacatgtgccatgtgcagcatgaggggctgccggagcccctcatgctgagatggaagcagtcttccctgcccaccatccccatcatgggtatcgttgctggtctggttgtccttgcagctgtagtcactggagctgcggtcgctgctgtgctgtggaggaagaagagctcagattgaaaaggagggagctactctcaggctgcaatgtgaaacagctgccctgtgtgggactgagtggcaagatttgttcatgccttccctttgtgacttcaagaaccctgacttctctttctgcagagaccagcccacccctgtgcccaccatgaccctcttcctcatgctgaactgcattccttccccaatcacctttcctgttccagaaaaggggctgggatgtctccgtctctgtctcaaatttgtggtgcactgagctataacttacttctgtattaaaattagaatctgagtataaatttagtttttcaaattatttccaagagagattgatgggttaattaaaggagaagattcctgaaatttgagagacaaaataaatggaagacatgagaactttcca

SEQ ID NO: 150897 - DNA, 1582 bp, Homo sapiens
  Payload ID: 9765
  Gene Symbol: HLA-G
  Gene Name: major histocompatibility complex, class I, G
  ENST ID: ENST00000618812
  CDS Start-End: 179-1195
agtgtggtactttgtcttgaggagatgtcctggactcacacggaaacttagggctacggaatgaagttctcactcccattaggtgacaggtttttagagaagccaatcagcgtcgccgcggtcctggttctaaagtcctcgctcacccacccggactcattctccccagacgccaaggatggtggtcatggcaccccgaaccctcttcctgctactctcgggggccctgaccctgaccgagacctgggcgggctcccactccatgaggtatttcagcgccgccgtgtcccggcccggccgcggggagccccgcttcatcgccatgggctacgtggacgacacgcagttcgtgcggttcgacagcgactcggcgtgtccgaggatggagccgcgggcgccgtgggtggagcaggaggggccagagtattgggaagaggagacacggaacaccaaggcccacgcacagactgacagaatgaacctgcagaccctgcgcggctactacaaccagagcgaggccagttctcataccctccagtggatgattggctgcgacctggggtccgacggacgcctcctccgcgggtatgaacagtatgcctacgatggcaaggattacctcgccctgaacgaggacctgcgctcctggaccgcagcggacactgcggctcagatctccaagcgcaagtgtgaggcggccaatgtggctgaacaaaggagagcctacctggagggcacgtgcgtggagtggctccacagatacctggagaacgggaaggagatgctgcagcgcgcggacccccccaagacacacgtgacccaccaccctgtctttgactatgaggccaccctgaggtgctgggccctgggcttctaccctgcggagatcatactgacctggcagcgggatggggaggaccagacccaggacgtggagctcgtggagaccaggcctgcaggggatggaaccttccagaagtgggcagctgtggtggtgccttctggagaggagcagagatacatgtgccatgtgcagcatgaggggctgccggagcccctcatgctgagatggaagcagtcttccctgcccaccatccccatcatgggtatcgttgctggtctggttgtccttgcagctgtagtcactggagctgcggtcgctgctgtgctgtggaggaagaagagctcagattgaaaaggagggagctactctcaggctgcaagtaagtatgaaggaggctgatccctgagatccttgggatcttgtgtttgggagcccatgaaccctgacttctctttctgcagagaccagcccacccctgtgcccaccatgaccctcttcctcatgctgaactgcattccttccccaatcacctttcctgttccagaaaaggggctgggatgtctccgtctctgtctcaaatttgtggtgcactgagctataacttacttctgtattaaaattagaatctgagtataaatttagtttttcaaattatttccaagagagattgatgggttaattaaaggagaagattcctgaaatttgagagacaaaataaatggaagacatgagaacttt

SEQ ID NO: 150898 - DNA, 865 bp, Homo sapiens
  Payload ID: 9765
  Gene Symbol: HLA-G
  Gene Name: major histocompatibility complex, class I, G
  ENST ID: ENST00000622601
  CDS Start-End: 1-465
atggtggtcatggcaccccgaaccctcttcctgctactctcgggggccctgaccctgaccgagacctgggcgggctcccactccatgaggtatttcagcgccgccgtgtcccggcccggccgcggggagccccgcttcatcgccatgggctacgtggacgacacgcagttcgtgcggttcgacagcgactcggcgtgtccgaggatggagccgcgggcgccgtgggtggagcaggaggggccagagtattgggaagaggagacacggaacaccaaggcccacgcacagactgacagaatgaacctgcagaccctgcgcggctactacaaccagagcgaggccaagcagtcttccctgcccaccatccccatcatgggtatcgttgctggtctggttgtccttgcagctgtagtcactggagctgcggtcgctgctgtgctgtggaggaagaagagctcagattgaaaaggagggagctactctcaggctgcaatgtgaaacagctgccctgtgtgggactgagtggcaagatttgttcatgccttccctttgtgacttcaagaaccctgacttctctttctgcagagaccagcccacccctgtgcccaccatgaccctcttcctcatgctgaactgcattccttccccaatcacctttcctgttccagaaaaggggctgggatgtctccgtctctgtctcaaatttgtggtgcactgagctataacttacttctgtattaaaattagaatctgagtataaatttagtttttcaaattatttccaagagagattgatgggttaattaaaggagaagattcctgaaatttgagagacaaaataaatggaagacatgagaactttcca

SEQ ID NO: 150899 - DNA, 1441 bp, Homo sapiens
  Payload ID: 9765
  Gene Symbol: HLA-G
  Gene Name: major histocompatibility complex, class I, G
  ENST ID: ENST00000615098
  CDS Start-End: 25-1041
actcattctccccagacgccaaggatggtggtcatggcaccccgaaccctcttcctgctactctcgggggccctgaccctgaccgagacctgggcgggctcccactccatgaggtatttcagcgccgccgtgtcccggcccggccgcggggagccccgcttcatcgccatgggctacgtggacgacacgcagttcgtgcggttcgacagcgactcggcgtgtccgaggatggagccgcgggcgccgtgggtggagcaggaggggccagagtattgggaagaggagacacggaacaccaaggcccacgcacagactgacagaatgaacctgcagaccctgcgcggctactacaaccagagcgaggccagttctcataccctccagtggatgattggctgcgacctggggtccgacggacgcctcctccgcgggtatgaacagtatgcctacgatggcaaggattacctcgccctgaacgaggacctgcgctcctggaccgcagcggacactgcggctcagatctccaagcgcaagtgtgaggcggccaatgtggctgaacaaaggagagcctacctggagggcacgtgcgtggagtggctccacagatacctggagaacgggaaggagatgctgcagcgcgcggacccccccaagacacacgtgacccaccaccctgtctttgactatgaggccaccctgaggtgctgggccctgggcttctaccctgcggagatcatactgacctggcagcgggatggggaggaccagacccaggacgtggagctcgtggagaccaggcctgcaggggatggaaccttccagaagtgggcagctgtggtggtgccttctggagaggagcagagatacatgtgccatgtgcagcatgaggggctgccggagcccctcatgctgagatggaagcagtcttccctgcccaccatccccatcatgggtatcgttgctggtctggttgtccttgcagctgtagtcactggagctgcggtcgctgctgtgctgtggaggaagaagagctcagattgaaaaggagggagctactctcaggctgcaatgtgaaacagctgccctgtgtgggactgagtggcaagatttgttcatgccttccctttgtgacttcaagaaccctgacttctctttctgcagagaccagcccacccctgtgcccaccatgaccctcttcctcatgctgaactgcattccttccccaatcacctttcctgttccagaaaaggggctgggatgtctccgtctctgtctcaaatttgtggtgcactgagctataacttacttctgtattaaaattagaatctgagtataaatttagtttttcaaattatttccaagagagattgatgggttaattaaaggagaagattcctgaaatttgagagacaaaataaatggaagacatgagaactttcca

SEQ ID NO: 150900 - DNA, 1189 bp, Homo sapiens
  Payload ID: 9765
  Gene Symbol: HLA-G
  Gene Name: major histocompatibility complex, class I, G
  ENST ID: ENST00000618039
  CDS Start-End: 1-741
atggtggtcatggcaccccgaaccctcttcctgctactctcgggggccctgaccctgaccgagacctgggcgggctcccactccatgaggtatttcagcgccgccgtgtcccggcccggccgcggggagccccgcttcatcgccatgggctacgtggacgacacgcagttcgtgcggttcgacagcgactcggcgtgtccgaggatggagccgcgggcgccgtgggtggagcaggaggggccagagtattgggaagaggagacacggaacaccaaggcccacgcacagactgacagaatgaacctgcagaccctgcgcggctactacaaccagagcgaggccaacccccccaagacacacgtgacccaccaccctgtctttgactatgaggccaccctgaggtgctgggccctgggcttctaccctgcggagatcatactgacctggcagcgggatggggaggaccagacccaggacgtggagctcgtggagaccaggcctgcaggggatggaaccttccagaagtgggcagctgtggtggtgccttctggagaggagcagagatacatgtgccatgtgcagcatgaggggctgccggagcccctcatgctgagatggaagcagtcttccctgcccaccatccccatcatgggtatcgttgctggtctggttgtccttgcagctgtagtcactggagctgcggtcgctgctgtgctgtggaggaagaagagctcagattgaaaaggagggagctactctcaggctgcaagcagtgacagtgcccagggctctaatgtgtctctcacggcttgtaaattgtgaaacagctgccctgtgtgggactgagtggcaagatttgttcatgccttccctttgtgacttcaagaaccctgacttctctttctgcagagaccagcccacccctgtgcccaccatgaccctcttcctcatgctgaactgcattccttccccaatcacctttcctgttccagaaaaggggctgggatgtctccgtctctgtctcaaatttgtggtgcactgagctataacttacttctgtattaaaattagaatctgagtataaatttagtttttcaaattatttccaagagagattgatgggttaattaaaggagaagattcctgaaatttgagagacaaaataaatggaagacatgagaactttcca

SEQ ID NO: 150901 - DNA, 1504 bp, Homo sapiens
  Payload ID: 9765
  Gene Symbol: HLA-G
  Gene Name: major histocompatibility complex, class I, G
  ENST ID: ENST00000615464
  CDS Start-End: 73-1104
atatagtaacatagtgtggtactttgtcttgaggagatgtcctggactcacacggaaacttagggctacggaatgaagacgccaaggatggtggtcatggcaccccgaaccctcttcctgctactctcgggggccctgaccctgaccgagacctgggcgggctcccactccatgaggtatttcagcgccgccgtgtcccggcccggccgcggggagccccgcttcatcgccatgggctacgtggacgacacgcagttcgtgcggttcgacagcgactcggcgtgtccgaggatggagccgcgggcgccgtgggtggagcaggaggggccagagtattgggaagaggagacacggaacaccaaggcccacgcacagactgacagaatgaacctgcagaccctgcgcggctactacaaccagagcgaggccagttctcataccctccagtggatgattggctgcgacctggggtccgacggacgcctcctccgcgggtatgaacagtatgcctacgatggcaaggattacctcgccctgaacgaggacctgcgctcctggaccgcagcggacactgcggctcagatctccaagcgcaagtgtgaggcggccaatgtggctgaacaaaggagagcctacctggagggcacgtgcgtggagtggctccacagatacctggagaacgggaaggagatgctgcagcgcgcggacccccccaagacacacgtgacccaccaccctgtctttgactatgaggccaccctgaggtgctgggccctgggcttctaccctgcggagatcatactgacctggcagcgggatggggaggaccagacccaggacgtggagctcgtggagaccaggcctgcaggggatggaaccttccagaagtgggcagctgtggtggtgccttctggagaggagcagagatacatgtgccatgtgcagcatgaggggctgccggagcccctcatgctgagatggaagcagtcttccctgcccaccatccccatcatgggtatcgttgctggtctggttgtccttgcagctgtagtcactggagctgcggtcgctgctgtgctgtggaggaagaagagctcagattgaaaaggagggagctactctcaggctgcaatgtgaaacagctgccctgtgtgggactgagtggcaagatttgttcatgccttccctttgtgacttcaagaaccctgacttctctttctgcagagaccagcccacccctgtgcccaccatgaccctcttcctcatgctgaactgcattccttccccaatcacctttcctgttccagaaaaggggctgggatgtctccgtctctgtctcaaatttgtggtgcactgagctataacttacttctgtattaaaattagaatctgagtataaatttagtttttcaaattatttccaagagagattgatgggttaattaaaggagaagattcctgaaatttgagagacaaaataaatggaagacatgagaactttcca

SEQ ID NO: 150902 - DNA, 1123 bp, Homo sapiens
  Payload ID: 9766
  Gene Symbol: HLA-DMA
  Gene Name: major histocompatibility complex, class II, DM alpha
  Uniprot ID: P28067
  ENST ID: ENST00000374843
  CDS Start-End: 87-872
gatctaaggccaccctctcggggagggagttggggaagctgggttggctgggttggtagctcctacctactgtgtggcaagaaggtatgggtcatgaacagaaccaaggagctgcgctgctacagatgttaccacttctgtggctgctaccccactcctgggccgtccctgaagctcctactccaatgtggccagatgacctgcaaaaccacacattcctgcacacagtgtactgccaggatgggagtcccagtgtgggactctctgaggcctacgacgaggaccagcttttcttcttcgacttttcccagaacactcgggtgcctcgcctgcccgaatttgctgactgggctcaggaacagggagatgctcctgccattttatttgacaaagagttctgcgagtggatgatccagcaaatagggccaaaacttgatgggaaaatcccggtgtccagagggtttcctatcgctgaagtgttcacgctgaagcccctggagtttggcaagcccaacactttggtctgttttgtcagtaatctcttcccacccatgctgacagtgaactggcagcatcattccgtccctgtggaaggatttgggcctacttttgtctcagctgtcgatggactcagcttccaggccttttcttacttaaacttcacaccagaaccttctgacattttctcctgcattgtgactcacgaaattgaccgctacacagcaattgcctattgggtaccccggaacgcactgccctcagatctgctggagaatgtgctgtgtggcgtggcctttggcctgggtgtgctgggcatcatcgtgggcattgttctcatcatctacttccggaagccttgctcaggtgactgattcttccagaccagagtttgatgccagcagcttcggccatccaaacagaggatgctcagatttctcacatcctgcccaggatctcctcttagggtagaagtctctgggacatccctggggtgtgtgtgtagatttcccacctggggactctgctgtccctgggcttgcatcccagggatcccagagtggcctgcctatcacaaccacatcccttccccccacaaggcaataaatctcatttctttatatca

SEQ ID NO: 150903 - DNA, 1010 bp, Homo sapiens
  Payload ID: 9766
  Gene Symbol: HLA-DMA
  Gene Name: major histocompatibility complex, class II, DM alpha
  ENST ID: ENST00000383227
  CDS Start-End: 73-756
ctctcggggagggagttggggaagctgggttggctgggttggtagctcctacctactgtgtggcaagaaggtatgggtcatgaacagaaccaaggagctgcgctgctacagatgttaccacttctgtggctgctaccccactcctgggccgtccctgaagctcctactccaatgtggccagatgacctgcaaaaccacacattcctgcacacagtgtactgccaggatgggagtcccagtgtgggactctctgaggcctacgacgaggaccagcttttcttcttcgacttttcccagaacactcgggtgcctcgcctgcccgaatttgctgactgggctcaggaacagggagatgctcctgccattttatttgacaaagagttctgcgagtggatgatccagcaaatagggccaaaacttgatgggaaaatcccggtgtccagagtgaactggcagcatcattccgtccctgtggaaggatttgggcctacttttgtctcagctgtcgatggactcagcttccaggccttttcttacttaaacttcacaccagaaccttctgacattttctcctgcattgtgactcacgaaattgaccgctacacagcaattgcctattgggtaccccggaacgcactgccctcagatctgctggagaatgtgctgtgtggcgtggcctttggcctgggtgtgctgggcatcatcgtgggcattgttctcatcatctacttccggaagccttgctcaggtgactgattcttccagaccagagtttgatgccagcagcttcggccatccaaacagaggatgctcagatttctcacatcctgcccaggatctcctcttagggtagaagaagtctctgggacatccctggggtgtgtgtgtagatttcccacctggggactctgctgtccctgggcttgcatcccagggatcccagagtggcctgcctatcacaaccacatcccttccccccacaaggcaataaatctcatttctttatatca

SEQ ID NO: 150904 - DNA, 780 bp, Homo sapiens
  Payload ID: 9766
  Gene Symbol: HLA-DMA
  Gene Name: major histocompatibility complex, class II, DM alpha
  ENST ID: ENST00000383228
  CDS Start-End: 26-526
cctacctactgtgtggcaagaaggtatgggtcatgaacagaaccaaggagctgcgctgctacagatgttaccacttctgtggctgctaccccactcctgggccgtccctgaagggtttcctatcgctgaagtgttcacgctgaagcccctggagtttggcaagcccaacactttggtctgttttgtcagtaatctcttcccacccatgctgacagtgaactggcagcatcattccgtccctgtggaaggatttgggcctacttttgtctcagctgtcgatggactcagcttccaggccttttcttacttaaacttcacaccagaaccttctgacattttctcctgcattgtgactcacgaaattgaccgctacacagcaattgcctattgggtaccccggaacgcactgccctcagatctgctggagaatgtgctgtgtggcgtggcctttggcctgggtgtgctgggcatcatcgtgggcattgttctcatcatctacttccggaagccttgctcaggtgactgattcttccagaccagagtttgatgccagcagcttcggccatccaaacagaggatgctcagatttctcacatcctgcccaggatctcctcttagggtagaagaagtctctgggacatccctggggtgtgtgtgtagatttcccacctggggactctgctgtccctgggcttgcatcccagggatcccagagtggcctgcctatcacaaccacatcccttccccccacaaggcaataaatctcatttctttatatca

SEQ ID NO: 150905 - DNA, 1126 bp, Homo sapiens
  Payload ID: 9766
  Gene Symbol: HLA-DMA
  Gene Name: major histocompatibility complex, class II, DM alpha
  Uniprot ID: P28067
  ENST ID: ENST00000383230
  CDS Start-End: 87-872
gatctaaggccaccctctcggggagggagttggggaagctgggttggctgggttggtagctcctacctactgtgtggcaagaaggtatgggtcatgaacagaaccaaggagctgcgctgctacagatgttaccacttctgtggctgctaccccactcctgggccgtccctgaagctcctactccaatgtggccagatgacctgcaaaaccacacattcctgcacacagtgtactgccaggatgggagtcccagtgtgggactctctgaggcctacgacgaggaccagcttttcttcttcgacttttcccagaacactcgggtgcctcgcctgcccgaatttgctgactgggctcaggaacagggagatgctcctgccattttatttgacaaagagttctgcgagtggatgatccagcaaatagggccaaaacttgatgggaaaatcccggtgtccagagggtttcctatcgctgaagtgttcacgctgaagcccctggagtttggcaagcccaacactttggtctgttttgtcagtaatctcttcccacccatgctgacagtgaactggcagcatcattccgtccctgtggaaggatttgggcctacttttgtctcagctgtcgatggactcagcttccaggccttttcttacttaaacttcacaccagaaccttctgacattttctcctgcattgtgactcacgaaattgaccgctacacagcaattgcctattgggtaccccggaacgcactgccctcagatctgctggagaatgtgctgtgtggcgtggcctttggcctgggtgtgctgggcatcatcgtgggcattgttctcatcatctacttccggaagccttgctcaggtgactgattcttccagaccagagtttgatgccagcagcttcggccatccaaacagaggatgctcagatttctcacatcctgcccaggatctcctcttagggtagaagaagtctctgggacatccctggggtgtgtgtgtagatttcccacctggggactctgctgtccctgggcttgcatcccagggatcccagagtggcctgcctatcacaaccacatcccttccccccacaaggcaataaatctcatttctttatatca

SEQ ID NO: 150906 - DNA, 1007 bp, Homo sapiens
  Payload ID: 9766
  Gene Symbol: HLA-DMA
  Gene Name: major histocompatibility complex, class II, DM alpha
  ENST ID: ENST00000395303
  CDS Start-End: 73-756
ctctcggggagggagttggggaagctgggttggctgggttggtagctcctacctactgtgtggcaagaaggtatgggtcatgaacagaaccaaggagctgcgctgctacagatgttaccacttctgtggctgctaccccactcctgggccgtccctgaagctcctactccaatgtggccagatgacctgcaaaaccacacattcctgcacacagtgtactgccaggatgggagtcccagtgtgggactctctgaggcctacgacgaggaccagcttttcttcttcgacttttcccagaacactcgggtgcctcgcctgcccgaatttgctgactgggctcaggaacagggagatgctcctgccattttatttgacaaagagttctgcgagtggatgatccagcaaatagggccaaaacttgatgggaaaatcccggtgtccagagtgaactggcagcatcattccgtccctgtggaaggatttgggcctacttttgtctcagctgtcgatggactcagcttccaggccttttcttacttaaacttcacaccagaaccttctgacattttctcctgcattgtgactcacgaaattgaccgctacacagcaattgcctattgggtaccccggaacgcactgccctcagatctgctggagaatgtgctgtgtggcgtggcctttggcctgggtgtgctgggcatcatcgtgggcattgttctcatcatctacttccggaagccttgctcaggtgactgattcttccagaccagagtttgatgccagcagcttcggccatccaaacagaggatgctcagatttctcacatcctgcccaggatctcctcttagggtagaagtctctgggacatccctggggtgtgtgtgtagatttcccacctggggactctgctgtccctgggcttgcatcccagggatcccagagtggcctgcctatcacaaccacatcccttccccccacaaggcaataaatctcatttctttatatca

SEQ ID NO: 150907 - DNA, 777 bp, Homo sapiens
  Payload ID: 9766
  Gene Symbol: HLA-DMA
  Gene Name: major histocompatibility complex, class II, DM alpha
  ENST ID: ENST00000395305
  CDS Start-End: 26-526
cctacctactgtgtggcaagaaggtatgggtcatgaacagaaccaaggagctgcgctgctacagatgttaccacttctgtggctgctaccccactcctgggccgtccctgaagggtttcctatcgctgaagtgttcacgctgaagcccctggagtttggcaagcccaacactttggtctgttttgtcagtaatctcttcccacccatgctgacagtgaactggcagcatcattccgtccctgtggaaggatttgggcctacttttgtctcagctgtcgatggactcagcttccaggccttttcttacttaaacttcacaccagaaccttctgacattttctcctgcattgtgactcacgaaattgaccgctacacagcaattgcctattgggtaccccggaacgcactgccctcagatctgctggagaatgtgctgtgtggcgtggcctttggcctgggtgtgctgggcatcatcgtgggcattgttctcatcatctacttccggaagccttgctcaggtgactgattcttccagaccagagtttgatgccagcagcttcggccatccaaacagaggatgctcagatttctcacatcctgcccaggatctcctcttagggtagaagtctctgggacatccctggggtgtgtgtgtagatttcccacctggggactctgctgtccctgggcttgcatcccagggatcccagagtggcctgcctatcacaaccacatcccttccccccacaaggcaataaatctcatttctttatatca

SEQ ID NO: 150908 - DNA, 1010 bp, Homo sapiens; identical to SEQ ID NO: 150903
  Payload ID: 9766
  Gene Symbol: HLA-DMA
  Gene Name: major histocompatibility complex, class II, DM alpha
  ENST ID: ENST00000432991
  CDS Start-End: 73-756

SEQ ID NO: 150909 - DNA, 780 bp, Homo sapiens; identical to SEQ ID NO: 150904
  Payload ID: 9766
  Gene Symbol: HLA-DMA
  Gene Name: major histocompatibility complex, class II, DM alpha
  ENST ID: ENST00000435503
  CDS Start-End: 26-526

SEQ ID NO: 150910 - DNA, 1126 bp, Homo sapiens; identical to SEQ ID NO: 150905
  Payload ID: 9766
  Gene Symbol: HLA-DMA
  Gene Name: major histocompatibility complex, class II, DM alpha
  Uniprot ID: P28067
  ENST ID: ENST00000450601
  CDS Start-End: 87-872

SEQ ID NO: 150911 - DNA, 1010 bp, Homo sapiens; identical to SEQ ID NO: 150903
  Payload ID: 9766
  Gene Symbol: HLA-DMA
  Gene Name: major histocompatibility complex, class II, DM alpha
  ENST ID: ENST00000419041
  CDS Start-End: 73-756

SEQ ID NO: 150912 - DNA, 611 bp, Homo sapiens
  Payload ID: 9766
  Gene Symbol: HLA-DMA
  Gene Name: major histocompatibility complex, class II, DM alpha
  ENST ID: ENST00000426176
  CDS Start-End: 105-611
ttgactgacatctccgccccacaagggccccttctcacctggatcctaaagccttccagggggcctccaaagttgccctcggcttggtacgggctcctactccaatgtggccagatgacctgcaaaaccacacattcctgcacacagtgtactgccaggatgggagtcccagtgtgggactctctgaggcctacgacgaggaccagcttttcttcttcgacttttcccagaacactcgggtgcctcgcctgcccgaatttgctgactgggctcaggaacagggagatgctcctgccattttatttgacaaagagttctgcgagtggatgatccagcaaatagggccaaaacttgatgggaaaatcccggtgtccagagggtttcctatcgctgaagtgttcacgctgaagcccctggagtttggcaagcccaacactttggtctgttttgtcagtaatctcttcccacccatgctgacagtgaactggcagcatcattccgtccctgtggaaggatttgggcctacttttgtctcagctgtcgatggactcagcttccaggccttttcttacttaaacttcacaccagaaccttctgacattttctcctgc

SEQ ID NO: 150913 - DNA, 1126 bp, Homo sapiens; identical to SEQ ID NO: 150905
  Payload ID: 9766
  Gene Symbol: HLA-DMA
  Gene Name: major histocompatibility complex, class II, DM alpha
  Uniprot ID: P28067
  ENST ID: ENST00000452615
  CDS Start-End: 87-872

SEQ ID NO: 150914 - DNA, 611 bp, Homo sapiens; identical to SEQ ID NO: 150912
  Payload ID: 9766
  Gene Symbol: HLA-DMA
  Gene Name: major histocompatibility complex, class II, DM alpha
  ENST ID: ENST00000418042
  CDS Start-End: 105-611

SEQ ID NO: 150915 - DNA, 611 bp, Homo sapiens; identical to SEQ ID NO: 150912
  Payload ID: 9766
  Gene Symbol: HLA-DMA
  Gene Name: major histocompatibility complex, class II, DM alpha
  ENST ID: ENST00000416297
  CDS Start-End: 105-611

SEQ ID NO: 150916 - DNA, 1010 bp, Homo sapiens; identical to SEQ ID NO: 150903
  Payload ID: 9766
  Gene Symbol: HLA-DMA
  Gene Name: major histocompatibility complex, class II, DM alpha
  ENST ID: ENST00000452330
  CDS Start-End: 73-756

SEQ ID NO: 150917 - DNA, 773 bp, Homo sapiens
  Payload ID: 9766
  Gene Symbol: HLA-DMA
  Gene Name: major histocompatibility complex, class II, DM alpha
  ENST ID: ENST00000443447
  CDS Start-End: 26-526
cctacctactgtgtggcaagaaggtatgggtcatgaacagaaccaaggagctgcgctgctacagatgttaccacttctgtggctgctaccccactcctgggccgtccctgaagggtttcctatcgctgaagtgttcacgctgaagcccctggagtttggcaagcccaacactttggtctgttttgtcagtaatctcttcccacccatgctgacagtgaactggcagcatcattccatccctgtggaaggatttgggcctacttttgtctcagctgtcgatggactcagcttccaggccttttcttacttaaacttcacaccagaaccttctgacattttctcctgcattgtgactcacgaaattgaccgctacacagcaattgcctattgggtaccccggaacgcactgccctcagatctgctggagaatgtgctgtgtggcgtggcctttggcctgggtgtgctgggcatcatcgtgggcattgttctcatcatctacttccggaagccttgctcaggtgactgattcttccagaccagagtttgatgccagcagcttcggccatccaaacagaggatgctcagatttctcacatcctgcccaggatctcctcttagggtagaagaagtctctgggacatccctggggtgtgtgtgtagatttcccacctggggactctgctgtccctgggcttgcatcccagggatcccagagtggcctgcctatcacaaccacatcccttccccccacaaggcaataaatctcatttctt

SEQ ID NO: 150918 - DNA, 780 bp, Homo sapiens; identical to SEQ ID NO: 150904
  Payload ID: 9766
  Gene Symbol: HLA-DMA
  Gene Name: major histocompatibility complex, class II, DM alpha
  ENST ID: ENST00000457285
  CDS Start-End: 26-526

SEQ ID NO: 150919 - DNA, 518 bp, Homo sapiens
  Payload ID: 9766
  Gene Symbol: HLA-DMA
  Gene Name: major histocompatibility complex, class II, DM alpha
  ENST ID: ENST00000437285
  CDS Start-End: 12-518
ctcctactccaatgtggccagatgacctgcaaaaccacacattcctgcacacagtgtactgccaggatgggagtcccagtgtgggactctctgaggcctacgacgaggaccagcttttcttcttcgacttttcccagaacactcgggtgcctcgcctgcccgaatttgctgactgggctcaggaacagggagatgctcctgccattttatttgacaaagagttctgcgagtggatgatccagcaaatagggccaaaacttgatgggaaaatcccggtgtccagagggtttcctatcgctgaagtgttcacgctgaagcccctggagtttggcaagcccaacactttggtctgttttgtcagtaatctcttcccacccatgctgacagtgaactggcagcatcattccgtccctgtggaaggatttgggcctacttttgtctcagctgtcgatggactcagcttccaggccttttcttacttaaacttcacaccagaaccttctgacattttctcctgc

SEQ ID NO: 150920 - DNA, 518 bp, Homo sapiens
  Payload ID: 9766
  Gene Symbol: HLA-DMA
  Gene Name: major histocompatibility complex, class II, DM alpha
  ENST ID: ENST00000441171
  CDS Start-End: 12-518
ctcctactccaatgtggccagatgacctgcaaaaccacacattcctgcacacagtgtactgccaggatgggagtcccagtgtgggactctctgaggcctacgacgaggaccagcttttcttcttcgacttttcccagaacactcgggtgcctcgcctgcccgaatttgctgactgggctcaggaacagggagatgctcctgccattttatttgacaaagagttctgcgagtggatgatccagcaaatagggccaaaacttgatgggaaaatcccggtgtccagagggtttcctatcgctgaagtgttcacgctgaagcccctggagtttggcaagcccaacactttggtctgttttgtcagtaatctcttcccacccatgctgacagtgaactggcagcatcattccatccctgtggaaggatttgggcctacttttgtctcagctgtcgatggactcagcttccaggccttttcttacttaaacttcacaccagaaccttctgacattttctcctgc

SEQ ID NO: 150921 - DNA, 1003 bp, Homo sapiens
  Payload ID: 9766
  Gene Symbol: HLA-DMA
  Gene Name: major histocompatibility complex, class II, DM alpha
  ENST ID: ENST00000420931
  CDS Start-End: 73-756
ctctcggggagggagttggggaagctgggttggctgggttggtagctcctacctactgtgtggcaagaaggtatgggtcatgaacagaaccaaggagctgcgctgctacagatgttaccacttctgtggctgctaccccactcctgggccgtccctgaagctcctactccaatgtggccagatgacctgcaaaaccacacattcctgcacacagtgtactgccaggatgggagtcccagtgtgggactctctgaggcctacgacgaggaccagcttttcttcttcgacttttcccagaacactcgggtgcctcgcctgcccgaatttgctgactgggctcaggaacagggagatgctcctgccattttatttgacaaagagttctgcgagtggatgatccagcaaatagggccaaaacttgatgggaaaatcccggtgtccagagtgaactggcagcatcattccatccctgtggaaggatttgggcctacttttgtctcagctgtcgatggactcagcttccaggccttttcttacttaaacttcacaccagaaccttctgacattttctcctgcattgtgactcacgaaattgaccgctacacagcaattgcctattgggtaccccggaacgcactgccctcagatctgctggagaatgtgctgtgtggcgtggcctttggcctgggtgtgctgggcatcatcgtgggcattgttctcatcatctacttccggaagccttgctcaggtgactgattcttccagaccagagtttgatgccagcagcttcggccatccaaacagaggatgctcagatttctcacatcctgcccaggatctcctcttagggtagaagaagtctctgggacatccctggggtgtgtgtgtagatttcccacctggggactctgctgtccctgggcttgcatcccagggatcccagagtggcctgcctatcacaaccacatcccttccccccacaaggcaataaatctcatttctt

SEQ ID NO: 150922 - DNA, 611 bp, Homo sapiens; identical to SEQ ID NO: 150912
  Payload ID: 9766
  Gene Symbol: HLA-DMA
  Gene Name: major histocompatibility complex, class II, DM alpha
  ENST ID: ENST00000422832
  CDS Start-End: 105-611

SEQ ID NO: 150923 - DNA, 1119 bp, Homo sapiens
  Payload ID: 9766
  Gene Symbol: HLA-DMA
  Gene Name: major histocompatibility complex, class II, DM alpha
  ENST ID: ENST00000439054
  CDS Start-End: 87-872
gatctaaggccaccctctcggggagggagttggggaagctgggttggctgggttggtagctcctacctactgtgtggcaagaaggtatgggtcatgaacagaaccaaggagctgcgctgctacagatgttaccacttctgtggctgctaccccactcctgggccgtccctgaagctcctactccaatgtggccagatgacctgcaaaaccacacattcctgcacacagtgtactgccaggatgggagtcccagtgtgggactctctgaggcctacgacgaggaccagcttttcttcttcgacttttcccagaacactcgggtgcctcgcctgcccgaatttgctgactgggctcaggaacagggagatgctcctgccattttatttgacaaagagttctgcgagtggatgatccagcaaatagggccaaaacttgatgggaaaatcccggtgtccagagggtttcctatcgctgaagtgttcacgctgaagcccctggagtttggcaagcccaacactttggtctgttttgtcagtaatctcttcccacccatgctgacagtgaactggcagcatcattccatccctgtggaaggatttgggcctacttttgtctcagctgtcgatggactcagcttccaggccttttcttacttaaacttcacaccagaaccttctgacattttctcctgcattgtgactcacgaaattgaccgctacacagcaattgcctattgggtaccccggaacgcactgccctcagatctgctggagaatgtgctgtgtggcgtggcctttggcctgggtgtgctgggcatcatcgtgggcattgttctcatcatctacttccggaagccttgctcaggtgactgattcttccagaccagagtttgatgccagcagcttcggccatccaaacagaggatgctcagatttctcacatcctgcccaggatctcctcttagggtagaagaagtctctgggacatccctggggtgtgtgtgtagatttcccacctggggactctgctgtccctgggcttgcatcccagggatcccagagtggcctgcctatcacaaccacatcccttccccccacaaggcaataaatctcatttctt

SEQ ID NO: 150924 - DNA, 1126 bp, Homo sapiens; identical to SEQ ID NO: 150905
  Payload ID: 9766
  Gene Symbol: HLA-DMA
  Gene Name: major histocompatibility complex, class II, DM alpha
  Uniprot ID: P28067
  ENST ID: ENST00000453490
  CDS Start-End: 87-872

SEQ ID NO: 150925 - DNA, 780 bp, Homo sapiens; identical to SEQ ID NO: 150904
  Payload ID: 9766
  Gene Symbol: HLA-DMA
  Gene Name: major histocompatibility complex, class II, DM alpha
  ENST ID: ENST00000452703
  CDS Start-End: 26-526

SEQ ID NO: 150926 - DNA, 871 bp, Homo sapiens
  Payload ID: 9766
  Gene Symbol: HLA-DMA
  Gene Name: major histocompatibility complex, class II, DM alpha
  ENST ID: ENST00000416806
  CDS Start-End: 1-871
gtttcctgctggctgagcgattcctgccaagagcttcaaagaagagggattattttatgcagttatggggtcacttctcccattgctgtctttgggaggcctggtaggttaaggaacagaagacattttgagagacgcttggtgccaatgaagtggctgaagaaatgtctggatacagctcctactccaatgtggccagatgacctgcaaaaccacacattcctgcacacagtgtactgccaggatgggagtcccagtgtgggactctctgaggcctacgacgaggaccagcttttcttcttcgacttttcccagaacactcgggtgcctcgcctgcccgaatttgctgactgggctcaggaacagggagatgctcctgccattttatttgacaaagagttctgcgagtggatgatccagcaaatagggccaaaacttgatgggaaaatcccggtgtccagagggtttcctatcgctgaagtgttcacgctgaagcccctggagtttggcaagcccaacactttggtctgttttgtcagtaatctcttcccacccatgctgacagtgaactggcagcatcattccgtccctgtggaaggatttgggcctacttttgtctcagctgtcgatggactcagcttccaggccttttcttacttaaacttcacaccagaaccttctgacattttctcctgcattgtgactcacgaaattgaccgctacacagcaattgcctattgggtaccccggaacgcactgccctcagatctgctggagaatgtgctgtgtggcgtggcctttggcctgggtgtgctgggcatcatcgtgggcattgttctcatcatctacttccggaagccttgctcaggtg

SEQ ID NO: 150927 - DNA, 1126 bp, Homo sapiens; identical to SEQ ID NO: 150905
  Payload ID: 9766
  Gene Symbol: HLA-DMA
  Gene Name: major histocompatibility complex, class II, DM alpha
  Uniprot ID: P28067
  ENST ID: ENST00000434337
  CDS Start-End: 87-872

SEQ ID NO: 150928 - DNA, 611 bp, Homo sapiens; identical to SEQ ID NO: 150912
  Payload ID: 9766
  Gene Symbol: HLA-DMA
  Gene Name: major histocompatibility complex, class II, DM alpha
  ENST ID: ENST00000419231
  CDS Start-End: 105-611

SEQ ID NO: 150929 - DNA, 611 bp, Homo sapiens; identical to SEQ ID NO: 150912
  Payload ID: 9766
  Gene Symbol: HLA-DMA
  Gene Name: major histocompatibility complex, class II, DM alpha
  ENST ID: ENST00000458066
  CDS Start-End: 105-611

SEQ ID NO: 150930 - DNA, 871 bp, Homo sapiens
  Payload ID: 9766
  Gene Symbol: HLA-DMA
  Gene Name: major histocompatibility complex, class II, DM alpha
  ENST ID: ENST00000456486
  CDS Start-End: 1-871
gtttcctgctggctgagcgattcctgccaagagcttcaaagaagagggattattttatgcagttatggggtcacttctcccattgctgtctttgggaggcctggtaggttaaggaacagaagacattttgagagacgcttggtgccaatgaagtggctgaagaaatgtctggatacagctcctactccaatgtggccagatgacctgcaaaaccacacattcctgcacacagtgtactgccaggatgggagtcccagtgtgggactctctgaggcctacgacgaggaccagcttttcttcttcgacttttcccagaacactcgggtgcctcgcctgcccgaatttgctgactgggctcaggaacagggagatgctcctgccattttatttgacaaagagttctgcgagtggatgatccagcaaatagggccaaaacttgatgggaaaatcccggtgtccagagggtttcctatcgctgaagtgttcacgctgaagcccctggagtttggcaagcccaacactttggtctgttttgtcagtaatctcttcccacccatgctgacagtgaactggcagcatcattccatccctgtggaaggatttgggcctacttttgtctcagctgtcgatggactcagcttccaggccttttcttacttaaacttcacaccagaaccttctgacattttctcctgcattgtgactcacgaaattgaccgctacacagcaattgcctattgggtaccccggaacgcactgccctcagatctgctggagaatgtgctgtgtggcgtggcctttggcctgggtgtgctgggcatcatcgtgggcattgttctcatcatctacttccggaagccttgctcaggtg

SEQ ID NO: 150931 - DNA, 871 bp, Homo sapiens; identical to SEQ ID NO: 150926
  Payload ID: 9766
  Gene Symbol: HLA-DMA
  Gene Name: major histocompatibility complex, class II, DM alpha
  ENST ID: ENST00000422196
  CDS Start-End: 1-871

SEQ ID NO: 150932 - DNA, 871 bp, Homo sapiens; identical to SEQ ID NO: 150926
  Payload ID: 9766
  Gene Symbol: HLA-DMA
  Gene Name: major histocompatibility complex, class II, DM alpha
  ENST ID: ENST00000456800
  CDS Start-End: 1-871

SEQ ID NO: 150933 - DNA, 780 bp, Homo sapiens; identical to SEQ ID NO: 150904
  Payload ID: 9766
  Gene Symbol: HLA-DMA
  Gene Name: major histocompatibility complex, class II, DM alpha
  ENST ID: ENST00000451753
  CDS Start-End: 26-526

SEQ ID NO: 150934 - DNA, 1126 bp, Homo sapiens; identical to SEQ ID NO: 150905
  Payload ID: 9766
  Gene Symbol: HLA-DMA
  Gene Name: major histocompatibility complex, class II, DM alpha
  Uniprot ID: P28067
  ENST ID: ENST00000441375
  CDS Start-End: 87-872

SEQ ID NO: 150935 - DNA, 871 bp, Homo sapiens; identical to SEQ ID NO: 150926
  Payload ID: 9766
  Gene Symbol: HLA-DMA
  Gene Name: major histocompatibility complex, class II, DM alpha
  ENST ID: ENST00000433630
  CDS Start-End: 1-871

SEQ ID NO: 150936 - DNA, 1010 bp, Homo sapiens; identical to SEQ ID NO: 150903
  Payload ID: 9766
  Gene Symbol: HLA-DMA
  Gene Name: major histocompatibility complex, class II, DM alpha
  ENST ID: ENST00000452434
  CDS Start-End: 73-756

SEQ ID NO: 150937 - DNA, 871 bp, Homo sapiens; identical to SEQ ID NO: 150926
  Payload ID: 9766
  Gene Symbol: HLA-DMA
  Gene Name: major histocompatibility complex, class II, DM alpha
  ENST ID: ENST00000412394
  CDS Start-End: 148-871

SEQ ID NO: 150938 - DNA, 1010 bp, Homo sapiens; identical to SEQ ID NO: 150903
  Payload ID: 9766
  Gene Symbol: HLA-DMA
  Gene Name: major histocompatibility complex, class II, DM alpha
  ENST ID: ENST00000451148
  CDS Start-End: 73-756

SEQ ID NO: 150939 - DNA, 871 bp, Homo sapiens; identical to SEQ ID NO: 150926
  Payload ID: 9766
  Gene Symbol: HLA-DMA
  Gene Name: major histocompatibility complex, class II, DM alpha
  ENST ID: ENST00000454298
  CDS Start-End: 1-871

SEQ ID NO: 150940 - DNA, 780 bp, Homo sapiens; identical to SEQ ID NO: 150904
  Payload ID: 9766
  Gene Symbol: HLA-DMA
  Gene Name: major histocompatibility complex, class II, DM alpha
  ENST ID: ENST00000420299
  CDS Start-End: 26-526

SEQ ID NO: 150941 - DNA, 871 bp, Homo sapiens; identical to SEQ ID NO: 150926
  Payload ID: 9766
  Gene Symbol: HLA-DMA
  Gene Name: major histocompatibility complex, class II, DM alpha
  ENST ID: ENST00000440717
  CDS Start-End: 1-871

SEQ ID NO: 150942 - DNA, 1397 bp, Homo sapiens
  Payload ID: 9767
  Gene Symbol: HLA-DMB
  Gene Name: major histocompatibility complex, class II, DM beta
  Uniprot ID: P28068
  ENST ID: ENST00000383231
  CDS Start-End: 264-1055
atttgtccctgcctacctagccaatctgtccctgtttgggacactggactcccgtgagctggaaggaacagatttaatatctaggggctgggtatccccacatcactcatttggggggtcaagggacccgggcaatatagtattctgctcagtgtctggagatcatctacccaggctggggcttctgggacaggcgaggacccacggaccctggaagagctggtccaggggactgaactcccggcatctttacagagcagagcatgatcacattcctgccgctgctgctggggctcagcctgggctgcacaggagcaggtggcttcgtggcccatgtggaaagcacctgtctgttggatgatgctgggactccaaaggatttcacatactgcatctccttcaacaaggatctgctgacctgctgggatccagaggagaataagatggccccttgcgaatttggggtgctgaatagcttggcgaatgtcctctcacagcacctcaaccaaaaagacaccctgatgcagcgcttgcgcaatgggcttcagaattgtgccacacacacccagcccttctggggatcactgaccaacaggacacggccaccatctgtgcaagtagccaaaaccactccttttaacacgagggagcctgtgatgctggcctgctatgtgtggggcttctatccagcagaagtgactatcacgtggaggaagaacgggaagcttgtcatgcctcacagcagtgcgcacaagactgcccagcccaatggagactggacataccagaccctctcccatttagccttaaccccctcttacggggacacttacacctgtgtggtagagcacattggggctcctgagcccatccttcgggactggacacctgggctgtcccccatgcagaccctgaaggtttctgtgtctgcagtgactctgggcctgggcctcatcatcttctctcttggtgtgatcagctggcggagagctggccactctagttacactcctcttcctgggtccaattattcagaaggatggcacatttcctagaggcagaatcctacaacttccactccaagtgagaaggagattcaaactcaatgatgctaccatgcctctccaacatcttcaaccccctgacattatcttggatcctatggtttctccatccaattctttgaatttcccagtctcccctatgtaaaacttagcaacttgggggacctcattcctgggactatgctgtaaccaaattattgtccaaggctatatttctgggatgaatataatctgaggaagggagttaaagaccctcctggggctctcagtgtgccatagaggacagcaactggtgattgtttcagagaaataaactttggtggaaatattgtt

SEQ ID NO: 150943 - DNA, 1397 bp, Homo sapiens
  Payload ID: 9767
  Gene Symbol: HLA-DMB
  Gene Name: major histocompatibility complex, class II, DM beta
  Uniprot ID: P28068
  ENST ID: ENST00000395312
  CDS Start-End: 264-1055
atttgtccctgcctacctagccaatctgtccctgtttgggacactggactcccgtgagctggaaggaacagatttaatatctaggggctgggtatccccacatcactcatttggggggtcaagggacccgggcaatatagtattctgctcagtgtctggagatcatctacccaggctggggcttctgggacaggcgaggacccacggaccctggaagagctggtccaggggactgaactcccggcatctttacagagcagagcatgatcacattcctgccgctgctgctggggctcagcctgggctgcacaggagcaggtggcttcgtggcccatgtggaaagcacctgtctgttggatgatgctgggactccaaaggatttcacatactgcatctccttcaacaaggatctgctgacctgctgggatccagaggagaataagatggccccttgcgaatttggggtgctgaatagcttggcgaatgtcctctcacagcacctcaaccaaaaagacaccctgatgcagcgcttgcgcaatgggcttcagaattgtgccacacacacccagcccttctggggatcactgaccaacaggacacggccaccatctgtgcaagtagccaaaaccactccttttaacacgagggagcctgtgatgctggcctgctatgtgtggggcttctatccagcagaagtgactatcacgtggaggaagaacgggaagcttgtcatgcctcacagcagtgcgcacaagactgcccagcccaatggagactggacataccagaccctctcccatttagccttaaccccctcttacggggacacttacacctgtgtggtagagcacattggggctcctgagcccatccttcgggactggacacctgggctgtcccccatgcagaccctgaaggtttctgtgtctgcagtgactctgggcctgggcctcatcatcttctctcttggtgtgatcagctggcggagagctggccactctagttacactcctcttcctgggtccaattattcagaaggatggcacatttcctagaggcagaatcctacaacttccactccaagtgagaaggagattcaaactcaatgatgctaccatgcctctccaacatcttcaaccccctgacattatcttggatcctatggtttctccatccaattctttgaatttcccagtctcccctatgtaaaacttagcaatttgggggacctcattcctgggactatgctgtaaccaaattattgtccaaggctatatttctgggatgaatataatctgaggaagggagttaaagaccctcctggggctctcagtgtgccatagaggacagcaactggtgattgtttcagagaaataaactttggtggaaatattgtt

SEQ ID NO: 150944 - DNA, 612 bp, Homo sapiens
  Payload ID: 9767
  Gene Symbol: HLA-DMB
  Gene Name: major histocompatibility complex, class II, DM beta
  ENST ID: ENST00000448590
  CDS Start-End: 87-612
gatctaaggccaccctctcggggagggagttggggaagctgggttggctgggttggtagctcctacctactgtgtggcaagaaggtatgggtcatgaacagaaccaaggagctgcgctgctacagatgttaccacttctgtggctgctaccccactcctgggccgtccctgaagagcagagcatgatcacattcctgccgctgctgctggggctcagcctgggctgcacaggagcaggtggcttcgtggcccatgtggaaagcacctgtctgttggatgatgctgggactccaaaggatttcacatactgcatctccttcaacaaggatctgctgacctgctgggatccagaggagaataagatggccccttgcgaatttggggtgctgaatagcttggcgaatgtcctctcacagcacctcaaccaaaaagacaccctgatgcagcgcttgcgcaatgggcttcagaattgtgccacacacacccagcccttctggggatcactgaccaacaggacacggccaccatctgtgcaagtagccaaaaccactccttttaacacgagggagcctgtgatgctggcctgctatgtgtggggcttctatccagcag

SEQ ID NO: 150945 - DNA, 663 bp, Homo sapiens
  Payload ID: 9767
  Gene Symbol: HLA-DMB
  Gene Name: major histocompatibility complex, class II, DM beta
  ENST ID: ENST00000438510
  CDS Start-End: 1-321
gtagccaaaaccactccttttaacacgagggagcctgtgatgctggcctgctatgtgtggggcttctatccagcagaagtgactatcacgtggaggaagaacgggaagcttgtcatgcctcacagcagtgcgcacaagactgcccagcccaatggagactggacataccagaccctctcccatttagccttaaccccctcttacggggacacttacacctgtgtggtagagcacactggggctcctgagcccatccttcgggactggagttacactcctcttcctgggtccaattattcagaaggatggcacatttcctagaggcagaatcctacaacttccactccaagtgagaaggagattcaaactcaatgatgctaccatgcctctccaacatcttcaaccccctgacattatcttggatcctatggtttctccatccaattctttgaatttcccagtctcccctatgtaaaacttagcaacttgggggacctcattcctgggactatgctgtaaccaaattattgtccaaggctatatttctgggatgaatataatctgaggaagggagttaaagaccctcctggggctctcagtgtgccatagaggacagcaactggtgattgtttcagagaaataaactttggtggaaatattgtt

SEQ ID NO: 150946 - DNA, 663 bp, Homo sapiens
  Payload ID: 9767
  Gene Symbol: HLA-DMB
  Gene Name: major histocompatibility complex, class II, DM beta
  ENST ID: ENST00000437382
  CDS Start-End: 1-321
gtagccaaaaccactccttttaacacgagggagcctgtgatgctggcctgctatgtgtggggcttctatccagcagaagtgactatcacgtggaggaagaacgggaagcttgtcatgcctcacagcagtgcgcacaagactgcccagcccaatggagactggacataccagaccctctcccatttagccttaaccccctcttacggggacacttacacctgtgtggtagagcacattggggctcctgagcccatccttcgggactggagttacactcctcttcctgggtccaattattcagaaggatggcacatttcctagaggcagaatcctacaacttccactccaagtgagaaggagattcaaactcaatgatgctaccatgcctctccaacatcttcaaccccctgacattatcttggatcctatggtttctccatccaattctttgaatttcccagtctcccctatgtaaaacttagcaatttgggggacctcattcctgggactatgctgtaaccaaattattgtccaaggctatatttctgggatgaatataatctgaggaagggagttaaagaccctcctggggctctcagtgtgccatagaggacagcaactggtgattgtttcagagaaataaactttggtggaaatattgtt

SEQ ID NO: 150947 - DNA, 663 bp, Homo sapiens
  Payload ID: 9767
  Gene Symbol: HLA-DMB
  Gene Name: major histocompatibility complex, class II, DM beta
  ENST ID: ENST00000435204
  CDS Start-End: 1-321
gtagccaaaaccactccttttaacacgagggagcctgtgatgctggcctgctatgtgtggggcttctatccagcagaagtgactatcacgtggaggaagaacgggaagcttgtcatgcctcacagcagtgcgcacaagactgcccagcccaatggagactggacataccagaccctctcccatttagccttaaccccctcttacggggacacttacacctgtgtggtagagcacactggggctcctgagcccatccttcgggactggagttacactcctcttcctgggtccaattattcagaaggatggcacatttcctagaggcagaatcctacaacttccactccaagtgagaaggagattcaaactcaatgatgctaccatgcctctccaatatcttcaaccccctgacattatcttggatcctatggtttctccatccaattctttgaatttcccagtctcccctatgtaaaacttagcaatttgggggacctcattcctgggactatgctgtaaccaaattattgtccaaggctatatttctgggatgaatataatctgaggaagggagttaaagaccctcctggggctctcagtgtgccatagaggacagcaactggtgattgtttcagagaaataaactttggtggaaatattgtt

SEQ ID NO: 150948 - DNA, 766 bp, Homo sapiens
  Payload ID: 9767
  Gene Symbol: HLA-DMB
  Gene Name: major histocompatibility complex, class II, DM beta
  ENST ID: ENST00000441177
  CDS Start-End: 1-424
gacacggccaccatctgtgcaagtagccaaaaccactccttttaacacgagggagcctgtgatgctggcctgctatgtgtggggcttctatccagcagaagtgactatcacgtggaggaagaacgggaagcttgtcatgcctcacagcagtgcgcacaagactgcccagcccaatggagactggacataccagaccctctcccatttagccttaaccccctcttacggggacacttacacctgtgtggtagagcacactggggctcctgagcccatccttcgggactggacacctgggctgtcccccatgcagaccctgaaggtttctgtgtctgcagtgactctgggcctgggcctcatcatcttctctcttggtgtgatcagctggcggagagctggccactctagatggcacatttcctagaggcagaatcctacaacttccactccaagtgagaaggagattcaaactcaatgatgctaccatgcctctccaatatcttcaaccccctgacattatcttggatcctatggtttctccatccaattctttgaatttcccagtctcccctatgtaaaacttagcaatttgggggacctcattcctgggactatgctgtaaccaaattattgtccaaggctatatttctgggatgaatataatctgaggaagggagttaaagaccctcctggggctctcagtgtgccatagaggacagcaactggtgattgtttcagagaaataaactttggtggaaatattgtt

SEQ ID NO: 150949 - DNA, 1397 bp, Homo sapiens; identical to SEQ ID NO: 150942
  Payload ID: 9767
  Gene Symbol: HLA-DMB
  Gene Name: major histocompatibility complex, class II, DM beta
  Uniprot ID: P28068
  ENST ID: ENST00000428420
  CDS Start-End: 264-1055

SEQ ID NO: 150950 - DNA, 766 bp, Homo sapiens
  Payload ID: 9767
  Gene Symbol: HLA-DMB
  Gene Name: major histocompatibility complex, class II, DM beta
  ENST ID: ENST00000424874
  CDS Start-End: 1-424
gacacggccaccatctgtgcaagtagccaaaaccactccttttaacacgagggagcctgtgatgctggcctgctatgtgtggggcttctatccagcagaagtgactatcacgtggaggaagaacgggaagcttgtcatgcctcacagcagtgcgcacaagactgcccagcccaatggagactggacataccagaccctctcccatttagccttaaccccctcttacggggacacttacacctgtgtggtagagcacactggggctcctgagcccatccttcgggactggacacctgggctgtcccccatgcagaccctgaaggtttctgtgtctgcagtgactctgggcctgggcctcatcatcttctctcttggtgtgatcagctggcggagagctggccactctagatggcacatttcctagaggcagaatcctacaacttccactccaagtgagaaggagattcaaactcaatgatgctaccatgcctctccaacatcttcaaccccctgacattatcttggatcctatggtttctccatccaattctttgaatttcccagtctcccctatgtaaaacttagcaacttgggggacctcattcctgggactatgctgtaaccaaattattgtccaaggctatatttctgggatgaatataatctgaggaagggagttaaagaccctcctggggctctcagtgtgccatagaggacagcaactggtgattgtttcagagaaataaactttggtggaaatattgtt

SEQ ID NO: 150951 - DNA, 1347 bp, Homo sapiens
  Payload ID: 9767
  Gene Symbol: HLA-DMB
  Gene Name: major histocompatibility complex, class II, DM beta
  ENST ID: ENST00000413617
  CDS Start-End: 215-988
tcccgtgagctggaaggaacagatttaatatctaggggctgggtatccccacatcactcatttggggggtcaagggacccgggcaatatagtattctgctcagtgtctggagatcatctacccaggctggggcttctgggacaggcgaggacccacggaccctggaagagctggtccaggggactgaactcccggcatctttacagagcagagcatgatcacattcctgccgctgctgctggggctcagcctgggctgcacaggagcaggtggcttcgtggcccatgtggaaagcacctgtctgttggatgatgctgggactccaaaggatttcacatactgcatctccttcaacaaggatctgctgacctgctgggatccagaggagaataagatggccccttgcgaatttggggtgctgaatagcttggcgaatgtcctctcacagcacctcaaccaaaaagacaccctgatgcagcgcttgcgcaatgggcttcagaattgtgccacacacacccagcccttctggggatcactgaccaacaggacacggccaccatctgtgcaagtagccaaaaccactccttttaacacgagggagcctgtgatgctggcctgctatgtgtggggcttctatccagcagaagtgactatcacgtggaggaagaacgggaagcttgtcatgcctcacagcagtgcgcacaagactgcccagcccaatggagactggacataccagaccctctcccatttagccttaaccccctcttacggggacacttacacctgtgtggtagagcacattggggctcctgagcccatccttcgggactggacacctgggctgtcccccatgcagaccctgaaggtttctgtgtctgcagtgactctgggcctgggcctcatcatcttctctcttggtgtgatcagctggcggagagctggccactctagtgacctcattatctcccttttatttattctgtaggatggcacatttcctagaggcagaatcctacaacttccactccaagtgagaaggagattcaaactcaatgatgctaccatgcctctccaacatcttcaaccccctgacattatcttggatcctatggtttctccatccaattctttgaatttcccagtctcccctatgtaaaacttagcaatttgggggacctcattcctgggactatgctgtaaccaaattattgtccaaggctatatttctgggatgaatataatctgaggaagggagttaaagaccctcctggggctctcagtgtgccatagaggacagcaactggtgattgtttcagagaaataaactttggtggaaatattgtt

SEQ ID NO: 150952 - DNA, 1347 bp, Homo sapiens
  Payload ID: 9767
  Gene Symbol: HLA-DMB
  Gene Name: major histocompatibility complex, class II, DM beta
  ENST ID: ENST00000418759
  CDS Start-End: 215-988
tcccgtgagctggaaggaacagatttaatatctaggggctgggtattcccacatcactcatttggggggtcaagggacccgggcaatatagtattctgctcagtgtctggagatcatctacccaggctggggcttctgggacaggcgaggacccacggaccctggaagagctggtccaggggactgaactcccggcatctttacagagcagagcatgatcacattcctgccgctgctgctggggctcagcctgggctgcacaggagcaggtggcttcgtggcccatgtggaaagcacctgtctgttggatgatgctgggactccaaaggatttcacatactgcatctccttcaacaaggatctgctgacctgctgggatccagaggagaataagatggccccttgcgaatttggggtgctgaatagcttggcgaatgtcctctcacagcacctcaaccaaaaagacaccctgatgcagcgcttgcgcaatgggcttcagaattgtgccacacacacccagcccttctggggatcactgaccaacaggacacggccaccatctgtgcaagtagccaaaaccactccttttaacacgagggagcctgtgatgctggcctgctatgtgtggggcttctatccagcagaagtgactatcacgtggaggaagaacgggaagcttgtcatgcctcacagcagtgcgcacaagactgcccagcccaatggagactggacataccagaccctctcccatttagccttaaccccctcttacggggacacttacacctgtgtggtagagcacactggggctcctgagcccatccttcgggactggacacctgggctgtcccccatgcagaccctgaaggtttctgtgtctgcagtgactctgggcctgggcctcatcatcttctctcttggtgtgatcagctggcggagagctggccactctagtgacctcattatctcccttttatttattctgtaggatggcacatttcctagaggcagaatcctacaacttccactccaagtgagaaggagattcaaactcaatgatgctaccatgcctctccaatatcttcaaccccctgacattatcttggatcctatggtttctccatccaattctttgaatttcccagtctcccctatgtaaaacttagcaatttgggggacctcattcctgggactatgctgtaaccaaattattgtccaaggctatatttctgggatgaatataatctgaggaagggagttaaagaccctcctggggctctcagtgtgccatagaggacagcaactggtgattgtttcagagaaataaactttggtggaaatattgtt

SEQ ID NO: 150953 - DNA, 1347 bp, Homo sapiens
  Payload ID: 9767
  Gene Symbol: HLA-DMB
  Gene Name: major histocompatibility complex, class II, DM beta
  ENST ID: ENST00000447454
  CDS Start-End: 215-988
tcccgtgagctggaaggaacagatttaatatctaggggctgggtatccccacatcactcatttggggggtcaagggacccgggcaatatagtattctgctcagtgtctggagatcatctacccaggctggggcttctgggacaggcgaggacccacggaccctggaagagctggtccaggggactgaactcccggcatctttacagagcagagcatgatcacattcctgccgctgctgctggggctcagcctgggctgcacaggagcaggtggcttcgtggcccatgtggaaagcacctgtctgttggatgatgctgggactccaaaggatttcacatactgcatctccttcaacaaggatctgctgacctgctgggatccagaggagaataagatggccccttgcgaatttggggtgctgaatagcttggcgaatgtcctctcacagcacctcaaccaaaaagacaccctgatgcagcgcttgcgcaatgggcttcagaattgtgccacacacacccagcccttctggggatcactgaccaacaggacacggccaccatctgtgcaagtagccaaaaccactccttttaacacgagggagcctgtgatgctggcctgctatgtgtggggcttctatccagcagaagtgactatcacgtggaggaagaacgggaagcttgtcatgcctcacagcagtgcgcacaagactgcccagcccaatggagactggacataccagaccctctcccatttagccttaaccccctcttacggggacacttacacctgtgtggtagagcacattggggctcctgagcccatccttcgggactggacacctgggctgtcccccatgcagaccctgaaggtttctgtgtctgcagtgactctgggcctgggcctcatcatcttctctcttggtgtgatcagctggcggagagctggccactctagtgacctcattatctcccttttatttattctgtaggatggcacatttcctagaggcagaatcctacaacttccactccaagtgagaaggagattcaaactcaatgatgctaccatgcctctccaacatcttcaaccccctgacattatcttggatcctatggtttctccatccaattctttgaatttcccagtctcccctatgtaaaacttagcaacttgggggacctcattcctgggactatgctgtaaccaaattattgtccaaggctatatttctgggatgaatataatctgaggaagggagttaaagaccctcctggggctctcagtgtgccatagaggacagcaactggtgattgtttcagagaaataaactttggtggaaatattgtt

SEQ ID NO: 150954 - DNA, 766 bp, Homo sapiens
  Payload ID: 9767
  Gene Symbol: HLA-DMB
  Gene Name: major histocompatibility complex, class II, DM beta
  ENST ID: ENST00000448798
  CDS Start-End: 1-424
gacacggccaccatctgtgcaagtagccaaaaccactccttttaacacgagggagcctgtgatgctggcctgctatgtgtggggcttctatccagcagaagtgactatcacgtggaggaagaacgggaagcttgtcatgcctcacagcagtgcgcacaagactgcccagcccaatggagactggacataccagaccctctcccatttagccttaaccccctcttacggggacacttacacctgtgtggtagagcacattggggctcctgagcccatccttcgggactggacacctgggctgtcccccatgcagaccctgaaggtttctgtgtctgcagtgactctgggcctgggcctcatcatcttctctcttggtgtgatcagctggcggagagctggccactctagatggcacatttcctagaggcagaatcctacaacttccactccaagtgagaaggagattcaaactcaatgatgctaccatgcctctccaacatcttcaaccccctgacattatcttggatcctatggtttctccatccaattctttgaatttcccagtctcccctatgtaaaacttagcaacttgggggacctcattcctgggactatgctgtaaccaaattattgtccaaggctatatttctgggatgaatataatctgaggaagggagttaaagaccctcctggggctctcagtgtgccatagaggacagcaactggtgattgtttcagagaaataaactttggtggaaatattgtt

SEQ ID NO: 150955 - DNA, 612 bp, Homo sapiens; identical to SEQ ID NO: 150944
  Payload ID: 9767
  Gene Symbol: HLA-DMB
  Gene Name: major histocompatibility complex, class II, DM beta
  ENST ID: ENST00000415090
  CDS Start-End: 87-612

SEQ ID NO: 150956 - DNA, 1397 bp, Homo sapiens
  Payload ID: 9767
  Gene Symbol: HLA-DMB
  Gene Name: major histocompatibility complex, class II, DM beta
  Uniprot ID: P28068
  ENST ID: ENST00000418107
  CDS Start-End: 264-1055
atttgtccctgcctacctagccaatctgtccctgtttgggacactggactcccgtgagctggaaggaacagatttaatatctaggggctgggtatccccacatcactcatttggggggtcaagggacccgggcaatatagtattctgctcagtgtctggagatcatctacccaggctggggcttctgggacaggcgaggacccacggaccctggaagagctggtccaggggactgaactcccggcatctttacagagcagagcatgatcacattcctgccgctgctgctggggctcagcctgggctgcacaggagcaggtggcttcgtggcccatgtggaaagcacctgtctgttggatgatgctgggactccaaaggatttcacatactgcatctccttcaacaaggatctgctgacctgctgggatccagaggagaataagatggccccttgcgaatttggggtgctgaatagcttggcgaatgtcctctcacagcacctcaaccaaaaagacaccctgatgcagcgcttgcgcaatgggcttcagaattgtgccacacacacccagcccttctggggatcactgaccaacaggacacggccaccatctgtgcaagtagccaaaaccactccttttaacacgagggagcctgtgatgctggcctgctatgtgtggggcttctatccagcagaagtgactatcacgtggaggaagaacgggaagcttgtcatgcctcacagcagtgcgcacaagactgcccagcccaatggagactggacataccagaccctctcccatttagccttaaccccctcttacggggacacttacacctgtgtggtagagcacactggggctcctgagcccatccttcgggactggacacctgggctgtcccccatgcagaccctgaaggtttctgtgtctgcagtgactctgggcctgggcctcatcatcttctctcttggtgtgatcagctggcggagagctggccactctagttacactcctcttcctgggtccaattattcagaaggatggcacatttcctagaggcagaatcctacaacttccactccaagtgagaaggagattcaaactcaatgatgctaccatgcctctccaacatcttcaaccccctgacattatcttggatcctatggtttctccatccaattctttgaatttcccagtctcccctatgtaaaacttagcaacttgggggacctcattcctgggactatgctgtaaccaaattattgtccaaggctatatttctgggatgaatataatctgaggaagggagttaaagaccctcctggggctctcagtgtgccatagaggacagcaactggtgattgtttcagagaaataaactttggtggaaatattgtt

SEQ ID NO: 150957 - DNA, 1347 bp, Homo sapiens; identical to SEQ ID NO: 150953
  Payload ID: 9767
  Gene Symbol: HLA-DMB
  Gene Name: major histocompatibility complex, class II, DM beta
  ENST ID: ENST00000452407
  CDS Start-End: 215-988

SEQ ID NO: 150958 - DNA, 766 bp, Homo sapiens; identical to SEQ ID NO: 150954
  Payload ID: 9767
  Gene Symbol: HLA-DMB
  Gene Name: major histocompatibility complex, class II, DM beta
  ENST ID: ENST00000438310
  CDS Start-End: 1-424

SEQ ID NO: 150959 - DNA, 766 bp, Homo sapiens
  Payload ID: 9767
  Gene Symbol: HLA-DMB
  Gene Name: major histocompatibility complex, class II, DM beta
  ENST ID: ENST00000451921
  CDS Start-End: 1-424
gacacggccaccatctgtgcaagtagccaaaaccactccttttaacacgagggagcctgtgatgctggcctgctatgtgtggggcttctatccagcagaagtgactatcacgtggaggaagaacgggaagcttgtcatgcctcacagcagtgcgcacaagactgcccagcccaatggagactggacataccagaccctctcccatttagccttaaccccctcttacggggacacttacacctgtgtggtagagcacattggggctcctgagcccatccttcgggactggacacctgggctgtcccccatgcagaccctgaaggtttctgtgtctgcagtgactctgggcctgggcctcatcatcttctctcttggtgtgatcagctggcggagagctggccactctagatggcacatttcctagaggcagaatcctacaacttccactccaagtgagaaggagattcaaactcaatgatgctaccatgcctctccaacatcttcaaccccctgacattatcttggatcctatggtttctccatccaattctttgaatttcccagtctcccctatgtaaaacttagcaatttgggggacctcattcctgggactatgctgtaaccaaattattgtccaaggctatatttctgggatgaatataatctgaggaagggagttaaagaccctcctggggctctcagtgtgccatagaggacagcaactggtgattgtttcagagaaataaactttggtggaaatattgtt

SEQ ID NO: 150960 - DNA, 766 bp, Homo sapiens; identical to SEQ ID NO: 150950
  Payload ID: 9767
  Gene Symbol: HLA-DMB
  Gene Name: major histocompatibility complex, class II, DM beta
  ENST ID: ENST00000433242
  CDS Start-End: 1-424

SEQ ID NO: 150961 - DNA, 663 bp, Homo sapiens
  Payload ID: 9767
  Gene Symbol: HLA-DMB
  Gene Name: major histocompatibility complex, class II, DM beta
  ENST ID: ENST00000430115
  CDS Start-End: 1-321
gtagccaaaaccactccttttaacacgagggagcctgtgatgctggcctgctatgtgtggggcttctatccagcagaagtgactatcacgtggaggaagaacgggaagcttgtcatgcctcacagcagtgcgcacaagactgcccagcccaatggagactggacataccagaccctctcccatttagccttaaccccctcttacggggacacttacacctgtgtggtagagcacattggggctcctgagcccatccttcgggactggagttacactcctcttcctgggtccaattattcagaaggatggcacatttcctagaggcagaatcctacaacttccactccaagtgagaaggagattcaaactcaatgatgctaccatgcctctccaacatcttcaaccccctgacattatcttggatcctatggtttctccatccaattctttgaatttcccagtctcccctatgtaaaacttagcaacttgggggacctcattcctgggactatgctgtaaccaaattattgtccaaggctatatttctgggatgaatataatctgaggaagggagttaaagaccctcctggggctctcagtgtgccatagaggacagcaactggtgattgtttcagagaaataaactttggtggaaatattgtt

SEQ ID NO: 150962 - DNA, 1347 bp, Homo sapiens; identical to SEQ ID NO: 150953
  Payload ID: 9767
  Gene Symbol: HLA-DMB
  Gene Name: major histocompatibility complex, class II, DM beta
  ENST ID: ENST00000428864
  CDS Start-End: 215-988

SEQ ID NO: 150963 - DNA, 612 bp, Homo sapiens; identical to SEQ ID NO: 150944
  Payload ID: 9767
  Gene Symbol: HLA-DMB
  Gene Name: major histocompatibility complex, class II, DM beta
  ENST ID: ENST00000449679
  CDS Start-End: 87-612

SEQ ID NO: 150964 - DNA, 663 bp, Homo sapiens; identical to SEQ ID NO: 150961
  Payload ID: 9767
  Gene Symbol: HLA-DMB
  Gene Name: major histocompatibility complex, class II, DM beta
  ENST ID: ENST00000437583
  CDS Start-End: 1-321

SEQ ID NO: 150965 - DNA, 663 bp, Homo sapiens; identical to SEQ ID NO: 150945
  Payload ID: 9767
  Gene Symbol: HLA-DMB
  Gene Name: major histocompatibility complex, class II, DM beta
  ENST ID: ENST00000413696
  CDS Start-End: 1-321

SEQ ID NO: 150966 - DNA, 663 bp, Homo sapiens; identical to SEQ ID NO: 150945
  Payload ID: 9767
  Gene Symbol: HLA-DMB
  Gene Name: major histocompatibility complex, class II, DM beta
  ENST ID: ENST00000440269
  CDS Start-End: 1-321

SEQ ID NO: 150967 - DNA, 1397 bp, Homo sapiens; identical to SEQ ID NO: 150956
  Payload ID: 9767
  Gene Symbol: HLA-DMB
  Gene Name: major histocompatibility complex, class II, DM beta
  Uniprot ID: P28068
  ENST ID: ENST00000450897
  CDS Start-End: 264-1055

SEQ ID NO: 150968 - DNA, 766 bp, Homo sapiens; identical to SEQ ID NO: 150954
  Payload ID: 9767
  Gene Symbol: HLA-DMB
  Gene Name: major histocompatibility complex, class II, DM beta
  ENST ID: ENST00000413038
  CDS Start-End: 1-424

SEQ ID NO: 150969 - DNA, 612 bp, Homo sapiens; identical to SEQ ID NO: 150944
  Payload ID: 9767
  Gene Symbol: HLA-DMB
  Gene Name: major histocompatibility complex, class II, DM beta
  ENST ID: ENST00000449417
  CDS Start-End: 87-612

SEQ ID NO: 150970 - DNA, 663 bp, Homo sapiens; identical to SEQ ID NO: 150961
  Payload ID: 9767
  Gene Symbol: HLA-DMB
  Gene Name: major histocompatibility complex, class II, DM beta
  ENST ID: ENST00000421456
  CDS Start-End: 1-321

SEQ ID NO: 150971 - DNA, 612 bp, Homo sapiens; identical to SEQ ID NO: 150944
  Payload ID: 9767
  Gene Symbol: HLA-DMB
  Gene Name: major histocompatibility complex, class II, DM beta
  ENST ID: ENST00000435056
  CDS Start-End: 87-612

SEQ ID NO: 150972 - DNA, 766 bp, Homo sapiens; identical to SEQ ID NO: 150950
  Payload ID: 9767
  Gene Symbol: HLA-DMB
  Gene Name: major histocompatibility complex, class II, DM beta
  ENST ID: ENST00000414017
  CDS Start-End: 1-424

SEQ ID NO: 150973 - DNA, 1397 bp, Homo sapiens; identical to SEQ ID NO: 150942
  Payload ID: 9767
  Gene Symbol: HLA-DMB
  Gene Name: major histocompatibility complex, class II, DM beta
  Uniprot ID: P28068
  ENST ID: ENST00000440078
  CDS Start-End: 264-1055

SEQ ID NO: 150974 - DNA, 612 bp, Homo sapiens; identical to SEQ ID NO: 150944
  Payload ID: 9767
  Gene Symbol: HLA-DMB
  Gene Name: major histocompatibility complex, class II, DM beta
  ENST ID: ENST00000430099
  CDS Start-End: 87-612

SEQ ID NO: 150975 - DNA, 1347 bp, Homo sapiens
  Payload ID: 9767
  Gene Symbol: HLA-DMB
  Gene Name: major histocompatibility complex, class II, DM beta
  ENST ID: ENST00000439344
  CDS Start-End: 215-988
tcccgtgagctggaaggaacagatttaatatctaggggctgggtatccccacatcactcatttggggggtcaagggacccgggcaatatagtattctgctcagtgtctggagatcatctacccaggctggggcttctgggacaggcgaggacccacggaccctggaagagctggtccaggggactgaactcccggcatctttacagagcagagcatgatcacattcctgccgctgctgctggggctcagcctgggctgcacaggagcaggtggcttcgtggcccatgtggaaagcacctgtctgttggatgatgctgggactccaaaggatttcacatactgcatctccttcaacaaggatctgctgacctgctgggatccagaggagaataagatggccccttgcgaatttggggtgctgaatagcttggcgaatgtcctctcacagcacctcaaccaaaaagacaccctgatgcagcgcttgcgcaatgggcttcagaattgtgccacacacacccagcccttctggggatcactgaccaacaggacacggccaccatctgtgcaagtagccaaaaccactccttttaacacgagggagcctgtgatgctggcctgctatgtgtggggcttctatccagcagaagtgactatcacgtggaggaagaacgggaagcttgtcatgcctcacagcagtgcgcacaagactgcccagcccaatggagactggacataccagaccctctcccatttagccttaaccccctcttacggggacacttacacctgtgtggtagagcacactggggctcctgagcccatccttcgggactggacacctgggctgtcccccatgcagaccctgaaggtttctgtgtctgcagtgactctgggcctgggcctcatcatcttctctcttggtgtgatcagctggcggagagctggccactctagtgacctcattatctcccttttatttattctgtaggatggcacatttcctagaggcagaatcctacaacttccactccaagtgagaaggagattcaaactcaatgatgctaccatgcctctccaacatcttcaaccccctgacattatcttggatcctatggtttctccatccaattctttgaatttcccagtctcccctatgtaaaacttagcaacttgggggacctcattcctgggactatgctgtaaccaaattattgtccaaggctatatttctgggatgaatataatctgaggaagggagttaaagaccctcctggggctctcagtgtgccatagaggacagcaactggtgattgtttcagagaaataaactttggtggaaatattgtt

SEQ ID NO: 150976 - DNA, 1397 bp, Homo sapiens; identical to SEQ ID NO: 150956
  Payload ID: 9767
  Gene Symbol: HLA-DMB
  Gene Name: major histocompatibility complex, class II, DM beta
  Uniprot ID: P28068
  ENST ID: ENST00000412948
  CDS Start-End: 264-1055

SEQ ID NO: 150977 - DNA, 612 bp, Homo sapiens; identical to SEQ ID NO: 150944
  Payload ID: 9767
  Gene Symbol: HLA-DMB
  Gene Name: major histocompatibility complex, class II, DM beta
  ENST ID: ENST00000415927
  CDS Start-End: 87-612

SEQ ID NO: 150978 - DNA, 1397 bp, Homo sapiens
  Payload ID: 9767
  Gene Symbol: HLA-DMB
  Gene Name: major histocompatibility complex, class II, DM beta
  Uniprot ID: P28068
  ENST ID: ENST00000424822
  CDS Start-End: 264-1055
atttgtccctgcctacctagccaatctgtccctgtttgggacactggactcccgtgagctggaaggaacagatttaatatctaggggctgggtattcccacatcactcatttggggggtcaagggacccgggcaatatagtattctgctcagtgtctggagatcatctacccaggctggggcttctgggacaggcgaggacccacggaccctggaagagctggtccaggggactgaactcccggcatctttacagagcagagcatgatcacattcctgccgctgctgctggggctcagcctgggctgcacaggagcaggtggcttcgtggcccatgtggaaagcacctgtctgttggatgatgctgggactccaaaggatttcacatactgcatctccttcaacaaggatctgctgacctgctgggatccagaggagaataagatggccccttgcgaatttggggtgctgaatagcttggcgaatgtcctctcacagcacctcaaccaaaaagacaccctgatgcagcgcttgcgcaatgggcttcagaattgtgccacacacacccagcccttctggggatcactgaccaacaggacacggccaccatctgtgcaagtagccaaaaccactccttttaacacgagggagcctgtgatgctggcctgctatgtgtggggcttctatccagcagaagtgactatcacgtggaggaagaacgggaagcttgtcatgcctcacagcagtgcgcacaagactgcccagcccaatggagactggacataccagaccctctcccatttagccttaaccccctcttacggggacacttacacctgtgtggtagagcacactggggctcctgagcccatccttcgggactggacacctgggctgtcccccatgcagaccctgaaggtttctgtgtctgcagtgactctgggcctgggcctcatcatcttctctcttggtgtgatcagctggcggagagctggccactctagttacactcctcttcctgggtccaattattcagaaggatggcacatttcctagaggcagaatcctacaacttccactccaagtgagaaggagattcaaactcaatgatgctaccatgcctctccaatatcttcaaccccctgacattatcttggatcctatggtttctccatccaattctttgaatttcccagtctcccctatgtaaaacttagcaatttgggggacctcattcctgggactatgctgtaaccaaattattgtccaaggctatatttctgggatgaatataatctgaggaagggagttaaagaccctcctggggctctcagtgtgccatagaggacagcaactggtgattgtttcagagaaataaactttggtggaaatattgtt

SEQ ID NO: 150979 - DNA, 1347 bp, Homo sapiens; identical to SEQ ID NO: 150975
  Payload ID: 9767
  Gene Symbol: HLA-DMB
  Gene Name: major histocompatibility complex, class II, DM beta
  ENST ID: ENST00000456428
  CDS Start-End: 215-988

SEQ ID NO: 150980 - DNA, 3489 bp, Homo sapiens
  Payload ID: 9768
  Gene Symbol: HLA-DOA
  Gene Name: major histocompatibility complex, class II, DO alpha
  Uniprot ID: P06340
  ENST ID: ENST00000229829
  CDS Start-End: 77-829
cttcttctttacctccgccttgttcctgtcctcaccacacggactgagactgatttgattaaagcaccagagtgtaatggccctcagagcagggctggtcctggggttccacaccctgatgaccctcctgagcccgcaggaggcaggggccaccaaggctgaccacatgggctcctacggacccgccttctaccagtcttacggcgcctcgggccagttcacccatgaatttgatgaggaacagctgttctctgtggacctgaagaaaagcgaggccgtgtggcgtctgcctgagtttggtgactttgcccgctttgacccgcagggcgggctggccggcatcgccgcaatcaaagcccatctggacatcctggtggagcgctccaaccgcagcagagccatcaacgtgcctccacgggtgaccgtgctccccaagtctcgggtggagctgggccagcccaacatcctcatctgcatcgtggacaacatcttcccccctgtgatcaatatcacctggctgcgcaacggccaaactgtcactgagggagtggcccagaccagcttctattcccagcctgaccatttgttccgcaagttccactacctgcccttcgtgccctcagccgaggacgtctatgactgccaggtggagcactggggcctggatgcgccactcctcaggcattgggagctccaggtgcctattccaccaccagatgccatggagaccctggtctgtgccctgggcctggccatcggcctggtgggcttcctcgtgggcaccgtcctcatcatcatgggcacatatgtgtccagtgtccccaggtaatgatccttctgagagaaatgacttgtgggagacaccctgcagatcctcatgggtttgtgacagcccctgcgtgctcagtgccctttaagtgcatcccgctgtgctgactttgagtgggatcaacatctgtcctacgggtcccctcttttttggccccagtattcatggcagggtttgttggacacctactagcttcccttcccattcaacacacacacacattcttgctctacccaaagctctggctggcagcactaaatgctttggtggtgtttgcactgtgtcctttccaggccttggccagttcttccaggggtgaggcatgtggtgctggggattggcagccatcctggggcccacacaggtgtgtcttgctccatttggcccattgtgtgttactttgtgaatgagccatttcacatggacttcatgaaatttgcctcctgagttcaggtttaccctgaaagggatgcagattatcctgttcctcacgaccccctcagctaacaacagttctgaagggtgctgggacaggacaggctcatggggactccactcctgcctgggtttactctgtatgaagaggccactggtatcctgccatgatgttatctcctttttctacttttccctagagtcccatgcatgataaagagaggcccaaggcttggataaggtggccacttccctcagtggagtcagtcatgttaggtaggaggtggtagagtcggtctgcgaggtatctcgtaagaggggaggtccacctagacacactctaaatatgtggcctagaagattttggtctacttttctgtgaacagaatttaaaacatacaaagagataaatcaccataccacatagtttatgtcaggaccaaaatgagcaatacagattacggttttcaaaccagaatgcacataagaactgcttgggatccttttaaaagtacaggcattggcctggtgcagtggctcattcctgtaatcccagcactttgggaggccaaggggacaggactgcttgaggccaagaggtggaaaccatcttgggctacatagagagaccccatctctacaaagaaagatttaaaaattaaccaggcatggtggctcgcacctgtattcccagccactggggaggctgaggccggaggagtgcttgagcccaggagttcaaggctgcagtgagccaagattgcgccactgcactccagcctaggtgacagagtgagaccctgtctctaaataaataaataaataaaatataaaaataacagtcatcacccagacctactgaattagaatctcgggagtgcagggggcagcaacagggaggctgtcttttctgagatggggtctcactctgtcaccaggctggagtgccatggcatgatctcagctcactgcaacctccacctcctgagttcaagccattctcctgcctcagcctcctgagtagctgggactacaggtgtgcgccactacactcagctaatttttgtattttaagtagagacggggtttcatcatgttggccaggatggcctccatctcttgacctcgtgatccacccaccttccctcccaaagtactggaattacaggcattagccactgtgcccagccgaggctgtcatttttaaccggctctggatgactctgatgcagccatcctggaccttggctgtggtctggtaactggaacccagtgacgtaatcaggtgccatcgggggtcatgggaaagggggatccccaaggtctgaggtggactaggaaggctttctgaagaacctgggtctgttagggcatcagccaatcaaggtacaagtaaatagaggcaaaatgagggtttgaactgtgagcagttggtcctggaaaagaaagaaaccaagagattatggggactcaatgggcttcttaagagagaataagttgaaatcaatgaccagaagaccctgatggaagtggaggagaatcatctcaggcaaactttttgtgtgccagtaacagaaaccctctttgtgtgatcacatgcaaagtataggatatttgcaatatagccatggggaggagtgcagggcccaagggtagattttagccaggcctcccaggaacagaactcggatccgaaaagcccagagaagctagagctgcccctccaacactctcggatccacatggtctgtgttctctagacccccctgcatgttagcggtgttctctctctgtggactgactgtccttctcagtgaacatgtccacccgacagctcctgagtttatatcatctcaaccctcacaacccacagaggctgtgtctcctagtcacagctttaaattactggaaaaataaatgactggccaaacttggagcaggtgtccatcccagccctgtgtagttagagcaggaatcaagatctcaacacaaatgtggctgccaagcactcagccccggggcgaggggtcaagttcttctcagagaaagaggaataagttggttctcagaagacatcacaagatacgtgtgtacccaacaatctctgatctctgctgatcttttgcttagacgttaacttgatgcatcattggaaaggtgtttctctcatctctgtcctaaggcttgataaagtcattaaaattgtgttcttttgactaaagaaa

SEQ ID NO: 150981 - DNA, 303 bp, Homo sapiens
  Payload ID: 9768
  Gene Symbol: HLA-DOA
  Gene Name: major histocompatibility complex, class II, DO alpha
  ENST ID: ENST00000374813
  CDS Start-End: 44-303
accacacggactgagactgatttgattaaagcaccagagtgtaatggccctcagagcagggctggtcctggggttccacaccctgatgaccctcctgagcccgcaggaggcaggggccaccaaggggcgggctggccggcatcgccgcaatcaaagcccatctggacatcctggtggagcgctccaaccgcagcagagccatcaacgtgcctccacgggtgaccgtgctccccaagtctcgggtggagctgggccagcccaacatcctcatctgcatcgtggacaacatcttcccccctgtga

SEQ ID NO: 150982 - DNA, 303 bp, Homo sapiens; identical to SEQ ID NO: 150981
  Payload ID: 9768
  Gene Symbol: HLA-DOA
  Gene Name: major histocompatibility complex, class II, DO alpha
  ENST ID: ENST00000383225
  CDS Start-End: 44-303

SEQ ID NO: 150983 - DNA, 3489 bp, Homo sapiens
  Payload ID: 9768
  Gene Symbol: HLA-DOA
  Gene Name: major histocompatibility complex, class II, DO alpha
  Uniprot ID: P06340
  ENST ID: ENST00000383226
  CDS Start-End: 77-829
cttcttctttacctccgccttgttcctgtcctcaccacacggactgagactgatttgattaaagcaccagagtgtaatggccctcagagcagggctggtcctggggttccacaccctgatgaccctcctgagcccgcaggaggcaggggccaccaaggctgaccacatgggctcctacggacccgccttctaccagtcttacggcgcctcgggccagttcacccatgaatttgatgaggaacagctgttctctgtggacctgaagaaaagcgaggccgtgtggcgtctgcctgagtttggtgactttgcccgctttgacccgcagggcgggctggccggcatcgccgcaatcaaagcccatctggacatcctggtggagcgctccaaccgcagcagagccatcaacgtgcctccacgggtgaccgtgctccccaagtctcgggtggagctgggccagcccaacatcctcatctgcatcgtggacaacatcttcccccctgtgatcaatatcacctggctgcgcaacggccaaactgtcactgagggagtggcccagaccagcttctattcccagcctgaccatttgttccgcaagttccactacctgcccttcgtgccctcagccgaggacgtctatgactgccaggtggagcactggggcctggatgcgccactcctcaggcattgggagctccaggtgcctattccaccaccagatgccatggagaccctggtctgtgccctgggcctggccatcggcctggtgggcttcctcgtgggcaccgtcctcatcatcatgggcacatatgtgtccagtgtccccaggtaatgatccttctgagagaaatgacttgtgggagacaccctgcagatcctcatgggtttgtgacagcccctgcgtgctcagtgccctttaagtgcatcccgctgtgctgactttgagtgggatcaacatctgtcctacgggtcccctcttttttggccccagtattcatggcagggtttgttggacacctactagcttcccttcccattcaacacaaacacacattcttgctctacccaaagctctggctggcagcactaaatgctttggtggtgtttgcactgtgtcctttccaggccttggccagttcttccaggggtgaggcatgtggtgctggggattggcagccatcctggggcccacacaggtgtgtcttgctccatttggcccattgtgtgttactttgtgaatgagccatttcacatggacttcatgaaatttgcctcctgagttcaggtttaccctgaaagggatgcagattatcctgttcctcacgaccccctcagctaacaacagttctgaagggtgctgggacaggacaggctcatggggactccactcctgcctgggtttactctgtatgaagaggccactggtatcctgccatgatgttatctcctttttctacttttccctagagtcccatgcatgataaagagaggcccaaggcttggataaggtggccacttccctcagtggagtcagtcatgttaggtaggaggtggtagagtcggtctgcaaggtatctcgtaagaggggaggtccacctagacacactctaaatatgtggcctagaagattttggtctacttttctgtgaacagaatttaaaacatacaaagagataaatcaccataccacatagtttatgtcaagaccaaaatgagcaatacagattacggttttcaaaccagaatgcacataagaactgcttgggatccttttaaaagtacaggcattggcctggtgcagtggctcattcctgtaatcccagcactttgggaggccaaggggacaggactgcttgaggccaagaggtggaaaccatcttgggctacatagagagaccccatctctacaaagaaagatttaaaaattaaccagccatggtggctcgcacctgtattcccagccactggggaggctgaggccggaggagtgcttgagcccaggagttcaaggctgcagtgagccaagattgcgccactgcactccagcctaggtgacagagtgagaccctgtctctaaataaataaataaataaaatataaaaataacagtcatcacccagacctactgaattagaatctcgggagtgcagggggcagcaacagggaggctgtcttttctgagaaggggtctcactctgtcaccaggctggagtgccatggcatgatctcagctcactgcaacctccacctcctgagttcaagccattctcctgcctcagcctcctgagtagctgggactacaggtgtgcgccactacactcagctaatttttgtattttaagtagagacggggtttcatcatgttggccaggatggcctccatctcttgacctcgtgatccacccaccttccctcccaaagtactggaattacaggcattagccactgtgcccagccgaggctgtcatttttaaccggctctggatgactctgatgcagccatcctggaccttggctgtggtctggtaactggaacccagtgacgtaatcaggtgccattgggggtcatgggaaagggggatccccaaggtctgaggtggactaggaaggctttctgaagaacctgggtctgttagggcatcagccaatcaaggtacaagtaaatagaggcaaaatgagggtttgaactgtgagcagttggtcctggaaaagaaagaaaccaagagattatggggactcaatgggcttcttaagagagaataagttgaaatcaatgaccagaagaccctgatggaagtggaggagaatcatctcaggcaaactttttgtgtgccagtaacagaaaccctctttgtgtgatcacatgcaaagtataggatatttgcaatatagccatggggaggagtgcagggcccaagggtagattttagccaggcctcccaggaacagaactcggatccgaaaagcccagagaagctagagctgcccctccaacactctcggatccacatggtctgtgttctctagacccccctgcatgttggcggtgttctctctctgtggactgactgtccttctcagtgaacatgtccacccgacagctcctgagtttatatcatctcaaccctcacaacccacagaggctgtgtctcctagtcacagctttaaattactggaaaaataaatgactggccaaacttggagcaggtgtccatcccagccctgtgtagttagagcagaaatcaagatctcaacacaaatgtggctgccaagcactcagccctggggcgaggggtcaagttcttctcagagaaagaggaataagttggttctcagaagacatcacaagatacgtgtgtacccaacaatctctgatctctgctgatcttttgcttagacgttaacttgatgcatcattggaaaggtgtttctctcatctctgtcctaaggcttgataaagtcattaaaattgtgttcttttgactaaagaaa

SEQ ID NO: 150984 - DNA, 3489 bp, Homo sapiens; identical to SEQ ID NO: 150980
  Payload ID: 9768
  Gene Symbol: HLA-DOA
  Gene Name: major histocompatibility complex, class II, DO alpha
  Uniprot ID: P06340
  ENST ID: ENST00000438987
  CDS Start-End: 77-829

SEQ ID NO: 150985 - DNA, 3488 bp, Homo sapiens
  Payload ID: 9768
  Gene Symbol: HLA-DOA
  Gene Name: major histocompatibility complex, class II, DO alpha
  Uniprot ID: P06340
  ENST ID: ENST00000426685
  CDS Start-End: 77-829
cttcttctttacctccgccttgttcctgtcctcaccacacggactgagactgatttgattaaagcaccagagtgtaatggccctcagagcagggctggtcctggggttccacaccctgatgaccctcctgagcccgcaggaggcaggggccaccaaggctgaccacatgggctcctacggacccgccttctaccagtcttacggcgcctcgggccagttcacccatgaatttgatgaggaacagctgttctctgtggacctgaagaaaagcgaggccgtgtggcgtctgcctgagtttggtgactttgcccgctttgacccgcagggcgggctggccggcatcgccgcaatcaaagcccatctggacatcctggtggagcgctccaaccgcagcagagccatcaacgtgcctccacgggtgaccgtgctccccaagtctcgggtggagctgggccagcccaacatcctcatctgcatcgtggacaacatcttcccccctgtgatcaatatcacctggctacgcaacggccaaactgtcactgagggagtggcccagaccagcttctattcccagcctgaccatttgttccgcaagttccactacctgcccttcgtgccctcagccgaggacgtctatgactgccaggtggagcactggggcctggatgcgccactcctcaggcattgggagctccaggtgcctattccaccaccagatgccatggagaccctggtctgtgccctgggcctggccatcggcctggtgggcttcctcgtgggcaccgtcctcatcatcatgggcacatatgtgtccagtgtccccaggtaatgatccttctgagagaaatgacttgtgggagacaccctgcagatcctcatgggtttgtgacagcccctgcgtgctcagtgccctttaagtgcatcccgctgtgctgactttgagtgggatcaacatctgtcctacgggtcccctcttttttggccccagtattcatggcagggtttgttggacacctactagcttcccttcccattcaacacaaacacacattcttgctctacccaaagctctggctggcagcactaaatgctttggtggtgtttgcactgtgtcctttccaggccttggccagttcttccaggggtgaggcatgtggtgctggggattggcagccgtcctggggcccacacaggtgtgtcttgctccatttggcccattgtgtgttactttgtgaatgagccatttcacatggacttcatgaaatttgcctcctgagttcaggtttaccctgaaagggatgcagattatcctgttcctcacgaccccctcagctaacaacagttctgaagggtgctgggacaagacaggctcatggggactccactcctgcctgggtttactctgtatgaagaggccactggtatcctgccatgatgttatctcctttttctactttccctagagtcccatgcatgataaagagaggcccaaggcttggataaggtggccacttccctcagtggagtcagtcatgttaggtaggaggtggtagagtcggtctgcaaggtatctcgtaagaggggaggtccacctagacacattctaaatatgtggcctagaagattttggtctacttttctgtgaacaaaatttaaaacatacaaagagataaatcaccataccacatagtttatgtcaagaccaaaatgagcaatacagattacggttttcaaaccagaatgcacataagaactgcttgggatccttttaaaagtacaggcattggcctggtgcagtggctcattcctgtaatcccagcactttgggaggccaaggggacagaactgcttgaggccaagaggtggaaaccatcttgggctacatagagagaccccatctctacaaagaaagatttaaaaattaaccagccatggtggctcgcacctgtattcccagccactggggaggctgaggccggaggagtgcttgagcccaggagttcaaggctgcagtgagccaagattgcgccactgcactccagcctaggtgacagagtgagaccctgtctctaaataaataaataaataaaatataaaaataacagtcatcacccagacctactgaattagaatctcgggagtgcagggggcagcaacaggggggctgtcttttctgagaaggggtctcactctgtcaccaggctggagtgccatggcatgatctcagctcactgcaacctccacctcctgagttcaagccattctcctgcctcagcctcctgagtagctgggactacaggtgtgcgccactacactcagctaatttttgtattttaagtagagacggggtttcatcatgttggccaggatggcctccatctcttgacctcgtgatccacccaccttccctcccaaagtactggaattacaggcattagccactgtgcccagccgaggctgtcatttttaaccggctctggatgactctgatgcagccatcctggaccttggctgtggtctggtaactggaacccagtgacgtaatcaggtgccatcgggggtcatgggaaagggggatccccaaggtctgaggtggactaggaaggctttctgaagaacctgggtctgttagggcatcagccaatcaaggtacaagtaaatagaggcaaaatgagggtttgaactgtgagcagttggtcctggaaaagaaagaaaccaagagattatggggactcaatgggcttcttaagagggaataagttgaaatcaatgaccagaagaccctgatggaagtggaggaaaatcatctcaggcaaactttttgtgtgccagtaacagaaaccctctttgtgtgatcacatgcaaagtataggatatttgcaatatagccatggggaggagtgcagggcccaagggtagattttagccaggcctcccaggaacagaactcggatccgaaaagcccagagaagctagagctgcccctccaacactctcggatccacatggtctgtgttctctagacccccctgcatgttagcggtgttctctctctgtggactgactgtccttctcagtgaacatgtccacccgacagctcctgagtttatatcatctcaaccctcacaacccacagaggctgtgtctcctagtcacagctttaaattactggaaaaataaatgactggccaaacttggagcaggtgtccatcccagccctgtgtagttagagcaggaatcaagatctcaacacaaatgtggctgccaagcactcagccccggggcgaggggtcaagttcttctcagagaaagaggaataagttggttctcagaagacatcacaagatacgtgtgtacccaacaatctctgatctctgctgatcttttgcttagacgttaacttgatgcatcattggaaaggtgtttctctcatctctgtcctaaggcttgataaagtcattaaaattgtgttcttttgactaaagaaa

SEQ ID NO: 150986 - DNA, 3488 bp, Homo sapiens
  Payload ID: 9768
  Gene Symbol: HLA-DOA
  Gene Name: major histocompatibility complex, class II, DO alpha
  Uniprot ID: P06340
  ENST ID: ENST00000452598
  CDS Start-End: 77-829
cttcttctttacctccgccttgttcctgtcctcaccacacggactgagactgatttgattaaagcaccagagtgtaatggccctcagagcagggctggtcctggggttccacaccctgatgaccctcctgagcccgcaggaggcaggggccaccaaggctgaccacatgggctcctacggacccgccttctaccagtcttacggcgcctcgggccagttcacccatgaatttgatgaggaacagctgttctctgtggacctgaagaaaagcgaggccgtgtggcgtctgcctgagtttggtgactttgcccgctttgacccgcagggtgggctggccggcatcgccgcaatcaaagcccatctggacatcctggtggagcgctccaaccgcagcagagccatcaacgtgcctccacgggtgaccgtgctccccaagtctcgggtggagctgggccagcccaacatcctcatctgcatcgtggacaacatcttcccccctgtgatcaatatcacctggctacgcaacggccaaactgtcactgagggagtggcccagaccagcttctattcccagcctgaccatttgttccgcaagttccactacctgcccttcgtgccctcagccgaggacgtctatgactgccaggtggagcactggggcctggatgcgccactcctcaggcattgggagctccaggtgcctattccaccaccagatgccatggagaccctggtctgtgccctgggtctggccatcggcctggtgggcttcctcgtgggcaccgtcctcatcatcatgggcacatatgtgtccagtgtccccaggtaatgatccttctgagagaaatgacttgtgggagacaccctgcagatcctcatgggtttgtgacagcccctgcgtgctcagtgccctttaagtgcatcccgctgtgctgactttgagtgggatcaacatctgtcctacgggtcccctcttttttggccccagtattcatggcagggtttgttggacacctactagcttcccttcccattcaacacaaacacacattcttgctctacccaaagctctggctggcagcactaaatgctttggtggtgtttgcactgtgtcctttccaggccttggccagttcttccaggggtgaggcatgtggtgctggggattggcagccgtcctggggcccacacaggtgtgtcttgctccatttggcccattgtgtgttactttgtgaatgagccatttcacatggacttcatgaaatttgcctcctgagttcaggtttaccctgaaagggatgcagattatcctgttcctcacgaccccctcagctaacaacagttctgaagggtgctgggacaagacaggctcatggggactccactcctgcctgggtttactctgtatgaagaggccactggtatcctgccatgatgttatctcctttttctactttccctagagtcccatgcatgataaagagaggcccaaggcttggataaggtggccacttccctcagtggagtcagtcatgttaggtaggaggtggtagagtcggtctgcaaggtatctcgtaagaggggaggtccacctagacacactctaaatatgtggcctagaagattttggtctacttttctgtgaacagaatttaaaacatacaaagagataaatcaccataccacatagtttatgtcaagaccaaaatgagcaatacagattacggttttcaaaccagaatgcacataagaactgcttgggatccttttaaaagtacaggcattggcctggtgcagtggctcattcctgtaatcccagcactttgggaggccaaggggacaggactgcttgaggccaagaggtggaaaccatcttgggctacatagagagaccccatctctacaaagaaagatttaaaaattaaccaggcatggtggctcgcacctgtattcccagccactggggaggctgaggccggaggagtgcttgagcccaggagttcaaggctgcagtgagccaagattgcgccactgcactccagcctaggtgacagagtgagaccctgtctctaaataaataaataaataaaatataaaaataacagtcatcacccagacctactgaattagaatctcgggagtgcagggggcagcaacaggggggctgtcttttctgagaaggggtctcactctgtcaccaggctggagtgccatggcatgatctcagctcactgcaacctccacctcctgagttcaagccattctcctgcctcagcctcctgagtagctgggactacaggtgtgcgccactacactcagctaatttttgtattttaagtagagacggggtttcatcatgttggccaggatggcctccatctcttgacctcgtgatccacccaccttccctcccaaagtactggaattacaggcattagccactgtgcccagccgaggctgtcatttttaaccggctctggatgactctgatgcagccatcctggaccttggctgtggtctggtaactggaacccagtgacgtaatcaggtgccatcgggggtcatgggaaagggggatccccaaggtctgaggtggactaggaaggctttctgaagaacctgggtctgttagggcatcagccaatcaaggtacaagtaaatagaggcaaaatgagggtttgaactgtgagcagttggtcctggaaaagaaagaaaccaagagattatggggactcaatgggcttcttaagagagaataagttgaaatcaatgaccagaagaccctgatggaagtggaggagaatcatctcaggcaaactttttgtgtgccagtaacagaaaccctctttgtgtgatcacatgcaaagtataggatatttgcaatatagccatggggaggagtgcagggcccaagggtagattttagccaggcctcccaggaacagaactcggatccgaaaagcccagagaagctagagctgcccctccaacactctcggatccacatggtctgtgttctctagacccccctgcatgttagcggtgttctctctctgtggactgactgtccttctcagtgaacatgtccacccgacagctcctgagtttatatcatctcaaccctcacaacccacagaggctgtgtctcctagtcacagctttaaattactggaaaaataaatgactggccaaacttggagcaggtgtccatcccagccctgtgtagttagagcaggaatcaagatctcaacacaaatgtggctgccaagcactcagccccggggcgaggggtcaagttcttctcagagaaagaggaataagttggttctcagaagacatcacaagatacgtgtgtacccaacaatctctgatctctgctgatcttttgcttagacgttaacttgatgcatcattggaaaggtgtttctctcatctctgtcctaaggcttgataaagtcattaaaattgtgttcttttgactaaagaaa

SEQ ID NO: 150987 - DNA, 3488 bp, Homo sapiens; identical to SEQ ID NO: 150986
  Payload ID: 9768
  Gene Symbol: HLA-DOA
  Gene Name: major histocompatibility complex, class II, DO alpha
  Uniprot ID: P06340
  ENST ID: ENST00000426070
  CDS Start-End: 77-829

SEQ ID NO: 150988 - DNA, 303 bp, Homo sapiens
  Payload ID: 9768
  Gene Symbol: HLA-DOA
  Gene Name: major histocompatibility complex, class II, DO alpha
  ENST ID: ENST00000416763
  CDS Start-End: 44-303
accacacggactgagactgatttgattaaagcaccagagtgtaatggccctcagagcagggctggtcctggggttccacaccctgatgaccctcctgagcccgcaggaggcaggggccaccaaggggtgggctggccggcatcgccgcaatcaaagcccatctggacatcctggtggagcgctccaaccgcagcagagccatcaacgtgcctccacgggtgaccgtgctccccaagtctcgggtggagctgggccagcccaacatcctcatctgcatcgtggacaacatcttcccccctgtga

SEQ ID NO: 150989 - DNA, 303 bp, Homo sapiens; identical to SEQ ID NO: 150981
  Payload ID: 9768
  Gene Symbol: HLA-DOA
  Gene Name: major histocompatibility complex, class II, DO alpha
  ENST ID: ENST00000444109
  CDS Start-End: 44-303

SEQ ID NO: 150990 - DNA, 303 bp, Homo sapiens; identical to SEQ ID NO: 150988
  Payload ID: 9768
  Gene Symbol: HLA-DOA
  Gene Name: major histocompatibility complex, class II, DO alpha
  ENST ID: ENST00000455325
  CDS Start-End: 44-303

SEQ ID NO: 150991 - DNA, 868 bp, Homo sapiens
  Payload ID: 9768
  Gene Symbol: HLA-DOA
  Gene Name: major histocompatibility complex, class II, DO alpha
  ENST ID: ENST00000450833
  CDS Start-End: 25-210
atttgattaaagcaccagagtgtaatggccctcagagcagggctggtcctggggttccacaccctgatgaccctcctgagcccgcaggaggcaggggccaccaaggctgaccacatgggctcctacggaccgccttctaccagtcttacggcgcctcgggccagttcacccatgaatttgatgaggaacagctgttctctgtggacctgaagaaaagcgaggccgtgtggcgtctgcctgagtttggtgactttgcccgctttgacccgcagggcgggctggccggcatcgccgcaatcaaagcccatctggacatcctggtggagcgctccaaccgcagcagagccatcaacgtgcctccacgggtgaccgtgctccccaagtctcgggtggagctgggccagcccaacatcctcatctgcatcgtggacaacatcttcccccctgtgatcaatatcacctggctgcgcaacggccaaactgtcactgagggagtggcccagaccagcttctattcccagcctgaccatttgttccgcaagttccactacctgcccttcgtgccctcagccgaggacgtctatgactgccaggtggagcactggggcctggatgcgccactcctcaggcattgggagctccaggtgcctattccaccaccagatgccatggagaccctggtctgtgccctgggcctggccatcggcctggtgggcttcctcgtgggcaccgtcctcatcatcatgggcacatatgtgtccagtgtccccaggtaatgatccttctgagagaaatgacttgtgggagacaccctgcagatcctcatgggtttgtgacagcccctgcgtgctcagtgccctttaagtgc

SEQ ID NO: 150992 - DNA, 303 bp, Homo sapiens; identical to SEQ ID NO: 150981
  Payload ID: 9768
  Gene Symbol: HLA-DOA
  Gene Name: major histocompatibility complex, class II, DO alpha
  ENST ID: ENST00000418857
  CDS Start-End: 44-303

SEQ ID NO: 150993 - DNA, 303 bp, Homo sapiens
  Payload ID: 9768
  Gene Symbol: HLA-DOA
  Gene Name: major histocompatibility complex, class II, DO alpha
  ENST ID: ENST00000457663
  CDS Start-End: 44-303
accacacggactgagactgatttgattaaagcaccagagtgcaatggccctcagagcagggctggtcctggggttccacaccctgatgaccctcctgagcccgcaggaggcaggggccaccaaggggcgggctggccggcatcgccgcaatcaaagcccatctggacatcctggtggagcgctccaaccgcagcagagccatcaacgtgcctccacgggtgaccgtgctccccaagtctcgggtggagctgggccagcccaacatcctcatctgcatcgtggacaacatcttcccccctgtga

SEQ ID NO: 150994 - DNA, 3489 bp, Homo sapiens
  Payload ID: 9768
  Gene Symbol: HLA-DOA
  Gene Name: major histocompatibility complex, class II, DO alpha
  Uniprot ID: P06340
  ENST ID: ENST00000434335
  CDS Start-End: 77-829
cttcttctttacctccgccttgttcctgtcctcaccacacggactgagactgatttgattaaagcaccagagtgcaatggccctcagagcagggctggtcctggggttccacaccctgatgaccctcctgagcccgcaggaggcaggggccaccaaggctgaccacatgggctcctacggacccgccttctaccagtcttacggcgcctcgggccagttcacccatgaatttgatgaggaacagctgttctctgtggacctgaagaaaagcgaggccgtgtggcgtctgcctgagtttggcgactttgcccgctttgacccgcagggcgggctggccggcatcgccgcaatcaaagcccatctggacatcctggtggagcgctccaaccgcagcagagccatcaacgtgcctccacgggtgaccgtgctccccaagtctcgggtggagctgggccagcccaacatcctcatctgcatcgtggacaacatcttcccccctgtgatcaatatcacctggctgcgcaacggccaaactgtcactgagggagtggcccagaccagcttctattcccagcctgaccatttgttccgcaagttccactacctgcccttcgtgccctcagccgaggacgtctatgactgccaggtggagcactggggcctggatgcgccactcctcaggcattgggagctccaggtgcctattccaccaccagatgccatggagaccctggtctgtgccctgggcctggccatcggcctggtgggcttcctcgtgggcaccgtcctcatcatcatgggcacatatgtgtccagtgtccccaggtaatgatccttctgagagaaatgacttgtgggagacaccctgcagatcctcatgggtttgtgacagcccctgcgtgctcagtgccctttaagtgcatcccgctgtgctgactttgagtgggatcaacatctgtcctacgggtcccctcttttttggccccagtattcatggcagggtttgttggacacctactagcttcccttcccattcaacacacacacacattcttgctctacccaaagctctggctggcagcactaaatgctttggtggtatttgcactgtgtcctttccaggccttggccagttcttccaggggtgaggcatgtggtgctggggattggcagccatcctggggcccacacaggtgtgtcttgctccatttggcccattgtgtgttactttgtgaatgagccatttcacatggacttcatgaaatttgcctcctgagttcaggtttaccctgaaagggatgcagattatcctgttcctcacgaccccctcagctaacaacagttctgaagggtgctgggacaggacaggctcatggggactccactcctgcctgggtttactctgtatgaagaggccactggtatcctgccatgatgttatctcctttttctacttttccctagagtcccatgcatgataaagagaggcccaaggcttggataaggtggccacttccctcagtggagtcagtcatgttaggtaggaggtggtagagtcggtctgcaaggtatctcgtaagaggggaggtccacctagacacactctaaatatgtggcctagaagattttggtctacttttctgtgaacagaatttaaaacatacaaagagataaatcaccataccacatagtttatgtcaagaccaaaatgagcaatacagattacggttttcaaaccagaatgcacataagaactgcttgggatccttttaaaagtacaggcattggcctggtgcagtggctcattcctgtaatcccagcactttgggaggccaaggggacaggactgcttgaggccaagaggtggaaaccatcttgggctacatagagagaccccatctctacaaagaaagatttaaaaattaaccagccatggtggctcgcacctgtattcccagccactggggaggctgaggccggaggagtgcttgagcccaggagttcaaggctgcagtgagccaagattgcgccactgcactccagcctaggtgacagagtgagaccctgtctctaaataaataaataaataaaatataaaaataacagtcatcacccagacctactgaattagaatctcgggagtgcagggggcagcaacagggaggctgtcttttctgagaaggagtctcactctgtcaccaggctggagtgccatggcatgatctcagctcactgcaacctccacctcctgagttcaagccattctcctgcctcagcctcctgagtagctgggactacaggtgtgcgccactacactcagctaatttttgtattttaagtagagacggggtttcatcatgttggccaggatggcctccatctcttgacctcgtgatccacccaccttccctcccaaagtactggaattacaggcattagccactgtgcccagccgaggctgtcatttttaaccggctctggatgactctgatgcagccatcctggaccttggctgtggtctggtaactggaacccagtgacgtaatcaggtgccatcgggggtcatgggaaagggggatccccaaggtctgaggtggactaggaaggctttctgaagaacctgggtctgttagggcatcagccaatcaaggtacaagtaaatagaggcaaaatgagggtttgaactgtgagcagttggtcctggaaaagaaagaaaccaagagattatggggactcaatgggcttcttaagagagaataagttgaaatcaatgaccagaagaccctgatggaagtggaggagaatcatctcaggcaaactttttgtgtgccagtaacagaaaccctctttgtgtgatcacatgcaaagtataggatatttgcaatatagccatggggaggagtgcagggcccaagggtagattttagccaggcctcccaggaacagaactcggatccgaaaagcccagagaagctagagctgcccctccaacactctcggatccacatggtctgtgttctctagacccccctgcatgttagcggtgttctctctctgtggactgactgtccttctcagtgaacatgtccacccgacagctcctgagtttatatcatctcaaccctcacaacccacagaggctgtgtctcctagtcacagctttaaattactggaaaaataaatgactggccaaacttggagcaggtgtccatcccagccctgtgtagttagagcaggaatcaagatctcaacacaaatgtggctgccaagcactcagccccggggcgaggggtcaagttcttctcagagaaagaggaataagttggttctcagaagacatcacaagatacgtgtgtacccaacaatctctgatctctgctgatcttttgcttagacgttaacttgatgcatcattggaaaggtgtttctctcatctctgtcctaaggcttgataaagtcattaaaattgtgttcttttgactaaagaaa

SEQ ID NO: 150995 - DNA, 868 bp, Homo sapiens
  Payload ID: 9768
  Gene Symbol: HLA-DOA
  Gene Name: major histocompatibility complex, class II, DO alpha
  ENST ID: ENST00000549881
  CDS Start-End: 25-210
atttgattaaagcaccagagtgtaatggccctcagagcagggctggtcctggggttccacaccctgatgaccctcctgagcccgcaggaggcaggggccaccaaggctgaccacatgggctcctacggaccgccttctaccagtcttacggcgcctcgggccagttcacccatgaatttgatgaggaacagctgttctctgtggacctgaagaaaagcgaggccgtgtggcgtctgcctgagtttggtgactttgcccgctttgacccgcagggtgggctggccggcatcgccgcaatcaaagcccatctggacatcctggtggagcgctccaaccgcagcagagccatcaacgtgcctccacgggtgaccgtgctccccaagtctcgggtggagctgggccagcccaacatcctcatctgcatcgtggacaacatcttcccccctgtgatcaatatcacctggctacgcaacggccaaactgtcactgagggagtggcccagaccagcttctattcccagcctgaccatttgttccgcaagttccactacctgcccttcgtgccctcagccgaggacgtctatgactgccaggtggagcactggggcctggatgcgccactcctcaggcattgggagctccaggtgcctattccaccaccagatgccatggagaccctggtctgtgccctgggtctggccatcggcctggtgggcttcctcgtgggcaccgtcctcatcatcatgggcacatatgtgtccagtgtccccaggtaatgatccttctgagagaaatgacttgtgggagacaccctgcagatcctcatgggtttgtgacagcccctgcgtgctcagtgccctttaagtgc

SEQ ID NO: 150996 - DNA, 868 bp, Homo sapiens
  Payload ID: 9768
  Gene Symbol: HLA-DOA
  Gene Name: major histocompatibility complex, class II, DO alpha
  ENST ID: ENST00000547284
  CDS Start-End: 25-210
atttgattaaagcaccagagtgcaatggccctcagagcagggctggtcctggggttccacaccctgatgaccctcctgagcccgcaggaggcaggggccaccaaggctgaccacatgggctcctacggaccgccttctaccagtcttacggcgcctcgggccagttcacccatgaatttgatgaggaacagctgttctctgtggacctgaagaaaagcgaggccgtgtggcgtctgcctgagtttggcgactttgcccgctttgacccgcagggcgggctggccggcatcgccgcaatcaaagcccatctggacatcctggtggagcgctccaaccgcagcagagccatcaacgtgcctccacgggtgaccgtgctccccaagtctcgggtggagctgggccagcccaacatcctcatctgcatcgtggacaacatcttcccccctgtgatcaatatcacctggctgcgcaacggccaaactgtcactgagggagtggcccagaccagcttctattcccagcctgaccatttgttccgcaagttccactacctgcccttcgtgccctcagccgaggacgtctatgactgccaggtggagcactggggcctggatgcgccactcctcaggcattgggagctccaggtgcctattccaccaccagatgccatggagaccctggtctgtgccctgggcctggccatcggcctggtgggcttcctcgtgggcaccgtcctcatcatcatgggcacatatgtgtccagtgtccccaggtaatgatccttctgagagaaatgacttgtgggagacaccctgcagatcctcatgggtttgtgacagcccctgcgtgctcagtgccctttaagtgc

SEQ ID NO: 150997 - DNA, 868 bp, Homo sapiens; identical to SEQ ID NO: 150995
  Payload ID: 9768
  Gene Symbol: HLA-DOA
  Gene Name: major histocompatibility complex, class II, DO alpha
  ENST ID: ENST00000546375
  CDS Start-End: 25-210

SEQ ID NO: 150998 - DNA, 868 bp, Homo sapiens; identical to SEQ ID NO: 150991
  Payload ID: 9768
  Gene Symbol: HLA-DOA
  Gene Name: major histocompatibility complex, class II, DO alpha
  ENST ID: ENST00000549845
  CDS Start-End: 25-210

SEQ ID NO: 150999 - DNA, 868 bp, Homo sapiens; identical to SEQ ID NO: 150991
  Payload ID: 9768
  Gene Symbol: HLA-DOA
  Gene Name: major histocompatibility complex, class II, DO alpha
  ENST ID: ENST00000550072
  CDS Start-End: 25-210

SEQ ID NO: 151000 - DNA, 868 bp, Homo sapiens
  Payload ID: 9768
  Gene Symbol: HLA-DOA
  Gene Name: major histocompatibility complex, class II, DO alpha
  ENST ID: ENST00000552368
  CDS Start-End: 25-210
atttgattaaagcaccagagtgtaatggccctcagagcagggctggtcctggggttccacaccctgatgaccctcctgagcccgcaggaggcaggggccaccaaggctgaccacatgggctcctacggaccgccttctaccagtcttacggcgcctcgggccagttcacccatgaatttgatgaggaacagctgttctctgtggacctgaagaaaagcgaggccgtgtggcgtctgcctgagtttggtgactttgcccgctttgacccgcagggcgggctggccggcatcgccgcaatcaaagcccatctggacatcctggtggagcgctccaaccgcagcagagccatcaacgtgcctccacgggtgaccgtgctccccaagtctcgggtggagctgggccagcccaacatcctcatctgcatcgtggacaacatcttcccccctgtgatcaatatcacctggctacgcaacggccaaactgtcactgagggagtggcccagaccagcttctattcccagcctgaccatttgttccgcaagttccactacctgcccttcgtgccctcagccgaggacgtctatgactgccaggtggagcactggggcctggatgcgccactcctcaggcattgggagctccaggtgcctattccaccaccagatgccatggagaccctggtctgtgccctgggcctggccatcggcctggtgggcttcctcgtgggcaccgtcctcatcatcatgggcacatatgtgtccagtgtccccaggtaatgatccttctgagagaaatgacttgtgggagacaccctgcagatcctcatgggtttgtgacagcccctgcgtgctcagtgccctttaagtgc

SEQ ID NO: 151001 - DNA, 1372 bp, Homo sapiens
  Payload ID: 9769
  Gene Symbol: HLA-DOB
  Gene Name: major histocompatibility complex, class II, DO beta
  Uniprot ID: P13765
  ENST ID: ENST00000438763
  CDS Start-End: 98-919
gatttatactcttaatgggtactttctgactgaattttatgagctcattctgaagaggctgacgattttactatctcatttttttcctttctccagaatgggttctgggtgggtcccctgggtggtggctctgctagtgaatctgacccgactggattcctccatgactcaaggcacagactctccagaagattttgtgattcaggcaaaggctgactgttacttcaccaacgggacagaaaaggtgcagtttgtggtcagattcatctttaacttggaggagtatgtacgtttcgacagtgatgtggggatgtttgtggcattgaccaagctggggcagccagatgctgagcagtggaacagccggctggatctcttggagaggagcagacaggccgtggatggggtctgtagacacaactacaggctgggcgcacccttcactgtggggagaaaagtgcaaccagaggtgacagtgtacccagagaggaccccactcctgcaccagcataatctgctgcactgctctgtgacaggcttctatccaggggatatcaagatcaagtggttcctgaatgggcaggaggagagagctggggtcatgtccactggccctatcaggaatggagactggacctttcagactgtggtgatgctagaaatgactcctgaacttggacatgtctacacctgccttgtcgatcactccagcctgctgagccctgtttctgtggagtggagagctcagtctgaatattcttggagaaagatgctgagtggcattgcagccttcctacttgggctaatcttccttctggtgggaatcgtcatccagctaagggctcagaaaggatatgtgaggacgcagatgtctggtaatgaggtctcaagagctgttctgctccctcagtcatgctaaggtcctcactgaagcttctctctctggagcctgaagtagtgatgagtagtctgggccctgggtgaggtaaaggacattcatgaggtcaatgttctgggaataactctcttccctgatccttggaggagcccgaactgattctggagctctgtgttctgagatcatgcatctcccacccatctgcccttctcccttctacgtgtacatcattaatccccattgccaagggcattgtccagaaactcccctgagaccttactccttccagccccaaatcatttacttttctgtggtccagccctactcctataagtcatgatctccaaagctttctgtcttccaactgcagtctccacagtcttcagaagacaaatgctcaggtagtcactgtttccttttcactgtttttaaaaaccttttattgtcaaataaaatggagatacaaaaaatgta

SEQ ID NO: 151002 - DNA, 543 bp, Homo sapiens
  Payload ID: 9769
  Gene Symbol: HLA-DOB
  Gene Name: major histocompatibility complex, class II, DO beta
  ENST ID: ENST00000413252
  CDS Start-End: 1-543
gaatctgacccgactggattcctccatgactcaaggcacagactctccagaagattttgtgattcaggcaaaggctgactgttacttcaccaacgggacagaaaaggtgcagtttgtggtcagattcatctttaacttggaggagtatgtacgtttcgacagtgatgtggggatgtttgtggcattgaccaagctggggcagccagatgctgagcagtggaacagccggctggatctcttggagaggagcagacaggccgtggatggggtctgtagacacaactacaggctgggcgcacccttcactgtggggagaaaagaggtgacagtgtacccagagaggaccccactcctgcaccagcataatctgctgcactgctctgtgacaggcttctatccaggggatatcaagatcaagtggttcctgaatgggcaggaggagagagctggggtcatgtccactggccctatcaggaatggagactggacctttcagactgtggtgatgctagaaatgactcctgaacttggacatgtctacac

SEQ ID NO: 151003 - DNA, 543 bp, Homo sapiens; identical to SEQ ID NO: 151002
  Payload ID: 9769
  Gene Symbol: HLA-DOB
  Gene Name: major histocompatibility complex, class II, DO beta
  ENST ID: ENST00000453971
  CDS Start-End: 1-543

SEQ ID NO: 151004 - DNA, 1372 bp, Homo sapiens
  Payload ID: 9769
  Gene Symbol: HLA-DOB
  Gene Name: major histocompatibility complex, class II, DO beta
  Uniprot ID: P13765
  ENST ID: ENST00000456406
  CDS Start-End: 98-919
gatttatactcttaatgggtactttctgactgaattttatgaactcattctgaagaggctgacgattttactgtctcatttttttcctttctccagaatgggttctgggtgggtcccctgggtggtggctctgctagtgaatctgacccgactggattcctccatgactcaaggcacagactctccagaagattttgtgattcaggcaaaggctgactgttacttcaccaacgggacagaaaaggtgcagtttgtggtcagattcatctttaacttggaggagtatgtacgtttcgacagtgatgtggggatgtttgtggcattgaccaagctggggcagccagatgctgagcagtggaacagccggctggatctcttggagaggagcagacaggccgtggatggggtctgtagacacaactacaggctgggcgcacccttcactgtggggagaaaagtgcaaccagaggtgacagtgtacccagagaggaccccactcctgcaccagcataatctgctgcactgctctgtgacaggcttctatccaggggatatcaagatcaagtggttcctgaatgggcaggaggagagagctggggtcatgtccactggccctatcaggaatggagactggacctttcagactgtggtgatgctagaaatgactcctgaacttggacatgtctacacctgccttgtcgatcactccagcctgctgagccctgtttctgtggagtggagagctcagtctgaatattcttggagaaagatgctgagtggcattgcagccttcctacttgggctaatcttccttctggtgggaatcgtcatccagctaagggctcagaaaggatatgtgaggacgcagatgtctggtaatgaggtctcaagagctgttctgctccctcagtcatgctaaggtcctcactgaagcttctctctctggagcctgaagtagtgatgagtagtctgggccctgggtgaggtaaaggacattcatgaggtcaatgttctgggaataactctcttccctgatccttggaggagcccgaactgattctggagctctgtgttctgagatcatgcatctcccacccatctgcccttctcccttctacgtgtacatcattaatccccattgccaagggcattgtccagaaactcccctgagaccttactccttccagccccaaatcatttacttttctgtggtccagccctactcctataagtcatgatctccaaagctttctgtcttccaactgcagtctccacagtcttcagaagacaaatgctcaggtagtcactgtttccttttcactgtttttaaaaaccttttattgtcaaataaaatggagatacaaaaaatgta

SEQ ID NO: 151005 - DNA, 543 bp, Homo sapiens; identical to SEQ ID NO: 151002
  Payload ID: 9769
  Gene Symbol: HLA-DOB
  Gene Name: major histocompatibility complex, class II, DO beta
  ENST ID: ENST00000447394
  CDS Start-End: 1-543

SEQ ID NO: 151006 - DNA, 1372 bp, Homo sapiens; identical to SEQ ID NO: 151004
  Payload ID: 9769
  Gene Symbol: HLA-DOB
  Gene Name: major histocompatibility complex, class II, DO beta
  Uniprot ID: P13765
  ENST ID: ENST00000426644
  CDS Start-End: 98-919

SEQ ID NO: 151007 - DNA, 1372 bp, Homo sapiens
  Payload ID: 9769
  Gene Symbol: HLA-DOB
  Gene Name: major histocompatibility complex, class II, DO beta
  Uniprot ID: P13765
  ENST ID: ENST00000454286
  CDS Start-End: 98-919
gatttatactcttaatgggtactttctgactgaattttatgaactcattctgaagaggctgacgattttactgtctcatttttttcctttctccagaatgggttctgggtgggtcccctgggtggtggctctgctagtgaatctgacccgactggattcctccatgactcaaggcacagactctccagaagattttgtgattcaggcaaaggctgactgttacttcaccaacgggacagaaaaggtgcagtttgtggtcagattcatctttaacttggaggagtatgtacgtttcgacagtgatgtggggatgtttgtggcattgaccaagctggggcagccagatgctgagcagtggaacagccggctggatctcttggagaggagcagacaggccgtggatggggtctgtagacacaactacaggctgggcgcacccttcactgtggggagaaaagtgcaaccagaggtgacagtgtacccagagaggaccccactcctgcaccagcataatctgctgcactgctctgtgacaggcttctatccaggggatatcaagatcaagtggttcctgaatgggcaggaggagagagctggggtcatgtccactggccctatcaggaatggagactggacctttcagactgtggtgatgctagaaatgactcctgaacttggacatgtctacacctgccttgtcgatcactccagcctgctgagccctatttctgtggagtggagagctcagtctgaatattcttggagaaagatgctgagtggcattgcagccttcctacttgggctaatcttccttctggtgggaatcgtcatccagctaagggctcagaaaggatatgtgaggacgcagatgtctggtaatgaggtctcaagagctgttctgctccctcagtcatgctaaggtcctcactgaagcttctctctctggagcctgaagtagtgatgagtagtctgggccctgggtgaggtaaaggacattcatgaggtcaatgttctgggaataactctcttccctgatccttggaggagcccgaactgattctggagctctgtgttctgagatcatgcatctcccacccatctgcccttctcccttctacgtgtacatcattaatccccattgccaagggcattgtccagaaactcccctgagaccttactccttccagccccaaatcatttacttttctgtggtccagccctactcctataagtcatgatctccaaagctttctgtcttccaactgcagtctccacagtcttcagaagacaaatgctcaggtagtcactgtttccttttcactgtttttaaaaaccttttattgtcaaataaaatggagatacaaaaaatgta

SEQ ID NO: 151008 - DNA, 543 bp, Homo sapiens
  Payload ID: 9769
  Gene Symbol: HLA-DOB
  Gene Name: major histocompatibility complex, class II, DO beta
  ENST ID: ENST00000439310
  CDS Start-End: 1-543
gaatctgacccgactggattcctccatgactcaaggcacagactctccagaagactttgtgattcaggcaaaggctgactgttacttcaccaacgggacagaaaaggtgcagtttgtggtcagattcatctttaacttggaggagtatgtacgtttcgacagtgatgtggggatgtttgtggcattgaccaagctggggcagccagatgctgagcagtggaacagccggctggatctcttggagaggagcagacaggccgtggatggggtctgtagacacaactacaggctgggcgcacccttcactgtggggagaaaagaggtgacagtgtacccagagaggaccccactcctgcaccagcataatctgctgcactgctctgtgacaggcttctatccaggggatatcaagatcaagtggttcctgaatgggcaggaggagagagctggggtcatgtccactggccctatcaggaatggagactggacctttcagactgtggtgatgctagaaatgactcctgaacttggacatgtctacac

SEQ ID NO: 151009 - DNA, 1372 bp, Homo sapiens
  Payload ID: 9769
  Gene Symbol: HLA-DOB
  Gene Name: major histocompatibility complex, class II, DO beta
  Uniprot ID: P13765
  ENST ID: ENST00000447178
  CDS Start-End: 98-919
gatttatactcttaatgggtactttctgactgaattttatgagctcattctgaagaggctgacgattttactatctcatttttttcctttctccagaatgggttctgggtgggtcccctgggtggtggctctgctagtgaatctgacccgactggattcctccatgactcaaggcacagactctccagaagactttgtgattcaggcaaaggctgactgttacttcaccaacgggacagaaaaggtgcagtttgtggtcagattcatctttaacttggaggagtatgtacgtttcgacagtgatgtggggatgtttgtggcattgaccaagctggggcagccagatgctgagcagtggaacagccggctggatctcttggagaggagcagacaggccgtggatggggtctgtagacacaactacaggctgggcgcacccttcactgtggggagaaaagtgcaaccagaggtgacagtgtacccagagaggaccccactcctgcaccagcataatctgctgcactgctctgtgacaggcttctatccaggggatatcaagatcaagtggttcctgaatgggcaggaggagagagctggggtcatgtccactggccctatcaggaatggagactggacctttcagactgtggtgatgctagaaatgactcctgaacttggacatgtctacacctgccttgtcgatcactccagcctgctgagccctgtttctgtggagtggagagctcagtctgaatattcttggagaaagatgctgagtggcattgcagccttcctacttgggctaatcttccttctggtgggaatcgtcatccagctaagggctcagaaaggatatgtgaggacgcagatgtctggtaatgaggtctcaagagctgttctgctccctcagtcatgctaaggtcctcactgaagcttctctctctggagcctgaagtagtgatgagtagtctgggccctgggtgaggtaaaggacattcatgaggtcaatgttctgggaataactctcttccctgatccttggaggagcccgaactgattctggagctctgtgttctgagatcatgcatctcccacccatctgcccttctcccttctacgtgtacatcattaatccccattgccaagggcattgtccagaaactcccctgagaccttactccttccagtcccaaatcatttacttttctgtggtccagccctactcctataagtcatgatctccaaagctttctgtcttccaactgcagtctccacagtcttcagaagacaaatgctcaggtagtcactgtttccttttcactgtttttaaaaaccttttattgtcaaataaaatggagatacaaaaaatgta

SEQ ID NO: 151010 - DNA, 543 bp, Homo sapiens; identical to SEQ ID NO: 151002
  Payload ID: 9769
  Gene Symbol: HLA-DOB
  Gene Name: major histocompatibility complex, class II, DO beta
  ENST ID: ENST00000455155
  CDS Start-End: 1-543

SEQ ID NO: 151011 - DNA, 1372 bp, Homo sapiens
  Payload ID: 9769
  Gene Symbol: HLA-DOB
  Gene Name: major histocompatibility complex, class II, DO beta
  Uniprot ID: P13765
  ENST ID: ENST00000454969
  CDS Start-End: 98-919
gatttatactcttaatgggtactttctgactgaattttatgagctcattctgaagaggctgacgattttactatctcatttttttcctttctccagaatgggttctgggtgggtcccctgggtggtggctctgctagtgaatctgacccgactggattcctccatgactcaaggcacagactctccagaagattttgtgattcaggcaaaggctgactgttacttcaccaacgggacagaaaaggtgcagtttgtggtcagattcatctttaacttggaggagtatgtacgtttcgacagtgatgtggggatgtttgtggcattgaccaagctggggcagccagatgctgagcagtggaacagccggctggatctcttggagaggagcagacaggccgtggatggggtctgtagacacaactacaggctgggcgcacccttcactgtggggagaaaagtgcaaccagaggtgacagtgtacccagagaggaccccactcctgcaccagcataatctgctgcactgctctgtgacaggcttctatccaggggatatcaagatcaagtggttcctgaatgggcaggaggagagagctggggtcatgtccactggccctatcaggaatggagactggacctttcagactgtggtgatgctagaaatgactcctgaacttggacatgtctacacctgccttgtcgatcactccagcctgctgagccctgtttctgtggagtggagagctcagtctgaatattcttggagaaagatgctgagtggcattgcagccttcctacttgggctaatcttccttctggtgggaatcgtcatccagctaagggctcagaaaggatatgtgaggacgcagatgtctggtaatgaggtctcaagagctgttctgctccctcagtcatgctaaggtcctcactgaagcttctctctctggagcctgaaatagtgatgagtagtctgggccctgggtgaggtaaaggacattcatgaggtcaatgttctgggaataactctcttccctgatccttggaggagcccgaactgattctggagctctgtgttctgagatcatgcatctcccacccatctgcccttctcccttctacgtgtacatcattaatccccattgccaagggcattgtccagaaactcccctgagaccttactccttccagccccaaatcatttacttttctgtggtccagccctactcctataagtcatgatctccaaagctttctgtcttccaactgcagtctccacagtcttcagaagacaaatgctcaggtagtcactgtttccttttcactgtttttaaaaaccttttattgtcaaataaaatggagatacaaaaaatgta

SEQ ID NO: 151012 - DNA, 543 bp, Homo sapiens; identical to SEQ ID NO: 151002
  Payload ID: 9769
  Gene Symbol: HLA-DOB
  Gene Name: major histocompatibility complex, class II, DO beta
  ENST ID: ENST00000448690
  CDS Start-End: 1-543

SEQ ID NO: 151013 - DNA, 1188 bp, Homo sapiens
  Payload ID: 9769
  Gene Symbol: HLA-DOB
  Gene Name: major histocompatibility complex, class II, DO beta
  ENST ID: ENST00000472450
  CDS Start-End: 1-735
gtctcatttttttcctttctccagaatgggttctgggtgggtcccctgggtggtggctctgctagtgaatctgacccgactggattcctccatgactcaaggcacagactctccagtgatgtggggatgtttgtggcattgaccaagctggggcagccagatgctgagcagtggaacagccggctggatctcttggagaggagcagacaggccgtggatggggtctgtagacacaactacaggctgggcgcacccttcactgtggggagaaaagtgcaaccagaggtgacagtgtacccagagaggaccccactcctgcaccagcataatctgctgcactgctctgtgacaggcttctatccaggggatatcaagatcaagtggttcctgaatgggcaggaggagagagctggggtcatgtccactggccctatcaggaatggagactggacctttcagactgtggtgatgctagaaatgactcctgaacttggacatgtctacacctgccttgtcgatcactccagcctgctgagccctgtttctgtggagtggagagctcagtctgaatattcttggagaaagatgctgagtggcattgcagccttcctacttgggctaatcttccttctggtgggaatcgtcatccagctaagggctcagaaaggatatgtgaggacgcagatgtctggtaatgaggtctcaagagctgttctgctccctcagtcatgctaaggtcctcactgaagcttctctctctggagcctgaagtagtgatgagtagtctgggccctgggtgaggtaaaggacattcatgaggtcaatgttctgggaataactctcttccctgatccttggaggagcccgaactgattctggagctctgtgttctgagatcatgcatctcccacccatctgcccttctcccttctacgtgtacatcattaatccccattgccaagggcattgtccagaaactcccctgagaccttactccttccagccccaaatcatttacttttctgtggtccagccctactcctataagtcatgatctccaaagctttctgtcttccaactgcagtctccacagtcttcagaagacaaatgctcaggtagtcactgtttccttttcactgtttttaaaaaccttttattgtcaaataaaatggagatacaaaaaatgta

SEQ ID NO: 151014 - DNA, 1188 bp, Homo sapiens
  Payload ID: 9769
  Gene Symbol: HLA-DOB
  Gene Name: major histocompatibility complex, class II, DO beta
  ENST ID: ENST00000474604
  CDS Start-End: 26-142
gtctcatttttttcctttctccagaatgggttctgggtgggtcccctgggtggtggctctgctagtgaatctgacccgactggattcctccatgactcaaggcacagactctccagtgatgtggggatgtttgtggcattgaccaagctggggcagccagatgctgagcagtggaacagccggctggatctcttggagaggagcagacaggccgtggatggggtctgtagacacaactacaggctgggcgcacccttcactgtggggagaaaagtgcaaccagaggtgacagtgtacccagagaggaccccactcctgcaccagcataatctgctgcactgctctgtgacaggcttctatccaggggatatcaagatcaagtggttcctgaatgggcaggaggagagagctggggtcatgtccactggccctatcaggaatggagactggacctttcagactgtggtgatgctagaaatgactcctgaacttggacatgtctacacctgccttgtcgatcactccagcctgctgagccctatttctgtggagtggagagctcagtctgaatattcttggagaaagatgctgagtggcattgcagccttcctacttgggctaatcttccttctggtgggaatcgtcatccagctaagggctcagaaaggatatgtgaggacgcagatgtctggtaatgaggtctcaagagctgttctgctccctcagtcatgctaaggtcctcactgaagcttctctctctggagcctgaagtagtgatgagtagtctgggccctgggtgaggtaaaggacattcatgaggtcaatgttctgggaataactctcttccctgatccttggaggagcccgaactgattctggagctctgtgttctgagatcatgcatctcccacccatctgcccttctcccttctacgtgtacatcattaatccccattgccaagggcattgtccagaaactcccctgagaccttactccttccagccccaaatcatttacttttctgtggtccagccctactcctataagtcatgatctccaaagctttctgtcttccaactgcagtctccacagtcttcagaagacaaatgctcaggtagtcactgtttccttttcactgtttttaaaaaccttttattgtcaaataaaatggagatacaaaaaatgta

SEQ ID NO: 151015 - DNA, 1188 bp, Homo sapiens
  Payload ID: 9769
  Gene Symbol: HLA-DOB
  Gene Name: major histocompatibility complex, class II, DO beta
  ENST ID: ENST00000477041
  CDS Start-End: 26-142
atctcatttttttcctttctccagaatgggttctgggtgggtcccctgggtggtggctctgctagtgaatctgacccgactggattcctccatgactcaaggcacagactctccagtgatgtggggatgtttgtggcattgaccaagctggggcagccagatgctgagcagtggaacagccggctggatctcttggagaggagcagacaggccgtggatggggtctgtagacacaactacaggctgggcgcacccttcactgtggggagaaaagtgcaaccagaggtgacagtgtacccagagaggaccccactcctgcaccagcataatctgctgcactgctctgtgacaggcttctatccaggggatatcaagatcaagtggttcctgaatgggcaggaggagagagctggggtcatgtccactggccctatcaggaatggagactggacctttcagactgtggtgatgctagaaatgactcctgaacttggacatgtctacacctgccttgtcgatcactccagcctgctgagccctgtttctgtggagtggagagctcagtctgaatattcttggagaaagatgctgagtggcattgcagccttcctacttgggctaatcttccttctggtgggaatcgtcatccagctaagggctcagaaaggatatgtgaggacgcagatgtctggtaatgaggtctcaagagctgttctgctccctcagtcatgctaaggtcctcactgaagcttctctctctggagcctgaaatagtgatgagtagtctgggccctgggtgaggtaaaggacattcatgaggtcaatgttctgggaataactctcttccctgatccttggaggagcccgaactgattctggagctctgtgttctgagatcatgcatctcccacccatctgcccttctcccttctacgtgtacatcattaatccccattgccaagggcattgtccagaaactcccctgagaccttactccttccagccccaaatcatttacttttctgtggtccagccctactcctataagtcatgatctccaaagctttctgtcttccaactgcagtctccacagtcttcagaagacaaatgctcaggtagtcactgtttccttttcactgtttttaaaaaccttttattgtcaaataaaatggagatacaaaaaatgta

SEQ ID NO: 151016 - DNA, 1188 bp, Homo sapiens; identical to SEQ ID NO: 151013
  Payload ID: 9769
  Gene Symbol: HLA-DOB
  Gene Name: major histocompatibility complex, class II, DO beta
  ENST ID: ENST00000463161
  CDS Start-End: 26-142

SEQ ID NO: 151017 - DNA, 1188 bp, Homo sapiens
  Payload ID: 9769
  Gene Symbol: HLA-DOB
  Gene Name: major histocompatibility complex, class II, DO beta
  ENST ID: ENST00000465683
  CDS Start-End: 26-142
atctcatttttttcctttctccagaatgggttctgggtgggtcccctgggtggtggctctgctagtgaatctgacccgactggattcctccatgactcaaggcacagactctccagtgatgtggggatgtttgtggcattgaccaagctggggcagccagatgctgagcagtggaacagccggctggatctcttggagaggagcagacaggccgtggatggggtctgtagacacaactacaggctgggcgcacccttcactgtggggagaaaagtgcaaccagaggtgacagtgtacccagagaggaccccactcctgcaccagcataatctgctgcactgctctgtgacaggcttctatccaggggatatcaagatcaagtggttcctgaatgggcaggaggagagagctggggtcatgtccactggccctatcaggaatggagactggacctttcagactgtggtgatgctagaaatgactcctgaacttggacatgtctacacctgccttgtcgatcactccagcctgctgagccctgtttctgtggagtggagagctcagtctgaatattcttggagaaagatgctgagtggcattgcagccttcctacttgggctaatcttccttctggtgggaatcgtcatccagctaagggctcagaaaggatatgtgaggacgcagatgtctggtaatgaggtctcaagagctgttctgctccctcagtcatgctaaggtcctcactgaagcttctctctctggagcctgaagtagtgatgagtagtctgggccctgggtgaggtaaaggacattcatgaggtcaatgttctgggaataactctcttccctgatccttggaggagcccgaactgattctggagctctgtgttctgagatcatgcatctcccacccatctgcccttctcccttctacgtgtacatcattaatccccattgccaagggcattgtccagaaactcccctgagaccttactccttccagtcccaaatcatttacttttctgtggtccagccctactcctataagtcatgatctccaaagctttctgtcttccaactgcagtctccacagtcttcagaagacaaatgctcaggtagtcactgtttccttttcactgtttttaaaaaccttttattgtcaaataaaatggagatacaaaaaatgta

SEQ ID NO: 151018 - DNA, 1188 bp, Homo sapiens
  Payload ID: 9769
  Gene Symbol: HLA-DOB
  Gene Name: major histocompatibility complex, class II, DO beta
  ENST ID: ENST00000488325
  CDS Start-End: 26-142
atctcatttttttcctttctccagaatgggttctgggtgggtcccctgggtggtggctctgctagtgaatctgacccgactggattcctccatgactcaaggcacagactctccagtgatgtggggatgtttgtggcattgaccaagctggggcagccagatgctgagcagtggaacagccggctggatctcttggagaggagcagacaggccgtggatggggtctgtagacacaactacaggctgggcgcacccttcactgtggggagaaaagtgcaaccagaggtgacagtgtacccagagaggaccccactcctgcaccagcataatctgctgcactgctctgtgacaggcttctatccaggggatatcaagatcaagtggttcctgaatgggcaggaggagagagctggggtcatgtccactggccctatcaggaatggagactggacctttcagactgtggtgatgctagaaatgactcctgaacttggacatgtctacacctgccttgtcgatcactccagcctgctgagccctgtttctgtggagtggagagctcagtctgaatattcttggagaaagatgctgagtggcattgcagccttcctacttgggctaatcttccttctggtgggaatcgtcatccagctaagggctcagaaaggatatgtgaggacgcagatgtctggtaatgaggtctcaagagctgttctgctccctcagtcatgctaaggtcctcactgaagcttctctctctggagcctgaagtagtgatgagtagtctgggccctgggtgaggtaaaggacattcatgaggtcaatgttctgggaataactctcttccctgatccttggaggagcccgaactgattctggagctctgtgttctgagatcatgcatctcccacccatctgcccttctcccttctacgtgtacatcattaatccccattgccaagggcattgtccagaaactcccctgagaccttactccttccagccccaaatcatttacttttctgtggtccagccctactcctataagtcatgatctccaaagctttctgtcttccaactgcagtctccacagtcttcagaagacaaatgctcaggtagtcactgtttccttttcactgtttttaaaaaccttttattgtcaaataaaatggagatacaaaaaatgta

SEQ ID NO: 151019 - DNA, 547 bp, Homo sapiens
  Payload ID: 9769
  Gene Symbol: HLA-DOB
  Gene Name: major histocompatibility complex, class II, DO beta
  ENST ID: ENST00000527042
  CDS Start-End: 86-547
taatgggtactttctgactgaattttatgaactcattctgaagaggctgacgattttactgtctcatttttttcctttctccagaatgggttctgggtgggtcccctgggtggtggctctgctagtgaatctgacccgactggattcctccatgactcaaggcacagactctccagaagattttgtgattcaggcaaaggctgactgttacttcaccaacgggacagaaaaggtgcagtttgtggtcagattcatctttaacttggaggagtatgtacgtttcgacagtgatgtggggatgtttgtggcattgaccaagctggggcagccagatgctgagcagtggaacagccggctggatctcttggagaggagcagacaggccgtggatggggtctgtagacacaactacaggctgggcgcacccttcactgtggggagaaaaggcttctatccaggggatatcaagatcaagtggttcctgaatgggcaggaggagagagctggggtcatgtccactggccctatcaggaatggagactggacc

SEQ ID NO: 151020 - DNA, 1704 bp, Homo sapiens
  Payload ID: 9770
  Gene Symbol: HLA-DPA1
  Gene Name: major histocompatibility complex, class II, DP alpha 1
  Uniprot ID: P20036
  ENST ID: ENST00000374808
  CDS Start-End: 131-913
acgcgtagcattcctgccgtccctggaaaagtgctagaggcccacagtttcagtctcatctgcctccactcggcctcagttcctcatcactgttcctgtgctcacagtcatcaattatagaccccacaacatgcgccctgaagacagaatgttccatatcagagctgtgatcttgagagccctctccttggctttcctgctgagtctccgaggagctggggccatcaaggcggaccatgtgtcaacttatgccgcgtttgtacagacgcatagaccaacaggggagtttatgtttgaatttgatgaagatgagatgttctatgtggatctggacaagaaggagaccgtctggcatctggaggagtttggccaagccttttcctttgaggctcagggcgggctggctaacattgctatattgaacaacaacttgaataccttgatccagcgttccaaccacactcaggccaccaacgatccccctgaggtgaccgtgtttcccaaggagcctgtggagctgggccagcccaacaccctcatctgccacattgacaagttcttcccaccagtgctcaacgtcacgtggctgtgcaacggggagctggtcactgagggtgtcgctgagagcctcttcctgcccagaacagattacagcttccacaagttccattacctgacctttgtgccctcagcagaggacttctatgactgcagggtggagcactggggcttggaccagccgctcctcaagcactgggaggcccaagagccaatccagatgcctgagacaacggagactgtgctctgtgccctgggcctggtgctgggcctagtcggcatcatcgtgggcaccgtcctcatcataaagtctctgcgttctggccatgacccccgggcccaggggaccctgtgaaatactgtaaaggtgacaaaatatctgaacagaagaggacttaggagagatctgaactccagctgccctacaaactccatctcagcttttcttctcacttcatgtgaaaactactccagtggctgactgaattgctgacccttcaagctctgtccttatccattacctcaaagcagtcattccttagtaaagtttccaacaaatagaaattaatgacactttggtagcactaatatggagattatcctttcattgagccttttatcctctgttctcctttgaagaacccctcactgtcaccttcccgagaataccctaagaccaataaatacttcagtatttcagagcggggagactctgagtcattcttactggaagtctaggaccaggtcacatgtgaatactatttcttgaaggtgtggtttcaacctctgttgccgatgtggttactaaaggttctgatcccacttgaacggaaaggtctgaggatattgattcagtcctgggtttttccctaactacaggatagggtggggtagagaaaggatatttgggggaaattttacttggatgaagattttcttggatgtagtttgaagactgcagtgtttgaagtctctgagggaagagatttggtctgtctggatcaagatttcaggcagattaggattccattcacagcccctgagcttccttcccaaggctgtattgtaattatagcaatatttcatggaggatttttctacatgataaactaagagccaagaaataaaatttttaaaatgccctaa

SEQ ID NO: 151021 - DNA, 1704 bp, Homo sapiens
  Payload ID: 9770
  Gene Symbol: HLA-DPA1
  Gene Name: major histocompatibility complex, class II, DP alpha 1
  Uniprot ID: P20036
  ENST ID: ENST00000383224
  CDS Start-End: 131-913
acgcgtagcattcctgccgtccctggaaaagtgctagaggcccacagtttcagtctcatctgcctccactcggcctcagttcctcatcactgttcctgtgctcacagtcatcaattatagaccccacaacatgcgccctgaagacagaatgttccatatcagagctgtgatcttgagagccctctccttggctttcctgctgagtctccgaggagctggggccatcaaggcggaccatgtgtcaacttatgccgcgtttgtacagacgcatagaccaacaggggagtttatgtttgaatttgatgaagatgagatgttctatgtggatctggacaagaaggagaccgtctggcatctggaggagtttggccaagccttttcctttgaggctcagggcgggctggctaacattgctatattgaacaacaacttgaataccttgatccagcgttccaaccacactcaggccaccaacgatccccctgaggtgaccgtgtttcccaaggagcctgtggagctgggccagcccaacaccctcatctgccacattgacaagttcttcccaccagtgctcaacgtcacgtggctgtgcaacggggagctggtcactgagggtgtcgctgagagcctcttcctgcccagaacagattacagcttccacaagttccattacctgacctttgtgccctcagcagaggacttctatgactgcagggtggagcactggggcttggaccagccgctcctcaagcactgggaggcccaagagccaatccagatgcctgagacaacggagactgtgctctgtgccctgggcctggtgctgggcctagtcggcatcatcgtgggcaccgtcctcatcataaagtctctgcgttctggccatgacccccgggcccaggggaccctgtgaaatactgtaaaggtgacaaaatatctgaacagaagaggacttaggagagatctgaactccagctgccctacaaactccatctcagcttttcttctcacttcatgtgaaaactactccagtggctgactgaattgctgacccttcaagctctgtccttatccattacctcaaagcagtcattccttagtaaagtttccaacaaatagaaattaatgacactttggtagcactaatatggagattatcctttcattgagccttttatcctctgttctcctttgaagagcccctcactgtcaccttcccgagaataccctaagaccaataaatacttcagtatttcagagcggggagactctgagtcattcttactggaagtctaggaccaggtcacatgtgaatactatttcttgaaggtgtggtttcaacctctgttgccgatgtggttactaaaggttctgatcccacttgaacggaaaggtctgaggatattgattcagtcctgggtttttccctaactacaggatagggtggggtagagaaaggatatttgggggaaattttacttggatgaagattttcttggatgtagtttgaagactgcagtgtttgaagtctctgagggaagagatttggtctgtctggatcaagatttcaggcagattaggattccattcacagcccctgagcttccttcccaaggctgtattgtaattatagcaatatttcatggaggatttttctacatgataaactaagagccaagaaataaattttttaaaatgccctaa

SEQ ID NO: 151022 - DNA, 703 bp, Homo sapiens
  Payload ID: 9770
  Gene Symbol: HLA-DPA1
  Gene Name: major histocompatibility complex, class II, DP alpha 1
  ENST ID: ENST00000452619
  CDS Start-End: 68-703
ctccactcggcctcagttcctcatcactgttcctgtgctcacagtcatcaattatagaccccacaacatgcgccctgaagacagaatgttccatatcagagctgtgatcttgagagccctctccttggctttcctgctgagtctccgaggagctggggccatcaaggcggaccatgtgtcaacttatgccgcgtttgtacagacgcatagaccaacaggggagtttatgtttgaatttgatgaagatgagatgttctatgtggatctggacaagaaggagaccgtctggcatctggaggagtttggccaagccttttcctttgaggtgaccgtgtttcccaaggagcctgtggagctgggccagcccaacaccctcatctgccacattgacaagttcttcccaccagtgctcaacgtcacgtggctgtgcaacggggagctggtcactgagggtgtcgctgagagcctcttcctgcccagaacagattacagcttccacaagttccattacctgacctttgtgccctcagcagaggacttctatgactgcagggtggagcactggggcttggaccagccgctcctcaagcactgggaggcccaagagccaatccagatgcctgagacaacggagactgtgctctgtgccctgggcctggtgctgggcctagtcggcatcatcgtgggcaccgtcctcatcata

SEQ ID NO: 151023 - DNA, 703 bp, Homo sapiens; identical to SEQ ID NO: 151022
  Payload ID: 9770
  Gene Symbol: HLA-DPA1
  Gene Name: major histocompatibility complex, class II, DP alpha 1
  ENST ID: ENST00000437676
  CDS Start-End: 68-703

SEQ ID NO: 151024 - DNA, 918 bp, Homo sapiens
  Payload ID: 9770
  Gene Symbol: HLA-DPA1
  Gene Name: major histocompatibility complex, class II, DP alpha 1
  ENST ID: ENST00000441483
  CDS Start-End: 291-918
gcacgagctcctcccggttgtagatgtatctctccaggaagcgctgtgtcccattaaacgcgtagcattcctgccgtccctggaaaagcaccttccagcgtcctctttacccagcaacagagaatgtcagctctatgatttctctgataggtgaatcccagccatgctgattcctctccacccatttccagtgctagaggcccacagtttcagtctcatctgcctccactcggcctcagttcctcatcactgttcctgtgctcacagtcatcaattatagaccccacaacatgcgccctgaagacagaatgttccatatcagagctgtgatcttgagagccctctccttggctttcctgctgagtctccgaggagctggggccatcaaggcggaccatgtgtcaacttatgccgcgtttgtacagacgcatagaccaacaggggagtttatgtttgaatttgatgaagatgagatgttctatgtggatctggacaagaaggagaccgtctggcatctggaggagtttggccaagccttttcctttgaggctcagggcgggctggctaacattgctatattgaacaacaacttgaataccttgatccagcgttccaaccacactcaggccaccaacgatccccctgaggtgaccgtgtttcccaaggagcctgtggagctgggccagcccaacaccctcatctgccacattgacaagttcttcccaccagtgctcaacgtcacgtggctgtgcaacggggagctggtcactgagggtgtcgctgagagcctcttcctgcccagaacagattacagcttccacaagttccattacctgacctttgtgccctcagcagaggacttctatgactgcagggtggagcactggggcttggaccagccgctcctcaagcactggg

SEQ ID NO: 151025 - DNA, 703 bp, Homo sapiens; identical to SEQ ID NO: 151022
  Payload ID: 9770
  Gene Symbol: HLA-DPA1
  Gene Name: major histocompatibility complex, class II, DP alpha 1
  ENST ID: ENST00000447657
  CDS Start-End: 68-703

SEQ ID NO: 151026 - DNA, 918 bp, Homo sapiens
  Payload ID: 9770
  Gene Symbol: HLA-DPA1
  Gene Name: major histocompatibility complex, class II, DP alpha 1
  ENST ID: ENST00000453337
  CDS Start-End: 291-918
gcgcgaactcctcccggttgtagatgtatctctccaggaagcgctgtgtcccattaaacgcgtagcattcctgccgtccctggaaaagcaccttccagcgtcctctttacccagcaacagagaatgtcagctctatgatttctctgataggtgaatcccagccatgctgattcctctccacccatttccagtgctagaggcccacagtttcagtctcatctgcctccactcggcctcagttcctcatcactgttcctgtgctcacagtcatcaattatagaccccacaacatgcgccctgaagacagaatgttccatatcagagctgtgatcttgagagccctctccttggctttcctgctgagtctccgaggagctggggccatcaaggcggaccatgtgtcaacttatgccgcgtttgtacagacgcatagaccaacaggggagtttatgtttgaatttgatgaagatgagatgttctatgtggatctggacaagaaggagaccgtctggcatctggaggagtttggccaagccttttcctttgaggctcagggcgggctggctaacattgctatattgaacaacaacttgaataccttgatccagcgttccaaccacactcaggccaccaacgatccccctgaggtgaccgtgtttcccaaggagcctgtggagctgggccagcccaacaccctcatctgccacattgacaagttcttcccaccagtgctcaacgtcacgtggctgtgcaacggggagctggtcactgagggtgtcgctgagagcctcttcctgcccagaacagattacagcttccacaagttccattacctgacctttgtgccctcagcagaggacttctatgactgcagggtggagcactggggcttggaccagccgctcctcaagcactggg

SEQ ID NO: 151027 - DNA, 305 bp, Homo sapiens
  Payload ID: 9770
  Gene Symbol: HLA-DPA1
  Gene Name: major histocompatibility complex, class II, DP alpha 1
  ENST ID: ENST00000439867
  CDS Start-End: 237-305
gtcgaagcgcacgagctcctcccggttgtagatgtatctctccaggaagcgctgtgtcccattaaacgcgtagcattcctgccgtccctggaaaaggtgaatcccagccatgctgattcctctccacccatttccagtgctagaggcccacagtttcagtctcatctgcctccactcggcctcagttcctcatcactgttcctgtgctcacagtcatcaattatagaccccacaacatgcgccctgaagacagaatgttccatatcagagctgtgatcttgagagccctctccttggctttcctg

SEQ ID NO: 151028 - DNA, 1375 bp, Homo sapiens
  Payload ID: 9770
  Gene Symbol: HLA-DPA1
  Gene Name: major histocompatibility complex, class II, DP alpha 1
  ENST ID: ENST00000455869
  CDS Start-End: 1-385
caacaccctcatctgccacattgacaagttcttcccaccagtgctcaacgtcacgtggctgtgcaacggggagctggtcactgagggtgtcgctgagagcctcttcctgcccagaacagattacagcttccacaagttccattacctgacctttgtgccctcagcagaggacttctatgactgcagggtggagcactggggcttggaccagccgctcctcaagcactgggaggcccaagagccaatccagatgcctgagacaacggagactgtgctctgtgccctgggcctggtgctgggcctagtcggcatcatcgtgggcaccgtcctcatcataaagtctctgcgttctggccatgacccccgggcccaggggaccctgtgaaatactgtaaaggtgggaatgtaaagaggaggccctaggatttgtagaatgtaaggaagggaggaaaaattcaatctgataagtgttcattgatcttctaatgggttaaaagcattcagccacataacaacaacaacaccgataactaactgagtagttaatatggtcaggcgctattctgaggatttacatttattaactcactttattctcacacatagtctttgaggtaggtactattattttcactatttcacatgagagatacttacatctttttacatacacagagactttaagcactttgatcaagttcccacagctatgaagtagtagggctagcttccaatccagaaagtctggatccaagactgtttatccactgtcctattcaccctattttgtgaaggaaaagaccaagttcaaattctccagagtccattgccaaataatggagtcagatctatatttctatacataattacaacacagtgtggtgggtgcctgtaactacttactgtctctacttggactcattccatggcaatgttcacacaaaaaatgcccctccagagatcttacaggtttctatttatcataacactcaccatgctttatatttttatatgttttgggaattctcttagcattagacagtgaacttccatgcagatgaccacatctaattcattattattattgttattcatgctggacctcaggtacaaaaggttaagaacttctcagttcattatatgatcatcattggtgcctccgagctctctctctctcccttgatttatttggtcccttttatctccagtccttactcccatatctaacctcttacccctacctcataggtaaacattttaatgaatttgatgtttccttttatttgcatagatcctctgtaatatgtagtagtgtccagtgtacatgtatttttaattaaccaaaatggcattaaattatagatctaattttgta

SEQ ID NO: 151029 - DNA, 1375 bp, Homo sapiens
  Payload ID: 9770
  Gene Symbol: HLA-DPA1
  Gene Name: major histocompatibility complex, class II, DP alpha 1
  ENST ID: ENST00000429960
  CDS Start-End: 1-385
caacaccctcatctgccacattgacaagttcttcccaccagtgctcaacgtcacgtggctgtgcaacggggagctggtcactgagggtgtcgctgagagcctcttcctgcccagaacagattacagcttccacaagttccattacctgacctttgtgccctcagcagaggacttctatgactgcagggtggagcactggggcttggaccagccgctcctcaagcactgggaggcccaagagccaatccagatgcctgagacaacggagactgtgctctgtgccctgggcctggtgctgggcctagtcggcatcatcgtgggcaccgtcctcatcataaagtctctgcgttctggccatgacccccgggcccaggggaccctgtgaaatactgtaaaggtgggaatgtaaagaggaggccctaggatttgtagaatgtaaggaagggaggaaaaattcaatctgataagtgttcattgatcttctaatgggttaaaagcattcagccacataacaacaacaacaccgataactaactgagtagttaatatggtcaggcgctattctgaggatttacatttattaactcactttattctcacacatagtctttgaggtaggtactattattttcactatttcacatgagagatacttacatctttttacatacacagagactttaagcactttgatcaagttcccacagctatgaagtagtagggctagcttccaatccagaaagtctggatccaagactgtttatccactgtcctattcaccctattttgtgaaggaaaagaccaagttcaaattctccagagtccattgccaaataatggagtcagatctatatttctatacataattacaacacagtgtggtgggtgcctgtaactacttactgtctctacttggactcattccatggcaatgttcacacaaaaaatgcctctccagagatcttacaggtttctatttatcataacactcaccatgctttatatttttatatgttttgggaattctcttagcattagacagtgaacttccatgcagatgaccacatctaattcattattattattgttattcatgctggacctcaggtacaaaaggttaagaacttctcagttcattatatgatcatcattggtgcctccgagctctctctctctcccttgatttatttggtcccttttatctccagtccttactcccatatctaacctcttacccctacctcataggtaaacattttaatgaatttgatgtttccttttatttgcatagatcctctgtaatatgtagtagtgtccagtgtacatgtatttttaattaaccaaaatggcattaaattatagatctaattttgta

SEQ ID NO: 151030 - DNA, 1704 bp, Homo sapiens; identical to SEQ ID NO: 151020
  Payload ID: 9770
  Gene Symbol: HLA-DPA1
  Gene Name: major histocompatibility complex, class II, DP alpha 1
  Uniprot ID: P20036
  ENST ID: ENST00000419277
  CDS Start-End: 131-913

SEQ ID NO: 151031 - DNA, 1375 bp, Homo sapiens; identical to SEQ ID NO: 151029
  Payload ID: 9770
  Gene Symbol: HLA-DPA1
  Gene Name: major histocompatibility complex, class II, DP alpha 1
  ENST ID: ENST00000419452
  CDS Start-End: 1-385

SEQ ID NO: 151032 - DNA, 703 bp, Homo sapiens; identical to SEQ ID NO: 151022
  Payload ID: 9770
  Gene Symbol: HLA-DPA1
  Gene Name: major histocompatibility complex, class II, DP alpha 1
  ENST ID: ENST00000439393
  CDS Start-End: 68-703

SEQ ID NO: 151033 - DNA, 305 bp, Homo sapiens
  Payload ID: 9770
  Gene Symbol: HLA-DPA1
  Gene Name: major histocompatibility complex, class II, DP alpha 1
  ENST ID: ENST00000427518
  CDS Start-End: 237-305
gtcgaagcgcacgaactcctcccggttgtagatgtatctctccaggaagcgctgtgtcccattaaacgcgtagcattcctgccgtccctggaaaaggtgaatcccagccatgctgattcctctccacccatttccagtgctagaggcccacagtttcagtctcatctgcctccactcggcctcagttcctcatcactgttcctgtgctcacagtcatcaattatagaccccacaacatgcgccctgaagacagaatgttccatatcagagctgtgatcttgagagccctctccttggctttcctg

SEQ ID NO: 151034 - DNA, 1375 bp, Homo sapiens
  Payload ID: 9770
  Gene Symbol: HLA-DPA1
  Gene Name: major histocompatibility complex, class II, DP alpha 1
  ENST ID: ENST00000453314
  CDS Start-End: 1-385
caacaccctcatctgccacattgacaagttcttcccaccagtgctcaacgtcacgtggctgtgcaacggggagctggtcactgagggtgtcgctgagagcctcttcctgcccagaacagattacagcttccacaagttccattacctgacctttgtgccctcagcagaggacttctatgactgcagggtggagcactggggcttggaccagccgctcctcaagcactgggaggcccaagagccaatccagatgcctgagacaacggagactgtgctctgtgccctgggcctggtgctgggcctagtcggcatcatcgtgggcaccgtcctcatcataaagtctctgcgttctggccatgacccccgggcccaggggaccctgtgaaatactgtaaaggtgggaatgtaaagaggaggccctaggatttgtagaatgtaaggaagggaggaaaaattcaatctgataagtgttcattgatcttctaatgggttaaaagcattcagccacataacaacaacaataccgataactaactgagtagttaatatggtcaggcgctattctgaggatttacatttattaactcactttattctcacacatagtctttgaggtaggtactattattttcactatttcacatgagagatacttacatctttttacatacacagagactttaagcactttgatcaagttcccacagctatgaagtagtagggctagcttccaatccagaaagtctggatccaagactgtttatccactgtcctattcaccctattttgtgaaggaaaagaccaagttcaaattctccagagtccattgccaaataatggagtcagatctatatttctatacataattacaacacagtgtggtgggtgcctgtaactacttactgtctctacttggactcattccatggcaatgttcacacaaaaaatgcccctccagagatcttacaggtttctatttatcataacactcaccatgctttatatttttatatgttttgggaattctcttagcattagacagtgaacttccatgcagatgaccacatctaattcattattattattgttattcatgctggacctcaggtacaaaaggttaagaacttctcagttcattatatgatcatcattggtgcctccgagctctctctctctcccttgatttatttggtcccttttatctccagtccttactcccatatctaacctcttacccctacctcataggtaaacattttaatgaatttgatgtttccttttatttgcatagatcctctgtaatatgtagtagtgtccagtgtacatgtatttttaattaaccaaaatggcattaaattatagatctaattttgta

SEQ ID NO: 151035 - DNA, 1704 bp, Homo sapiens; identical to SEQ ID NO: 151020
  Payload ID: 9770
  Gene Symbol: HLA-DPA1
  Gene Name: major histocompatibility complex, class II, DP alpha 1
  Uniprot ID: P20036
  ENST ID: ENST00000454805
  CDS Start-End: 131-913

SEQ ID NO: 151036 - DNA, 1375 bp, Homo sapiens; identical to SEQ ID NO: 151028
  Payload ID: 9770
  Gene Symbol: HLA-DPA1
  Gene Name: major histocompatibility complex, class II, DP alpha 1
  ENST ID: ENST00000414003
  CDS Start-End: 1-385

SEQ ID NO: 151037 - DNA, 1704 bp, Homo sapiens; identical to SEQ ID NO: 151020
  Payload ID: 9770
  Gene Symbol: HLA-DPA1
  Gene Name: major histocompatibility complex, class II, DP alpha 1
  Uniprot ID: P20036
  ENST ID: ENST00000443117
  CDS Start-End: 131-913

SEQ ID NO: 151038 - DNA, 305 bp, Homo sapiens
  Payload ID: 9770
  Gene Symbol: HLA-DPA1
  Gene Name: major histocompatibility complex, class II, DP alpha 1
  ENST ID: ENST00000417724
  CDS Start-End: 237-305
gtcgaagcgcgcgaactcctcccggttgtagatgtatctctccaggaagcgctgtgtcccattaaacgcgtagcattcctgccgtccctggaaaaggtgaatcccagccatgctgattcctctccacccatttccagtgctagaggcccacagtttcagtctcatctgcctccactcggcctcagttcctcatcactgttcctgtgctcacagtcatcaattatagaccccacaacatgcgccctgaagacagaatgttccatatcagagctgtgatcttgagagccctctccttggctttcctg

SEQ ID NO: 151039 - DNA, 918 bp, Homo sapiens
  Payload ID: 9770
  Gene Symbol: HLA-DPA1
  Gene Name: major histocompatibility complex, class II, DP alpha 1
  ENST ID: ENST00000414177
  CDS Start-End: 291-918
gcacgaactcctcccggttgtagatgtatctctccaggaagcgctgtgtcccattaaacgcgtagcattcctgccgtccctggaaaagcaccttccagcgtcctctttacccagcaacagagaatgtcagctctatgatttctctgataggtgaatcccagccatgctgattcctctccacccatttccagtgctagaggcccacagtttcagtctcatctgcctccactcggcctcagttcctcatcactgttcctgtgctcacagtcatcaattatagaccccacaacatgcgccctgaagacagaatgttccatatcagagctgtgatcttgagagccctctccttggctttcctgctgagtctccgaggagctggggccatcaaggcggaccatgtgtcaacttatgccgcgtttgtacagacgcatagaccaacaggggagtttatgtttgaatttgatgaagatgagatgttctatgtggatctggacaagaaggagaccgtctggcatctggaggagtttggccaagccttttcctttgaggctcagggcgggctggctaacattgctatattgaacaacaacttgaataccttgatccagcgttccaaccacactcaggccaccaacgatccccctgaggtgaccgtgtttcccaaggagcctgtggagctgggccagcccaacaccctcatctgccacattgacaagttcttcccaccagtgctcaacgtcacgtggctgtgcaacggggagctggtcactgagggtgtcgctgagagcctcttcctgcccagaacagattacagcttccacaagttccattacctgacctttgtgccctcagcagaggacttctatgactgcagggtggagcactggggcttggaccagccgctcctcaagcactggg

SEQ ID NO: 151040 - DNA, 918 bp, Homo sapiens
  Payload ID: 9770
  Gene Symbol: HLA-DPA1
  Gene Name: major histocompatibility complex, class II, DP alpha 1
  ENST ID: ENST00000425105
  CDS Start-End: 291-918
gcacgaactcctcccggttgtagatgtatctctccaggaagcgctgtgtcccattaaacgcgtagcattcctgccgtaactggtacaccaccttccagcgtcctctttacccagcaacagagaatgtcagctctatgatttctctgataggtgaatcccagccatgctgattcctctccacccatttccagtgctagaggcccacagtttcagtctcatctgcctccactcggcctcagttcctcatcactgttcctgtgctcacagtcatcaattatagaccccacaacatgcgccctgaagacagaatgttccatatcagagctgtgatcttgagagccctctccttggctttcctgctgagtctccgaggagctggggccatcaaggcggaccatgtgtcaacttatgccgcgtttgtacagacgcatagaccaacaggggagtttatgtttgaatttgatgaagatgagatgttctatgtggatctggacaagaaggagaccgtctggcatctggaggagtttggccaagccttttcctttgaggctcagggcgggctggctaacattgctatattgaacaacaacttgaataccttgatccagcgttccaaccacactcaggccaccaacgatccccctgaggtgaccgtgtttcccaaggagcctgtggagctgggccagcccaacaccctcatctgccacattgacaagttcttcccaccagtgctcaacgtcacgtggctgtgcaacggggagctggtcactgagggtgtcgctgagagcctcttcctgcccagaacagattacagcttccacaagttccattacctgacctttgtgccctcagcagaggacttctatgactgcagggtggagcactggggcttggaccagccgctcctcaagcactggg

SEQ ID NO: 151041 - DNA, 918 bp, Homo sapiens; identical to SEQ ID NO: 151039
  Payload ID: 9770
  Gene Symbol: HLA-DPA1
  Gene Name: major histocompatibility complex, class II, DP alpha 1
  ENST ID: ENST00000439571
  CDS Start-End: 291-918

SEQ ID NO: 151042 - DNA, 305 bp, Homo sapiens; identical to SEQ ID NO: 151033
  Payload ID: 9770
  Gene Symbol: HLA-DPA1
  Gene Name: major histocompatibility complex, class II, DP alpha 1
  ENST ID: ENST00000413109
  CDS Start-End: 237-305

SEQ ID NO: 151043 - DNA, 1375 bp, Homo sapiens; identical to SEQ ID NO: 151028
  Payload ID: 9770
  Gene Symbol: HLA-DPA1
  Gene Name: major histocompatibility complex, class II, DP alpha 1
  ENST ID: ENST00000442259
  CDS Start-End: 1-385

SEQ ID NO: 151044 - DNA, 1375 bp, Homo sapiens; identical to SEQ ID NO: 151028
  Payload ID: 9770
  Gene Symbol: HLA-DPA1
  Gene Name: major histocompatibility complex, class II, DP alpha 1
  ENST ID: ENST00000428180
  CDS Start-End: 1-385

SEQ ID NO: 151045 - DNA, 703 bp, Homo sapiens; identical to SEQ ID NO: 151022
  Payload ID: 9770
  Gene Symbol: HLA-DPA1
  Gene Name: major histocompatibility complex, class II, DP alpha 1
  ENST ID: ENST00000437123
  CDS Start-End: 68-703

SEQ ID NO: 151046 - DNA, 1375 bp, Homo sapiens; identical to SEQ ID NO: 151028
  Payload ID: 9770
  Gene Symbol: HLA-DPA1
  Gene Name: major histocompatibility complex, class II, DP alpha 1
  ENST ID: ENST00000437811
  CDS Start-End: 1-385

SEQ ID NO: 151047 - DNA, 1626 bp, Homo sapiens
  Payload ID: 9770
  Gene Symbol: HLA-DPA1
  Gene Name: major histocompatibility complex, class II, DP alpha 1
  Uniprot ID: P20036
  ENST ID: ENST00000415247
  CDS Start-End: 53-835
gttcctcatcactgttcctgtgctcacagtcatcaattatagaccccacaacatgcgccctgaagacagaatgttccatatcagagctgtgatcttgagagccctctccttggctttcctgctgagtctccgaggagctggggccatcaaggcggaccatgtgtcaacttatgccgcgtttgtacagacgcatagaccaacaggggagtttatgtttgaatttgatgaagatgagatgttctatgtggatctggacaagaaggagaccgtctggcatctggaggagtttggccaagccttttcctttgaggctcagggcgggctggctaacattgctatattgaacaacaacttgaataccttgatccagcgttccaaccacactcaggccaccaacgatccccctgaggtgaccgtgtttcccaaggagcctgtggagctgggccagcccaacaccctcatctgccacattgacaagttcttcccaccagtgctcaacgtcacgtggctgtgcaacggggagctggtcactgagggtgtcgctgagagcctcttcctgcccagaacagattacagcttccacaagttccattacctgacctttgtgccctcagcagaggacttctatgactgcagggtggagcactggggcttggaccagccgctcctcaagcactgggaggcccaagagccaatccagatgcctgagacaacggagactgtgctctgtgccctgggcctggtgctgggcctagtcggcatcatcgtgggcaccgtcctcatcataaagtctctgcgttctggccatgacccccgggcccaggggaccctgtgaaatactgtaaaggtgacaaaatatctgaacagaagaggacttaggagagatctgaactccagctgccctacaaactccatctcagcttttcttctcacttcatgtgaaaactactccagtggctgactgaattgctgacccttcaagctctgtccttatccattacctcaaagcagtcattccttagtaaagtttccaacaaatagaaattaatgacactttggtagcactaatatggagattatcctttcattgagccttttatcctctgttctcctttgaagaacccctcactgtcaccttcccgagaataccctaagaccaataaatacttcagtatttcagagcggggagactctgagtcattcttactggaagtctaggaccaggtcacatgtgaatactatttcttgaaggtgtggtttcaacctctgttgccgatgtggttactaaaggttctgatcccacttgaacggaaaggtctgaggatattgattcagtcctgggtttttccctaactacaggatagggtggggtagagaaaggatatttgggggaaattttacttggatgaagattttcttggatgtagtttgaagactgcagtgtttgaagtctctgagggaagagatttggtctgtctggatcaagatttcaggcagattaggattccattcacagcccctgagcttccttcccaaggctgtattgtaattatagcaatatttcatggaggatttttctacatgataaactaagagccaagaaataaaatttttaaaatgccctaa

SEQ ID NO: 151048 - DNA, 1704 bp, Homo sapiens; identical to SEQ ID NO: 151021
  Payload ID: 9770
  Gene Symbol: HLA-DPA1
  Gene Name: major histocompatibility complex, class II, DP alpha 1
  Uniprot ID: P20036
  ENST ID: ENST00000422504
  CDS Start-End: 131-913

SEQ ID NO: 151049 - DNA, 305 bp, Homo sapiens
  Payload ID: 9770
  Gene Symbol: HLA-DPA1
  Gene Name: major histocompatibility complex, class II, DP alpha 1
  ENST ID: ENST00000448742
  CDS Start-End: 237-305
gtcgaagcgcacgaactcctcccggttgtagatgtatctctccaggaagcgctgtgtcccattaaacgcgtagcattcctgccgtaactggtacacgtgaatcccagccatgctgattcctctccacccatttccagtgctagaggcccacagtttcagtctcatctgcctccactcggcctcagttcctcatcactgttcctgtgctcacagtcatcaattatagaccccacaacatgcgccctgaagacagaatgttccatatcagagctgtgatcttgagagccctctccttggctttcctg

SEQ ID NO: 151050 - DNA, 305 bp, Homo sapiens; identical to SEQ ID NO: 151033
  Payload ID: 9770
  Gene Symbol: HLA-DPA1
  Gene Name: major histocompatibility complex, class II, DP alpha 1
  ENST ID: ENST00000432811
  CDS Start-End: 237-305

SEQ ID NO: 151051 - DNA, 918 bp, Homo sapiens; identical to SEQ ID NO: 151039
  Payload ID: 9770
  Gene Symbol: HLA-DPA1
  Gene Name: major histocompatibility complex, class II, DP alpha 1
  ENST ID: ENST00000456525
  CDS Start-End: 291-918

SEQ ID NO: 151052 - DNA, 918 bp, Homo sapiens; identical to SEQ ID NO: 151026
  Payload ID: 9770
  Gene Symbol: HLA-DPA1
  Gene Name: major histocompatibility complex, class II, DP alpha 1
  ENST ID: ENST00000436183
  CDS Start-End: 291-918

SEQ ID NO: 151053 - DNA, 703 bp, Homo sapiens; identical to SEQ ID NO: 151022
  Payload ID: 9770
  Gene Symbol: HLA-DPA1
  Gene Name: major histocompatibility complex, class II, DP alpha 1
  ENST ID: ENST00000441306
  CDS Start-End: 68-703

SEQ ID NO: 151054 - DNA, 305 bp, Homo sapiens; identical to SEQ ID NO: 151038
  Payload ID: 9770
  Gene Symbol: HLA-DPA1
  Gene Name: major histocompatibility complex, class II, DP alpha 1
  ENST ID: ENST00000423630
  CDS Start-End: 237-305

SEQ ID NO: 151055 - DNA, 305 bp, Homo sapiens; identical to SEQ ID NO: 151038
  Payload ID: 9770
  Gene Symbol: HLA-DPA1
  Gene Name: major histocompatibility complex, class II, DP alpha 1
  ENST ID: ENST00000448154
  CDS Start-End: 237-305

SEQ ID NO: 151056 - DNA, 703 bp, Homo sapiens; identical to SEQ ID NO: 151022
  Payload ID: 9770
  Gene Symbol: HLA-DPA1
  Gene Name: major histocompatibility complex, class II, DP alpha 1
  ENST ID: ENST00000515346
  CDS Start-End: 68-703

SEQ ID NO: 151057 - DNA, 918 bp, Homo sapiens; identical to SEQ ID NO: 151026
  Payload ID: 9770
  Gene Symbol: HLA-DPA1
  Gene Name: major histocompatibility complex, class II, DP alpha 1
  ENST ID: ENST00000512750
  CDS Start-End: 291-918

SEQ ID NO: 151058 - DNA, 1704 bp, Homo sapiens; identical to SEQ ID NO: 151020
  Payload ID: 9770
  Gene Symbol: HLA-DPA1
  Gene Name: major histocompatibility complex, class II, DP alpha 1
  Uniprot ID: P20036
  ENST ID: ENST00000515317
  CDS Start-End: 131-913

SEQ ID NO: 151059 - DNA, 1770 bp, Homo sapiens
  Payload ID: 9770
  Gene Symbol: HLA-DPA1
  Gene Name: major histocompatibility complex, class II, DP alpha 1
  Uniprot ID: P20036
  ENST ID: ENST00000617497
  CDS Start-End: 199-981
gctgtcgaagcgcacgaactcctcccggttgtagatgtatctctccaggaagcgctgtgtcccattaaacgcgtagcattcctgccgtaactggtacactgctagaggcccacagtttcagtctcatctgcctccactcggcctcagttcctcatcactgttcctgtgctcacagtcatcaattatagaccccacaacatgcgccctgaagacagaatgttccatatcagagctgtgatcttgagagccctctccttggctttcctgctgagtctccgaggagctggggccatcaaggcggaccatgtgtcaacttatgccgcgtttgtacagacgcatagaccaacaggggagtttatgtttgaatttgatgaagatgagatgttctatgtggatctggacaagaaggagaccgtctggcatctggaggagtttggccaagccttttcctttgaggctcagggcgggctggctaacattgctatattgaacaacaacttgaataccttgatccagcgttccaaccacactcaggccaccaacgatccccctgaggtgaccgtgtttcccaaggagcctgtggagctgggccagcccaacaccctcatctgccacattgacaagttcttcccaccagtgctcaacgtcacgtggctgtgcaacggggagctggtcactgagggtgtcgctgagagcctcttcctgcccagaacagattacagcttccacaagttccattacctgacctttgtgccctcagcagaggacttctatgactgcagggtggagcactggggcttggaccagccgctcctcaagcactgggaggcccaagagccaatccagatgcctgagacaacggagactgtgctctgtgccctgggcctggtgctgggcctagtcggcatcatcgtgggcaccgtcctcatcataaagtctctgcgttctggccatgacccccgggcccaggggaccctgtgaaatactgtaaaggtgacaaaatatctgaacagaagaggacttaggagagatctgaactccagctgccctacaaactccatctcagcttttcttctcacttcatgtgaaaactactccagtggctgactgaattgctgacccttcaagctctgtccttatccattacctcaaagcagtcattccttagtaaagtttccaacaaatagaaattaatgacactttggtagcactaatatggagattatcctttcattgagccttttatcctctgttctcctttgaagaacccctcactgtcaccttcccgagaataccctaagaccaataaatacttcagtatttcagagcggggagactctgagtcattcttactggaagtctaggaccaggtcacatgtgaatactatttcttgaaggtgtggtttcaacctctgttgccgatgtggttactaaaggttctgatcccacttgaacggaaaggtctgaggatattgattcagtcctgggtttttccctaactacaggatagggtggggtagagaaaggatatttgggggaaattttacttggatgaagattttcttggatgtagtttgaagactgcagtgtttgaagtctctgagggaagagatttggtctgtctggatcaagatttcaggcagattaggattccattcacagcccctgagcttccttcccaaggctgtattgtaattatagcaatatttcatggaggatttttctacatgataaactaagagccaagaaataaaatttttaaaatgccct

SEQ ID NO: 151060 - DNA, 1560 bp, Homo sapiens
  Payload ID: 9771
  Gene Symbol: HLA-DPB1
  Gene Name: major histocompatibility complex, class II, DP beta 1
  ENST ID: ENST00000383102
  CDS Start-End: 117-893
gtcacagaagactacttgggttcatggtctctaatatttcaaacaggagctccctttagcgagtccttcttttcctgactgcagctcttttcattttgccatccttttccagctccatgatggttctgcaggtttctgcggccccccggacagtggctctgacggcgttactgatggtgctgctcacatctgtggtccagggcagggccactccagagaattacgtgtaccagttacggcaggaatgctacgcgtttaatgggacacagcgcttcctggagagatacatctacaaccgggaggagttcgtgcgcttcgacagcgacgtgggggagttccgggcggtgacggagctggggcggcctgatgaggactactggaacagccagaaggacctcctggaggagaagcgggcagtgccggacagggtatgcagacacaactacgagctggacgaggccgtgaccctgcagcgccgagtccagcctaaggtgaacgtttccccctccaagaaggggcccctgcagcaccacaacctgcttgtctgccacgtgacagatttctacccaggcagcattcaagtccgatggttcctgaatggacaggaggaaacagctggggtcgtgtccaccaacctgatccgtaatggagactggaccttccagatcctggtgatgctggaaatgaccccccagcagggagacgtctacatctgccaagtggagcacaccagcctggacagtcctgtcaccgtggagtggaaggcacagtctgattctgcccggagtaagacattgacgggagctgggggcttcgtgctggggctcatcatctgtggagtgggcatcttcatgcacaggaggagcaagaaagttcaacgaggatctgcataaacagggttcctgacctcaccgaaaagactaatgtgccttagaacaagcatttgctgtgttttgttagcacctggttccaggacagaccctcagcttcccaagaggatactgctgccaagaagttgctctgaagtcagtttctatcgttctgctctttgattcaaagcactgtttctctcactgggcctccaaccatgttcccttcttcttagcaccacaaataatcaaaacccaacataagtgtttgttttcctttaaaaatatgcatcaaatcgtctctcattacttttctctgagggttttagtaaacagtaggagttaataaagaagttcattttggtttacacgtaggaaagaagagaagcatgaaagtggagatatgttaactattgtataatgtggcctgttatacatgacactcttctgaattgactgtatttcagtgagctgcccccaaatcaagtttagtgccctcatccatttatgtctcagaccgctattcttaactattcaatggtgagcagactgcaaatctgcctgataggacccgtattcccacagcactaattcaacatatatcttactgagagcatgttttatcattaccattaagaagttaaatgaacatcagaatttaaaatcataaatataatctaatacactttaa

SEQ ID NO: 151061 - DNA, 1424 bp, Homo sapiens
  Payload ID: 9771
  Gene Symbol: HLA-DPB1
  Gene Name: major histocompatibility complex, class II, DP beta 1
  ENST ID: ENST00000399491
  CDS Start-End: 71-757
gagctccctttagcgagtccttcttttcctgactgcagctcttttcattttgccatccttttccagctccatgatggttctgcaggtttctgcggccccccggacagtggctctgacggcgttactgatggtgctgctcacatctgtggtccagggcagggccactccagagaattaccttttccagggacggcaggaatgctacgcgtttaatgggacacagcgcttcctggagagatacatctacaaccgggaggagctcgtgcgcttcgacagcgacgtgggggagttccgggcggtgacggagctggggcggcctgaggcggagtactggaacagccagaaggacatcctggaggaggagcgggcagtgccggacaggatgtgcagacacaactacgagctgggcgggcccatgaccctgcagcgccgaggcagcattcaagtccgatggttcctgaatggacaggaggaaacagctggggtcgtgtccaccaacctgatccgtaatggagactggaccttccagatcctggtgatgctggaaatgaccccccagcagggagatgtctacacctgccaagtggagcacaccagcctggatagtcctgtcaccgtggagtggaaggcacagtctgattctgcccggagtaagacattgacgggagctgggggcttcgtgctggggctcatcatctgtggagtgggcatcttcatgcacaggaggagcaagaaagttcaacgaggatctgcataaacagggttcctgagctcactgaaaagactattgtgccttaggaaaagcatttgctgtgtttcgttagcatctggctccaggacagaccttcaacttccaaattggatactgctgccaagaagttgctctgaagtcagtttctatcattctgctctttgattcaaagcactgtttctctcactgggcctccaaccatgttcccttcttcttagcaccacaaataatcaaaacccaacatgactgtttgttttcctttaaaaatatgcaccaaatcatctctcatcacttttctctgagggttttagtagacagtaggagttaataaagaagttcattttggtttaaacataggaaagaagagaaccatgaaaatggggatatgttaactattgtataatggggcctgttacacatgacactcttctgaattgactgtatttcagtgagctgcccccaaatcaagtttagtgccctcatccatttatgtctcagaccactattcttaactattcaatggtgagcagactgcaaatctgcctgataggacccatattcccacagcactaattcaacatataccttactgagagcatgttttatcattaccattaagaagttaaatgaacatcagaatttaaaatcataaatataatctaatacactttaa

SEQ ID NO: 151062 - DNA, 1560 bp, Homo sapiens
  Payload ID: 9771
  Gene Symbol: HLA-DPB1
  Gene Name: major histocompatibility complex, class II, DP beta 1
  Uniprot ID: P04440
  ENST ID: ENST00000399500
  CDS Start-End: 117-893
gtcacagaagactacttgggttcatggtctctaatatttcaaacaggagctccctttagcgagtccttcttttcctgactgcagctcttttcattttgccatccttttccagctccatgatggttctgcaggtttctgcggccccccggacagtggctctgacggcgttactgatggtgctgctcacatctgtggtccagggcagggccactccagagaattaccttttccagggacggcaggaatgctacgcgtttaatgggacacagcgcttcctggagagatacatctacaaccgggaggagctcgtgcgcttcgacagcgacgtgggggagttccgggcggtgacggagctggggcggcctgaggcggagtactggaacagccagaaggacatcctggaggaggagcgggcagtgccggacaggatgtgcagacacaactacgagctgggcgggcccatgaccctgcagcgccgagtccagcctagggtgaatgtttccccctccaagaaggggcccttgcagcaccacaacctgcttgtctgccacgtgacggatttctacccaggcagcattcaagtccgatggttcctgaatggacaggaggaaacagctggggtcgtgtccaccaacctgatccgtaatggagactggaccttccagatcctggtgatgctggaaatgaccccccagcagggagatgtctacacctgccaagtggagcacaccagcctggatagtcctgtcaccgtggagtggaaggcacagtctgattctgcccggagtaagacattgacgggagctgggggcttcgtgctggggctcatcatctgtggagtgggcatcttcatgcacaggaggagcaagaaagttcaacgaggatctgcataaacagggttcctgagctcactgaaaagactattgtgccttaggaaaagcatttgctgtgtttcgttagcatctggctccaggacagaccttcaacttccaaattggatactgctgccaagaagttgctctgaagtcagtttctatcattctgctctttgattcaaagcactgtttctctcactgggcctccaaccatgttcccttcttcttagcaccacaaataatcaaaacccaacatgactgtttgttttcctttaaaaatatgcaccaaatcatctctcatcacttttctctgagggttttagtagacagtaggagttaataaagaagttcattttggtttaaacataggaaagaagagaaccatgaaaatggggatatgttaactattgtataatggggcctgttacacatgacactcttctgaattgactgtatttcagtgagctgcccccaaatcaagtttagtgccctcatccatttatgtctcagaccactattcttaactattcaatggtgagcagactgcaaatctgcctgataggacccatattcccacagcactaattcaacatataccttactgagagcatgttttatcattaccattaagaagttaaatgaacatcagaatttaaaatcataaatataatctaatacactttaa

SEQ ID NO: 151063 - DNA, 688 bp, Homo sapiens
  Payload ID: 9771
  Gene Symbol: HLA-DPB1
  Gene Name: major histocompatibility complex, class II, DP beta 1
  ENST ID: ENST00000402095
  CDS Start-End: 1-688
aaacaggcctggagaggctctgcgacccgcttaggaccacagaactcgggacggcaggaatgctacgcgtttaatgggacacagcgcttcctggagagatacatctacaaccgggaggagctcgtgcgcttcgacagcgacgtgggggagttccgggcggtgacggagctggggcggcctgaggcggagtactggaacagccagaaggacatcctggaggaggagcgggcagtgccggacaggatgtgcagacacaactacgagctgggcgggcccatgaccctgcagcgccgagtccagcctagggtgaatgtttccccctccaagaaggggcccttgcagcaccacaacctgcttgtctgccacgtgacggatttctacccaggcagcattcaagtccgatggttcctgaatggacaggaggaaacagctggggtcgtgtccaccaacctgatccgtaatggagactggaccttccagatcctggtgatgctggaaatgaccccccagcagggagatgtctacacctgccaagtggagcacaccagcctggatagtcctgtcaccgtggagtggaaggcacagtctgattctgcccggagtaagacattgacgggagctgggggcttcgtgctggggctcatcatctgtggagtgggcatcttcatgcacaggaggagcaagaaag

SEQ ID NO: 151064 - DNA, 1424 bp, Homo sapiens
  Payload ID: 9771
  Gene Symbol: HLA-DPB1
  Gene Name: major histocompatibility complex, class II, DP beta 1
  ENST ID: ENST00000447783
  CDS Start-End: 71-757
gagctccctttagcgagtccttcttttcctgactgcagctcttttcattttgccatccttttccagctccatgatggttctgcaggtttctgcggccccccggacagtggctctgacggcgttactgatggtgctgctcacatctgtggtccagggcagggccactccagagaattaccttttccagggacggcaggaatgctacgcgtttaatgggacacagcgcttcctggagagatacatctacaaccgggaggagttcgtgcgcttcgacagcgacgtgggggagttccgggcggtgacggagctggggcggcctgatgaggagtactggaacagccagaaggacatcctggaggaggagcgggcagtgccggacaggatgtgcagacacaactacgagctgggcgggcccatgaccctgcagcgccgaggcagcattcaagtccgatggttcctgaatggacaggaggaaacagctggggtcgtgtccaccaacctgatccgtaatggagactggaccttccagatcctggtgatgctggaaatgaccccccagcagggagatgtctacacctgccaagtggagcacaccagcctggatagtcctgtcaccgtggagtggaaggcacagtctgattctgcccggagtaagacattgacgggagctgggggcttcgtgctggggctcatcatctgtggagtgggcatcttcatgcacaggaggagcaagaaagttcaacgaggatctgcataaacagggttcctgagctcactgaaaagactattgtgccttaggaaaagcatttgctgtgtttcgttagcatctggctccaggacagaccttcaacttccaaattggatactgctgccaagaagttgctctgaagtcagtttctatcattctgctctttgattcaaagcactgtttctctcactgggcctccaaccatgttcccttcttcttagcaccacaaataatcaaaacccaacatgactgtttgttttcctttaaaaatatgcaccaaatcatctctcatcacttttctctgagggttttagtagacagtaggagttaataaagaagttcattttggtttaaacataggaaagaagagaaccatgaaaatggggatatgttaactattgtataatggggcctgttacacatgacactcttctgaattgactgtatttcagtgagctgcccccaaatcaagtttagtgccctcatccatttatgtctcagaccactattcttaactattcaatggtgagcagactgcaaatctgcctgataggacccatattcccacagcactaattcaacatataccttactgagagcatgttttatcattaccattaagaagttaaatgaacatcagaatttaaaatcataaatataatctaatacactttaa

SEQ ID NO: 151065 - DNA, 688 bp, Homo sapiens
  Payload ID: 9771
  Gene Symbol: HLA-DPB1
  Gene Name: major histocompatibility complex, class II, DP beta 1
  ENST ID: ENST00000450474
  CDS Start-End: 1-688
aaacaggcctggagaggctctgcgacccgcttaggaccacagaactcgttacggcaggaatgctacgcgtttaatgggacacagcgcttcctggagagatacatctacaaccgggaggagttcgtgcgcttcgacagcgacgtgggggagttccgggcggtgacggagctggggcggcctgatgaggactactggaacagccagaaggacctcctggaggagaagcgggcagtgccggacagggtatgcagacacaactacgagctggacgaggccgtgaccctgcagcgccgagtccagcctaaggtgaacgtttccccctccaagaaggggcccctgcagcaccacaacctgcttgtctgccacgtgacagatttctacccaggcagcattcaagtccgatggttcctgaatggacaggaggaaacagctggggtcgtgtccaccaacctgatccgtaatggagactggaccttccagatcctggtgatgctggaaatgaccccccagcagggagacgtctacatctgccaagtggagcacaccagcctggacagtcctgtcaccgtggagtggaaggcacagtctgattctgcccggagtaagacattgacgggagctgggggcttcgtgctggggctcatcatctgtggagtgggcatcttcatgcacaggaggagcaagaaag

SEQ ID NO: 151066 - DNA, 1560 bp, Homo sapiens
  Payload ID: 9771
  Gene Symbol: HLA-DPB1
  Gene Name: major histocompatibility complex, class II, DP beta 1
  Uniprot ID: P04440
  ENST ID: ENST00000454006
  CDS Start-End: 117-893
gtcacagaagactacttgggttcatggtctctaatatttcaaacaggagctccctttagcgagtccttcttttcctgactgcagctcttttcattttgccatccttttccagctccatgatggttctgcaggtttctgcggccccccggacagtggctctgacggcgttactgatggtgctgctcacatctgtggtccagggcagggccactccagagaattaccttttccagggacggcaggaatgctacgcgtttaatgggacacagcgcttcctggagagatacatctacaaccgggaggagttcgcgcgcttcgacagcgacgtgggggagttccgggcggtgacggagctggggcggcctgctgcggagtactggaacagccagaaggacatcctggaggagaagcgggcagtgccggacaggatgtgcagacacaactacgagctgggcgggcccatgaccctgcagcgccgagtccagcctagggtgaatgtttccccctccaagaaggggcccttgcagcaccacaacctgcttgtctgccacgtgacggatttctacccaggcagcattcaagtccgatggttcctgaatggacaggaggaaacagctggggtcgtgtccaccaacctgatccgtaatggagactggaccttccagatcctggtgatgctggaaatgaccccccagcagggagatgtctacacctgccaagtggagcacaccagcctggatagtcctgtcaccgtggagtggaaggcacagtctgattctgcccggagtaagacattgacgggagctgggggcttcgtgctggggctcatcatctgtggagtgggcatcttcatgcacaggaggagcaagaaagttcaacgaggatctgcataaacagggttcctgagctcactgaaaagactattgtgccttaggaaaagcatttgctgtgtttcgttagcatctggctccaggacagaccttcaacttccaaattggatactgctgccaagaagttgctctgaagtcagtttctatcattctgctctttgattcaaagcactgtttctctcactgggcctccaaccatgttcccttcttcttagcaccacaaataatcaaaacccaacatgactgtttgttttcctttaaaaatatgcaccaaatcatctctcatcacttttctctgagggttttagtagacagtaggagttaataaagaagttcattttggtttaaacataggaaagaagagaaccatgaaaatggggatatgttaactattgtataatggggcctgttacacatgacactcttctgaattgactgtatttcagtgagctgcccccaaatcaagtttagtgccctcatccatttatgtctcagaccactattcttaactattcaatggtgagcagactgcaaatctgcctgataggacccatattcccacagcactaattcaacatataccttactgagagcatgttttatcattaccattaagaagttaaatgaacatcagaatttaaaatcataaatataatctaatacactttaa

SEQ ID NO: 151067 - DNA, 1361 bp, Homo sapiens
  Payload ID: 9771
  Gene Symbol: HLA-DPB1
  Gene Name: major histocompatibility complex, class II, DP beta 1
  ENST ID: ENST00000445925
  CDS Start-End: 1-707
agaattaccttttccagggacggcaggaatgctacgcgtttaatgggacacagcgcttcctggagagatacatctacaaccgggaggagttcgtgcgcttcgacagcgacgtgggggagttccgggcggtgacggagctggggcggcctgatgaggagtactggaacagccagaaggacatcctggaggaggagcgggcagtgccggacaggatgtgcagacacaactacgagctgggcgggcccatgaccctgcagcgccgagtccagcctagggtgaatgtttccccctccaagaaggggcccttgcagcaccacaacctgcttgtctgccacgtgacggatttctacccaggcagcattcaagtccgatggttcctgaatggacaggaggaaacagctggggtcgtgtccaccaacctgatccgtaatggagactggaccttccagatcctggtgatgctggaaatgaccccccagcagggagatgtctacacctgccaagtggagcacaccagcctggatagtcctgtcaccgtggagtggaaggcacagtctgattctgcccggagtaagacattgacgggagctgggggcttcgtgctggggctcatcatctgtggagtgggcatcttcatgcacaggaggagcaagaaaggtgagaaagcctgcaggttcaacgaggatctgcataaacagggttcctgagctcactgaaaagactattgtgccttaggaaaagcatttgctgtgtttcgttagcatctggctccaggacagaccttcaacttccaaattggatactgctgccaagaagttgctctgaagtcagtttctatcattctgctctttgattcaaagcactgtttctctcactgggcctccaaccatgttcccttcttcttagcaccacaaataatcaaaacccaacatgactgtttgttttcctttaaaaatatgcaccaaatcatctctcatcacttttctctgagggttttagtagacagtaggagttaataaagaagttcattttggtttaaacataggaaagaagagaaccatgaaaatggggatatgttaactattgtataatggggcctgttacacatgacactcttctgaattgactgtatttcagtgagctgcccccaaatcaagtttagtgccctcatccatttatgtctcagaccactattcttaactattcaatggtgagcagactgcaaatctgcctgataggacccatattcccacagcactaattcaacatataccttactgagagcatgttttatcattaccattaagaagttaaatgaacatcagaatttaaaatcataaatataatctaatacactttaa

SEQ ID NO: 151068 - DNA, 1361 bp, Homo sapiens
  Payload ID: 9771
  Gene Symbol: HLA-DPB1
  Gene Name: major histocompatibility complex, class II, DP beta 1
  ENST ID: ENST00000411722
  CDS Start-End: 1-707
agaattaccttttccagggacggcaggaatgctacgcgtttaatgggacacagcgcttcctggagagatacatctacaaccgggaggagttcgtgcgcttcgacagcgacgtgggggagttccgggcggtgacggagctggggcggcctgatgaggagtactggaacagccagaaggacatcctggaggagaagcgggcagtgccggacaggatgtgcagacacaactacgagctgggcgggcccatgaccctgcagcgccgagtccagcctagggtgaatgtttccccctccaagaaggggcccttgcagcaccacaacctgcttgtctgccacgtgacggatttctacccaggcagcattcaagtccgatggttcctgaatggacaggaggaaacagctggggtcgtgtccaccaacctgatccgtaatggagactggaccttccagatcctggtgatgctggaaatgaccccccagcagggagatgtctacacctgccaagtggagcacaccagcatggatagtcctgtcaccgtggagtggaaggcacagtctgattctgcccggagtaagacattgacgggagctgggggcttcgtgctggggctcatcatctgtggagtgggcatcttcatgcacaggaggagcaagaaaggtgagaaagcctgcaggttcaacgaggatctgcataaacagggttcctgagctcactgaaaagactattgtgccttaggaaaagcatttgctgtgtttcgttagcatctggctccaggacagaccttcaacttccaaattggatactgctgccaagaagttgctctgaagtcagtttctatcattctgctctttgattcaaagcactgtttctctcactgggcctccaaccatgttcccttcttcttagcaccacaaataatcaaaacccaacatgactgtttgttttcctttaaaaatatgcaccaaatcatctctcatcacttttctctgagggttttagtagacagtaggagttaataaagaagttcattttggtttaaacataggaaagaagagaaccatgaaaatggggatatgttaactattgtataatggggcctgttacacatgacactcttctgaattgactgtatttcagtgagctgcccccaaatcaagtttagtgccctcatccatttatgtctcagaccactattcttaactattcaatggtgagcagactgcaaatctgcctgataggacccatattcccacagcactaattcaacatataccttactgagagcatgttttatcattaccattaagaagttaaatgaacatcagaatttaaaatcataaatataatctaatacactttaa

SEQ ID NO: 151069 - DNA, 688 bp, Homo sapiens
  Payload ID: 9771
  Gene Symbol: HLA-DPB1
  Gene Name: major histocompatibility complex, class II, DP beta 1
  ENST ID: ENST00000445702
  CDS Start-End: 1-688
aaacaggcctggagaggctctgcgacccgcttaggaccacagaactcgggacggcaggaatgctacgcgtttaatgggacacagcgcttcctggagagatacatctacaaccgggaggagttcgtgcgcttcgacagcgacgtgggggagttccgggcggtgacggagctggggcggcctgatgaggagtactggaacagccagaaggacatcctggaggagaagcgggcagtgccggacaggatgtgcagacacaactacgagctgggcgggcccatgaccctgcagcgccgagtccagcctagggtgaatgtttccccctccaagaaggggcccttgcagcaccacaacctgcttgtctgccacgtgacggatttctacccaggcagcattcaagtccgatggttcctgaatggacaggaggaaacagctggggtcgtgtccaccaacctgatccgtaatggagactggaccttccagatcctggtgatgctggaaatgaccccccagcagggagatgtctacacctgccaagtggagcacaccagcatggatagtcctgtcaccgtggagtggaaggcacagtctgattctgcccggagtaagacattgacgggagctgggggcttcgtgctggggctcatcatctgtggagtgggcatcttcatgcacaggaggagcaagaaag

SEQ ID NO: 151070 - DNA, 688 bp, Homo sapiens
  Payload ID: 9771
  Gene Symbol: HLA-DPB1
  Gene Name: major histocompatibility complex, class II, DP beta 1
  ENST ID: ENST00000456386
  CDS Start-End: 1-688
aaacaggcctggagaggctctgcgacccgcttaggaccacagaactcgggacggcaggaatgctacgcgtttaatgggacacagcgcttcctggagagatacatctacaaccgggaggagttcgcgcgcttcgacagcgacgtgggggagttccgggcggtgacggagctggggcggcctgctgcggagtactggaacagccagaaggacatcctggaggagaagcgggcagtgccggacaggatgtgcagacacaactacgagctgggcgggcccatgaccctgcagcgccgagtccagcctagggtgaatgtttccccctccaagaaggggcccttgcagcaccacaacctgcttgtctgccacgtgacggatttctacccaggcagcattcaagtccgatggttcctgaatggacaggaggaaacagctggggtcgtgtccaccaacctgatccgtaatggagactggaccttccagatcctggtgatgctggaaatgaccccccagcagggagatgtctacacctgccaagtggagcacaccagcctggatagtcctgtcaccgtggagtggaaggcacagtctgattctgcccggagtaagacattgacgggagctgggggcttcgtgctggggctcatcatctgtggagtgggcatcttcatgcacaggaggagcaagaaag

SEQ ID NO: 151071 - DNA, 1424 bp, Homo sapiens
  Payload ID: 9771
  Gene Symbol: HLA-DPB1
  Gene Name: major histocompatibility complex, class II, DP beta 1
  ENST ID: ENST00000444931
  CDS Start-End: 71-757
gagctccctttagcgagtccttcttttcctgactgcagctcttttcattttgccatccttttccagctccatgatggttctgcaggtttctgcggccccccggacagtggctctgacggcgttactgatggtgctgctcacatctgtggtccagggcagggccactccagagaattaccttttccagggacggcaggaatgctacgcgtttaatgggacacagcgcttcctggagagatacatctacaaccgggaggagttcgcgcgcttcgacagcgacgtgggggagttccgggcggtgacggagctggggcggcctgctgcggagtactggaacagccagaaggacatcctggaggagaagcgggcagtgccggacaggatgtgcagacacaactacgagctgggcgggcccatgaccctgcagcgccgaggcagcattcaagtccgatggttcctgaatggacaggaggaaacagctggggtcgtgtccaccaacctgatccgtaatggagactggaccttccagatcctggtgatgctggaaatgaccccccagcagggagatgtctacacctgccaagtggagcacaccagcctggatagtcctgtcaccgtggagtggaaggcacagtctgattctgcccggagtaagacattgacgggagctgggggcttcgtgctggggctcatcatctgtggagtgggcatcttcatgcacaggaggagcaagaaagttcaacgaggatctgcataaacagggttcctgagctcactgaaaagactattgtgccttaggaaaagcatttgctgtgtttcgttagcatctggctccaggacagaccttcaacttccaaattggatactgctgccaagaagttgctctgaagtcagtttctatcattctgctctttgattcaaagcactgtttctctcactgggcctccaaccatgttcccttcttcttagcaccacaaataatcaaaacccaacatgactgtttgttttcctttaaaaatatgcaccaaatcatctctcatcacttttctctgagggttttagtagacagtaggagttaataaagaagttcattttggtttaaacataggaaagaagagaaccatgaaaatggggatatgttaactattgtataatggggcctgttacacatgacactcttctgaattgactgtatttcagtgagctgcccccaaatcaagtttagtgccctcatccatttatgtctcagaccactattcttaactattcaatggtgagcagactgcaaatctgcctgataggacccatattcccacagcactaattcaacatataccttactgagagcatgttttatcattaccattaagaagttaaatgaacatcagaatttaaaatcataaatataatctaatacactttaa

SEQ ID NO: 151072 - DNA, 1560 bp, Homo sapiens
  Payload ID: 9771
  Gene Symbol: HLA-DPB1
  Gene Name: major histocompatibility complex, class II, DP beta 1
  Uniprot ID: P04440
  ENST ID: ENST00000425130
  CDS Start-End: 117-893
gtcacagaagactacttgggttcatggtctctaatatttcaaacaggagctccctttagcgagtccttcttttcctgactgcagctcttttcattttgccatccttttccagctccatgatggttctgcaggtttctgcggccccccggacagtggctctgacggcgttactgatggtgctgctcacatctgtggtccagggcagggccactccagagaattaccttttccagggacggcaggaatgctacgcgtttaatgggacacagcgcttcctggagagatacatctacaaccgggaggagttcgtgcgcttcgacagcgacgtgggggagttccgggcggtgacggagctggggcggcctgatgaggagtactggaacagccagaaggacatcctggaggagaagcgggcagtgccggacaggatgtgcagacacaactacgagctgggcgggcccatgaccctgcagcgccgagtccagcctagggtgaatgtttccccctccaagaaggggcccttgcagcaccacaacctgcttgtctgccacgtgacggatttctacccaggcagcattcaagtccgatggttcctgaatggacaggaggaaacagctggggtcgtgtccaccaacctgatccgtaatggagactggaccttccagatcctggtgatgctggaaatgaccccccagcagggagatgtctacacctgccaagtggagcacaccagcatggatagtcctgtcaccgtggagtggaaggcacagtctgattctgcccggagtaagacattgacgggagctgggggcttcgtgctggggctcatcatctgtggagtgggcatcttcatgcacaggaggagcaagaaagttcaacgaggatctgcataaacagggttcctgagctcactgaaaagactattgtgccttaggaaaagcatttgctgtgtttcgttagcatctggctccaggacagaccttcaacttccaaattggatactgctgccaagaagttgctctgaagtcagtttctatcattctgctctttgattcaaagcactgtttctctcactgggcctccaaccatgttcccttcttcttagcaccacaaataatcaaaacccaacatgactgtttgttttcctttaaaaatatgcaccaaatcatctctcatcacttttctctgagggttttagtagacagtaggagttaataaagaagttcattttggtttaaacataggaaagaagagaaccatgaaaatggggatatgttaactattgtataatggggcctgttacacatgacactcttctgaattgactgtatttcagtgagctgcccccaaatcaagtttagtgccctcatccatttatgtctcagaccactattcttaactattcaatggtgagcagactgcaaatctgcctgataggacccatattcccacagcactaattcaacatataccttactgagagcatgttttatcattaccattaagaagttaaatgaacatcagaatttaaaatcataaatataatctaatacactttaa

SEQ ID NO: 151073 - DNA, 688 bp, Homo sapiens; identical to SEQ ID NO: 151069
  Payload ID: 9771
  Gene Symbol: HLA-DPB1
  Gene Name: major histocompatibility complex, class II, DP beta 1
  ENST ID: ENST00000441678
  CDS Start-End: 1-688

SEQ ID NO: 151074 - DNA, 1424 bp, Homo sapiens; identical to SEQ ID NO: 151071
  Payload ID: 9771
  Gene Symbol: HLA-DPB1
  Gene Name: major histocompatibility complex, class II, DP beta 1
  ENST ID: ENST00000411424
  CDS Start-End: 71-757

SEQ ID NO: 151075 - DNA, 1560 bp, Homo sapiens
  Payload ID: 9771
  Gene Symbol: HLA-DPB1
  Gene Name: major histocompatibility complex, class II, DP beta 1
  ENST ID: ENST00000415996
  CDS Start-End: 117-893
gtcacagaagactacttgggttcatggtctctaatatttcaaacaggagctccctttagcgagtccttcttttcctgactgcagctcttttcattttgccatccttttccagctccatgatggttctgcaggtttctgcggccccccggacagtggctctgacggcgttactgatggtgctgctcacatctgtggtccagggcagggccactccagagaattaccttttccagggacggcaggaatgctacgcgtttaatgggacacagcgcttcctggagagatacatctacaaccgggaggagttcgtgcgcttcgacagcgacgtgggggagttccgggcggtgacggagctggggcggcctgatgaggagtactggaacagccagaaggacatcctggaggaggagcgggcagtgccggacaggatgtgcagacacaactacgagctgggcgggcccatgaccctgcagcgccgagtccagcctagggtgaatgtttccccctccaagaaggggcccttgcagcaccacaacctgcttgtctgccacgtgacggatttctacccaggcagcattcaagtccgatggttcctgaatggacaggaggaaacagctggggtcgtgtccaccaacctgatccgtaatggagactggaccttccagatcctggtgatgctggaaatgaccccccagcagggagatgtctacacctgccaagtggagcacaccagcctggatagtcctgtcaccgtggagtggaaggcacagtctgattctgcccggagtaagacattgacgggagctgggggcttcgtgctggggctcatcatctgtggagtgggcatcttcatgcacaggaggagcaagaaagttcaacgaggatctgcataaacagggttcctgagctcactgaaaagactattgtgccttaggaaaagcatttgctgtgtttcgttagcatctggctccaggacagaccttcaacttccaaattggatactgctgccaagaagttgctctgaagtcagtttctatcattctgctctttgattcaaagcactgtttctctcactgggcctccaaccatgttcccttcttcttagcaccacaaataatcaaaacccaacatgactgtttgttttcctttaaaaatatgcaccaaatcatctctcatcacttttctctgagggttttagtagacagtaggagttaataaagaagttcattttggtttaaacataggaaagaagagaaccatgaaaatggggatatgttaactattgtataatggggcctgttacacatgacactcttctgaattgactgtatttcagtgagctgcccccaaatcaagtttagtgccctcatccatttatgtctcagaccactattcttaactattcaatggtgagcagactgcaaatctgcctgataggacccatattcccacagcactaattcaacatataccttactgagagcatgttttatcattaccattaagaagttaaatgaacatcagaatttaaaatcataaatataatctaatacactttaa

SEQ ID NO: 151076 - DNA, 1361 bp, Homo sapiens
  Payload ID: 9771
  Gene Symbol: HLA-DPB1
  Gene Name: major histocompatibility complex, class II, DP beta 1
  ENST ID: ENST00000416804
  CDS Start-End: 1-707
agaattaccttttccagggacggcaggaatgctacgcgtttaatgggacacagcgcttcctggagagatacatctacaaccgggaggagttcgcgcgcttcgacagcgacgtgggggagttccgggcggtgacggagctggggcggcctgctgcggagtactggaacagccagaaggacatcctggaggagaagcgggcagtgccggacaggatgtgcagacacaactacgagctgggcgggcccatgaccctgcagcgccgagtccagcctagggtgaatgtttccccctccaagaaggggcccttgcagcaccacaacctgcttgtctgccacgtgacggatttctacccaggcagcattcaagtccgatggttcctgaatggacaggaggaaacagctggggtcgtgtccaccaacctgatccgtaatggagactggaccttccagatcctggtgatgctggaaatgaccccccagcagggagatgtctacacctgccaagtggagcacaccagcctggatagtcctgtcaccgtggagtggaaggcacagtctgattctgcccggagtaagacattgacgggagctgggggcttcgtgctggggctcatcatctgtggagtgggcatcttcatgcacaggaggagcaagaaaggtgagaaagcctgcaggttcaacgaggatctgcataaacagggttcctgagctcactgaaaagactattgtgccttaggaaaagcatttgctgtgtttcgttagcatctggctccaggacagaccttcaacttccaaattggatactgctgccaagaagttgctctgaagtcagtttctatcattctgctctttgattcaaagcactgtttctctcactgggcctccaaccatgttcccttcttcttagcaccacaaataatcaaaacccaacatgactgtttgttttcctttaaaaatatgcaccaaatcatctctcatcacttttctctgagggttttagtagacagtaggagttaataaagaagttcattttggtttaaacataggaaagaagagaaccatgaaaatggggatatgttaactattgtataatggggcctgttacacatgacactcttctgaattgactgtatttcagtgagctgcccccaaatcaagtttagtgccctcatccatttatgtctcagaccactattcttaactattcaatggtgagcagactgcaaatctgcctgataggacccatattcccacagcactaattcaacatataccttactgagagcatgttttatcattaccattaagaagttaaatgaacatcagaatttaaaatcataaatataatctaatacactttaa

SEQ ID NO: 151077 - DNA, 688 bp, Homo sapiens
  Payload ID: 9771
  Gene Symbol: HLA-DPB1
  Gene Name: major histocompatibility complex, class II, DP beta 1
  ENST ID: ENST00000415438
  CDS Start-End: 1-688
aaacaggcctggagaggctctgcgacccgcttaggaccacagaactcgggacggcaggaatgctacgcgtttaatgggacacagcgcttcctggagagatacatctacaaccgggaggagttcgtgcgcttcgacagcgacgtgggggagttccgggcggtgacggagctggggcggcctgatgaggagtactggaacagccagaaggacatcctggaggaggagcgggcagtgccggacaggatgtgcagacacaactacgagctgggcgggcccatgaccctgcagcgccgagtccagcctagggtgaatgtttccccctccaagaaggggcccttgcagcaccacaacctgcttgtctgccacgtgacggatttctacccaggcagcattcaagtccgatggttcctgaatggacaggaggaaacagctggggtcgtgtccaccaacctgatccgtaatggagactggaccttccagatcctggtgatgctggaaatgaccccccagcagggagatgtctacacctgccaagtggagcacaccagcctggatagtcctgtcaccgtggagtggaaggcacagtctgattctgcccggagtaagacattgacgggagctgggggcttcgtgctggggctcatcatctgtggagtgggcatcttcatgcacaggaggagcaagaaag

SEQ ID NO: 151078 - DNA, 1424 bp, Homo sapiens
  Payload ID: 9771
  Gene Symbol: HLA-DPB1
  Gene Name: major histocompatibility complex, class II, DP beta 1
  ENST ID: ENST00000411558
  CDS Start-End: 71-757
gagctccctttagcgagtccttcttttcctgactgcagctcttttcattttgccatccttttccagctccatgatggttctgcaggtttctgcggccccccggacagtggctctgacggcgttactgatggtgctgctcacatctgtggtccagggcagggccactccagagaattaccttttccagggacggcaggaatgctacgcgtttaatgggacacagcgcttcctggagagatacatctacaaccgggaggagttcgtgcgcttcgacagcgacgtgggggagttccgggcggtgacggagctggggcggcctgatgaggagtactggaacagccagaaggacatcctggaggagaagcgggcagtgccggacaggatgtgcagacacaactacgagctgggcgggcccatgaccctgcagcgccgaggcagcattcaagtccgatggttcctgaatggacaggaggaaacagctggggtcgtgtccaccaacctgatccgtaatggagactggaccttccagatcctggtgatgctggaaatgaccccccagcagggagatgtctacacctgccaagtggagcacaccagcatggatagtcctgtcaccgtggagtggaaggcacagtctgattctgcccggagtaagacattgacgggagctgggggcttcgtgctggggctcatcatctgtggagtgggcatcttcatgcacaggaggagcaagaaagttcaacgaggatctgcataaacagggttcctgagctcactgaaaagactattgtgccttaggaaaagcatttgctgtgtttcgttagcatctggctccaggacagaccttcaacttccaaattggatactgctgccaagaagttgctctgaagtcagtttctatcattctgctctttgattcaaagcactgtttctctcactgggcctccaaccatgttcccttcttcttagcaccacaaataatcaaaacccaacatgactgtttgttttcctttaaaaatatgcaccaaatcatctctcatcacttttctctgagggttttagtagacagtaggagttaataaagaagttcattttggtttaaacataggaaagaagagaaccatgaaaatggggatatgttaactattgtataatggggcctgttacacatgacactcttctgaattgactgtatttcagtgagctgcccccaaatcaagtttagtgccctcatccatttatgtctcagaccactattcttaactattcaatggtgagcagactgcaaatctgcctgataggacccatattcccacagcactaattcaacatataccttactgagagcatgttttatcattaccattaagaagttaaatgaacatcagaatttaaaatcataaatataatctaatacactttaa

SEQ ID NO: 151079 - DNA, 1361 bp, Homo sapiens; identical to SEQ ID NO: 151076
  Payload ID: 9771
  Gene Symbol: HLA-DPB1
  Gene Name: major histocompatibility complex, class II, DP beta 1
  ENST ID: ENST00000447674
  CDS Start-End: 1-707

SEQ ID NO: 151080 - DNA, 1560 bp, Homo sapiens; identical to SEQ ID NO: 151066
  Payload ID: 9771
  Gene Symbol: HLA-DPB1
  Gene Name: major histocompatibility complex, class II, DP beta 1
  Uniprot ID: P04440
  ENST ID: ENST00000433800
  CDS Start-End: 117-893

SEQ ID NO: 151081 - DNA, 1560 bp, Homo sapiens; identical to SEQ ID NO: 151066
  Payload ID: 9771
  Gene Symbol: HLA-DPB1
  Gene Name: major histocompatibility complex, class II, DP beta 1
  Uniprot ID: P04440
  ENST ID: ENST00000418931
  CDS Start-End: 117-893

SEQ ID NO: 151082 - DNA, 1361 bp, Homo sapiens
  Payload ID: 9771
  Gene Symbol: HLA-DPB1
  Gene Name: major histocompatibility complex, class II, DP beta 1
  ENST ID: ENST00000432661
  CDS Start-End: 1-707
agaattaccttttccagggacggcaggaatgctacgcgtttaatgggacacagcgcttcctggagagatacatctacaaccgggaggagctcgtgcgcttcgacagcgacgtgggggagttccgggcggtgacggagctggggcggcctgaggcggagtactggaacagccagaaggacatcctggaggaggagcgggcagtgccggacaggatgtgcagacacaactacgagctgggcgggcccatgaccctgcagcgccgagtccagcctagggtgaatgtttccccctccaagaaggggcccttgcagcaccacaacctgcttgtctgccacgtgacggatttctacccaggcagcattcaagtccgatggttcctgaatggacaggaggaaacagctggggtcgtgtccaccaacctgatccgtaatggagactggaccttccagatcctggtgatgctggaaatgaccccccagcagggagatgtctacacctgccaagtggagcacaccagcctggatagtcctgtcaccgtggagtggaaggcacagtctgattctgcccggagtaagacattgacgggagctgggggcttcgtgctggggctcatcatctgtggagtgggcatcttcatgcacaggaggagcaagaaaggtgagaaagcctgcaggttcaacgaggatctgcataaacagggttcctgagctcactgaaaagactattgtgccttaggaaaagcatttgctgtgtttcgttagcatctggctccaggacagaccttcaacttccaaattggatactgctgccaagaagttgctctgaagtcagtttctatcattctgctctttgattcaaagcactgtttctctcactgggcctccaaccatgttcccttcttcttagcaccacaaataatcaaaacccaacatgactgtttgttttcctttaaaaatatgcaccaaatcatctctcatcacttttctctgagggttttagtagacagtaggagttaataaagaagttcattttggtttaaacataggaaagaagagaaccatgaaaatggggatatgttaactattgtataatggggcctgttacacatgacactcttctgaattgactgtatttcagtgagctgcccccaaatcaagtttagtgccctcatccatttatgtctcagaccactattcttaactattcaatggtgagcagactgcaaatctgcctgataggacccatattcccacagcactaattcaacatataccttactgagagcatgttttatcattaccattaagaagttaaatgaacatcagaatttaaaatcataaatataatctaatacactttaa

SEQ ID NO: 151083 - DNA, 688 bp, Homo sapiens; identical to SEQ ID NO: 151070
  Payload ID: 9771
  Gene Symbol: HLA-DPB1
  Gene Name: major histocompatibility complex, class II, DP beta 1
  ENST ID: ENST00000418444
  CDS Start-End: 1-688

SEQ ID NO: 151084 - DNA, 1361 bp, Homo sapiens; identical to SEQ ID NO: 151068
  Payload ID: 9771
  Gene Symbol: HLA-DPB1
  Gene Name: major histocompatibility complex, class II, DP beta 1
  ENST ID: ENST00000455122
  CDS Start-End: 1-707

SEQ ID NO: 151085 - DNA, 1424 bp, Homo sapiens; identical to SEQ ID NO: 151078
  Payload ID: 9771
  Gene Symbol: HLA-DPB1
  Gene Name: major histocompatibility complex, class II, DP beta 1
  ENST ID: ENST00000441981
  CDS Start-End: 71-757

SEQ ID NO: 151086 - DNA, 688 bp, Homo sapiens; identical to SEQ ID NO: 151070
  Payload ID: 9771
  Gene Symbol: HLA-DPB1
  Gene Name: major histocompatibility complex, class II, DP beta 1
  ENST ID: ENST00000428835
  CDS Start-End: 1-688

SEQ ID NO: 151087 - DNA, 1424 bp, Homo sapiens
  Payload ID: 9771
  Gene Symbol: HLA-DPB1
  Gene Name: major histocompatibility complex, class II, DP beta 1
  ENST ID: ENST00000441857
  CDS Start-End: 71-757
gagctccctttagcgagtccttcttttcctgactgcagctcttttcattttgccatccttttccagctccatgatggttctgcaggtttctgcggccccccggacagtggctctgacggcgttactgatggtgctgctcacatctgtggtccagggcagggccactccagagaattacgtgtaccagttacggcaggaatgctacgcgtttaatgggacacagcgcttcctggagagatacatctacaaccgggaggagttcgtgcgcttcgacagcgacgtgggggagttccgggcggtgacggagctggggcggcctgatgaggactactggaacagccagaaggacctcctggaggagaagcgggcagtgccggacagggtatgcagacacaactacgagctggacgaggccgtgaccctgcagcgccgaggcagcattcaagtccgatggttcctgaatggacaggaggaaacagctggggtcgtgtccaccaacctgatccgtaatggagactggaccttccagatcctggtgatgctggaaatgaccccccagcagggagacgtctacatctgccaagtggagcacaccagcctggacagtcctgtcaccgtggagtggaaggcacagtctgattctgcccggagtaagacattgacgggagctgggggcttcgtgctggggctcatcatctgtggagtgggcatcttcatgcacaggaggagcaagaaagttcaacgaggatctgcataaacagggttcctgacctcaccgaaaagactaatgtgccttagaacaagcatttgctgtgttttgttagcacctggttccaggacagaccctcagcttcccaagaggatactgctgccaagaagttgctctgaagtcagtttctatcgttctgctctttgattcaaagcactgtttctctcactgggcctccaaccatgttcccttcttcttagcaccacaaataatcaaaacccaacataagtgtttgttttcctttaaaaatatgcatcaaatcgtctctcattacttttctctgagggttttagtaaacagtaggagttaataaagaagttcattttggtttacacgtaggaaagaagagaagcatgaaagtggagatatgttaactattgtataatgtggcctgttatacatgacactcttctgaattgactgtatttcagtgagctgcccccaaatcaagtttagtgccctcatccatttatgtctcagaccgctattcttaactattcaatggtgagcagactgcaaatctgcctgataggacccgtattcccacagcactaattcaacatatatcttactgagagcatgttttatcattaccattaagaagttaaatgaacatcagaatttaaaatcataaatataatctaatacactttaa

SEQ ID NO: 151088 - DNA, 1560 bp, Homo sapiens; identical to SEQ ID NO: 151072
  Payload ID: 9771
  Gene Symbol: HLA-DPB1
  Gene Name: major histocompatibility complex, class II, DP beta 1
  Uniprot ID: P04440
  ENST ID: ENST00000411749
  CDS Start-End: 117-893

SEQ ID NO: 151089 - DNA, 1361 bp, Homo sapiens; identical to SEQ ID NO: 151076
  Payload ID: 9771
  Gene Symbol: HLA-DPB1
  Gene Name: major histocompatibility complex, class II, DP beta 1
  ENST ID: ENST00000458614
  CDS Start-End: 1-707

SEQ ID NO: 151090 - DNA, 1361 bp, Homo sapiens
  Payload ID: 9771
  Gene Symbol: HLA-DPB1
  Gene Name: major histocompatibility complex, class II, DP beta 1
  ENST ID: ENST00000434121
  CDS Start-End: 1-707
agaattacgtgtaccagttacggcaggaatgctacgcgtttaatgggacacagcgcttcctggagagatacatctacaaccgggaggagttcgtgcgcttcgacagcgacgtgggggagttccgggcggtgacggagctggggcggcctgatgaggactactggaacagccagaaggacctcctggaggagaagcgggcagtgccggacagggtatgcagacacaactacgagctggacgaggccgtgaccctgcagcgccgagtccagcctaaggtgaacgtttccccctccaagaaggggcccctgcagcaccacaacctgcttgtctgccacgtgacagatttctacccaggcagcattcaagtccgatggttcctgaatggacaggaggaaacagctggggtcgtgtccaccaacctgatccgtaatggagactggaccttccagatcctggtgatgctggaaatgaccccccagcagggagacgtctacatctgccaagtggagcacaccagcctggacagtcctgtcaccgtggagtggaaggcacagtctgattctgcccggagtaagacattgacgggagctgggggcttcgtgctggggctcatcatctgtggagtgggcatcttcatgcacaggaggagcaagaaaggtgagaaagcctgcaagttcaacgaggatctgcataaacagggttcctgacctcaccgaaaagactaatgtgccttagaacaagcatttgctgtgttttgttagcacctggttccaggacagaccctcagcttcccaagaggatactgctgccaagaagttgctctgaagtcagtttctatcgttctgctctttgattcaaagcactgtttctctcactgggcctccaaccatgttcccttcttcttagcaccacaaataatcaaaacccaacataagtgtttgttttcctttaaaaatatgcatcaaatcgtctctcattacttttctctgagggttttagtaaacagtaggagttaataaagaagttcattttggtttacacgtaggaaagaagagaagcatgaaagtggagatatgttaactattgtataatgtggcctgttatacatgacactcttctgaattgactgtatttcagtgagctgcccccaaatcaagtttagtgccctcatccatttatgtctcagaccgctattcttaactattcaatggtgagcagactgcaaatctgcctgataggacccgtattcccacagcactaattcaacatatatcttactgagagcatgttttatcattaccattaagaagttaaatgaacatcagaatttaaaatcataaatataatctaatacactttaa

SEQ ID NO: 151091 - DNA, 1591 bp, Homo sapiens
  Payload ID: 9772
  Gene Symbol: HLA-DQA1
  Gene Name: major histocompatibility complex, class II, DQ alpha 1
  Uniprot ID: P01909
  ENST ID: ENST00000343139
  CDS Start-End: 103-870
ggcagggtttggtttgggtgtcttcagatttccttgtcttgaggtcctcacaattactctacagctcagaacaccaactgctgaggctgccttgggaagaggatgatcctaaacaaagctctgctgctgggggccctcgctctgaccaccgtgatgagcccctgtggaggtgaagacattgtggctgaccacgttgcctcttgtggtgtaaacttgtaccagttttacggtccctctggccagtacacccatgaatttgatggagatgagcagttctacgtggacctggagaggaaggagactgcctggcggtggcctgagttcagcaaatttggaggttttgacccgcagggtgcactgagaaacatggctgtggcaaaacacaacttgaacatcatgattaaacgctacaactctaccgctgctaccaatgaggttcctgaggtcacagtgttttccaagtctcccgtgacactgggtcagcccaacaccctcatttgtcttgtggacaacatctttcctcctgtggtcaacatcacatggctgagcaatgggcagtcagtcacagaaggtgtttctgagaccagcttcctctccaagagtgatcattccttcttcaagatcagttacctcaccttcctcccttctgctgatgagatttatgactgcaaggtggagcactggggcctggaccagcctcttctgaaacactgggagcctgagattccagcccctatgtcagagctcacagagactgtggtctgtgccctggggttgtctgtgggcctcatgggcattgtggtgggcactgtcttcatcatccaaggcctgcgttcagttggtgcttccagacaccaagggccattgtgaatcccatcctggaagggaaggtgcatcgccatctacaggagcagaagaatggacttgctaaatgacctagcactattctctggcccgatttatcatatcccttttctcctccaaatatttctcctctcaccttttctctgggacttaagctgctatatcccctcagagctcacaaatgcctttacattctttccctgacctcctgattttttttttcttttctcaaatgttacctacaaagacatgcctggggtaagccacccggctacctaattcctcagtaacctccatctaaaatctccaaggaagcaataaattccttttatgagatctatgtcaaatttttccatctttcatccagggctgactgaaactatggctaataattggggtactcttatgtttcaatccaatttaacctcatttcccagatcatttttcatgtccagtaacacagaagccaccaagtacagtatagcctgataatatgttgatttcttagctgacattaatatttcttgcttccttgtgttcccacccttggcactgccacccacccctcaattcaggcaacaatgaaattaatggataccgtctgcccttggcccagaattgttatagcaaaaattttagaaccaaaaaataagtctgtactaatttcaatgtggcttttaaaagtatgacagagaaataagttaggataaaggaaatttgaatctca

SEQ ID NO: 151092 - DNA, 1060 bp, Homo sapiens
  Payload ID: 9772
  Gene Symbol: HLA-DQA1
  Gene Name: major histocompatibility complex, class II, DQ alpha 1
  Uniprot ID: P01909
  ENST ID: ENST00000374949
  CDS Start-End: 40-807
gctcagaacaccaactgctgaggctgccttgggaagaggatgatcctaaacaaagctctgctgctgggggccctcgctctgaccaccgtgatgagcccctgtggaggtgaagacattgtggctgaccacgttgcctcttgtggtgtaaacttgtaccagttttacggtccctctggccagtacacccatgaatttgatggagatgagcagttctacgtggacctggagaggaaggagactgcctggcggtggcctgagttcagcaaatttggaggttttgacccgcagggtgcactgagaaacatggctgtggcaaaacacaacttgaacatcatgattaaacgctacaactctaccgctgctaccaatgaggttcctgaggtcacagtgttttccaagtctcccgtgacactgggtcagcccaacaccctcatttgtcttgtggacaacatctttcctcctgtggtcaacatcacatggctgagcaatgggcagtcagtcacagaaggtgtttctgagaccagcttcctctccaagagtgatcattccttcttcaagatcagttacctcaccttcctcccttctgctgatgagatttatgactgcaaggtggagcactggggcctggaccagcctcttctgaaacactgggagcctgagattccagcccctatgtcagagctcacagagactgtggtctgtgccctggggttgtctgtgggcctcatgggcattgtggtgggcactgtcttcatcatccaaggcctgcgttcagttggtgcttccagacaccaagggccattgtgaatcccatcctggaagggaaggtaagattgagactggttacagttgaagcggcagtatgaaaggaaggaaagtgggagggcgttgtggacatgaatgtggttgaaagttgtaggggaattgggaagtggcatgatgatgacacaggagccccctcggacccattgatctcatgtctgccctgttgcaggtgcatcgccatctacaggagcagaagaatggacttgctaaatgacctagcactattctctggccc

SEQ ID NO: 151093 - DNA, 1522 bp, Homo sapiens
  Payload ID: 9772
  Gene Symbol: HLA-DQA1
  Gene Name: major histocompatibility complex, class II, DQ alpha 1
  Uniprot ID: P01909
  ENST ID: ENST00000383251
  CDS Start-End: 103-867
ggcagggtttggtttgggtgtcttcagattgccttgtctcgaggtcctcacaattgctctacaactcagaacagcaactgctaaggctgccttgggaagaggatgatcctaaacaaagctctgatgctgggggcccttgccctgaccaccgtgatgagcccctgtggaggtgaagacattgtggctgaccacgtcgcctcttatggtgtaaacttgtaccagtcttacggtccctctggccagtacacccatgaatttgatggagatgagcagttctacgtggacctggggaggaaggagactgtctggtgtttgcctgttctcagacaatttagatttgacccgcaatttgcactgacaaacatcgctgtcctaaaacataacttgaacagtctgattaaacgctccaactctaccgctgctaccaatgaggttcctgaggtcacagtgttttccaagtctcccgtgacactgggtcagcccaacatcctcatctgtcttgtggacaacatctttcctcctgtggtcaacatcacatggctgagcaatgggcactcagtcacagaaggtgtttctgagaccagcttcctctccaagagtgatcattccttcttcaagatcagttacctcaccctcctcccttctgctgaggagagttatgactgcaaggtggagcactggggcctggacaagcctcttctgaaacactgggagcctgagattccagcccctatgtcagagctcacagagactgtggtctgcgccctgggattgtctgtgggcctcgtgggcattgtggtgggcactgtcttcatcatccgaggcctgcgttcagttggtgcttccagacaccaagggcccttgtgaatcccatcctggaatggaaggtgcatcgccatctacaggagcagaagagtggacttgctacatgacctagcattattttctggccccatttatcatatcccttttctcctccaaatgtttctcctctcacctcttctgtgggacttaaattgctatatctgctcagagctcacaaatgcctttgaattatttccctgacttcctgatttttttcttcttaagtgttacctactaagagttgcctggagtaagccacccagctacctaattcctcagtaacctccatctataatctccatggaagcaacaaattccctttatgagatatatgtcaaatttttccatctttcatccagggctgactgaaaccgtggctaagaattgggagactctcttgtttcaagccaatttaacatcatttaccagatcatttgtcatgtccagtaacacagaagcaaccaactacagtatagcctgataacatgatttcttagctgacattaatatttctttcttccttgtgttcccacccttggcattgccacccacccctcaattaaggcaacaatgaagttaatggataccctctgcctttggctcagaaatgttatagcaaaaattttaaaataaaaaagtaagtctgtactaatttcaa

SEQ ID NO: 151094 - DNA, 1206 bp, Homo sapiens
  Payload ID: 9772
  Gene Symbol: HLA-DQA1
  Gene Name: major histocompatibility complex, class II, DQ alpha 1
  Uniprot ID: P01909
  ENST ID: ENST00000395363
  CDS Start-End: 59-826
tcctcacaattactctacagctcagaacaccaactgctgaggctgccttgggaagaggatgatcctaaacaaagctctgctgctgggggccctcgctctgaccaccgtgatgagcccctgtggaggtgaagacattgtggctgaccacgttgcctcttgtggtgtaaacttgtaccagttttacggtccctctggccagtacacccatgaatttgatggagatgagcagttctacgtggacctggagaggaaggagactgcctggcggtggcctgagttcagcaaatttggaggttttgacccgcagggtgcactgagaaacatggctgtggcaaaacacaacttgaacatcatgattaaacgctacaactctaccgctgctaccaatgaggttcctgaggtcacagtgttttccaagtctcccgtgacactgggtcagcccaacaccctcatttgtcttgtggacaacatctttcctcctgtggtcaacatcacatggctgagcaatgggcagtcagtcacagaaggtgtttctgagaccagcttcctctccaagagtgatcattccttcttcaagatcagttacctcaccttcctcccttctgctgatgagatttatgactgcaaggtggagcactggggcctggaccagcctcttctgaaacactgggagcctgagattccagcccctatgtcagagctcacagagactgtggtctgtgccctggggttgtctgtgggcctcatgggcattgtggtgggcactgtcttcatcatccaaggcctgcgttcagttggtgcttccagacaccaagggccattgtgaatcccatcctggaagggaagggctgactgaaactatggctaataattggggtactcttatgtttcaatccaatttaacctcatttcccagatcatttttcatgtccagtaacacagaagccaccaagtacagtatagcctgataatatgttgatttcttagctgacattaatatttcttgcttccttgtgttcccacccttggcactgccacccacccctcaattcaggcaacaatgaaattaatggataccgtctgcccttggcccagaattgttatagcaaaaattttagaaccaaaaaataagtctgtactaatttcaatgtggcttttaaaagtatgacagagaaataagttaggataaaggaaatttgaatctca

SEQ ID NO: 151095 - DNA, 1103 bp, Homo sapiens
  Payload ID: 9772
  Gene Symbol: HLA-DQA1
  Gene Name: major histocompatibility complex, class II, DQ alpha 1
  Uniprot ID: P01909
  ENST ID: ENST00000399675
  CDS Start-End: 20-784
aggctgccttgggaagaggatgatcctaaacaaagctctgatgctgggggcccttgccctgaccaccgtgatgagcccctgtggaggtgaagacattgtggctgaccacgtcgcctcttatggtgtaaacttgtaccagtcttacggtccctctggccagtacacccatgaatttgatggagatgagcagttctacgtggacctggggaggaaggagactgtctggtgtttgcctgttctcagacaatttagatttgacccgcaatttgcactgacaaacatcgctgtcctaaaacataacttgaacagtctgattaaacgctccaactctaccgctgctaccaatgaggttcctgaggtcacagtgttttccaagtctcccgtgacactgggtcagcccaacatcctcatctgtcttgtggacaacatctttcctcctgtggtcaacatcacatggctgagcaatgggcactcagtcacagaaggtgtttctgagaccagcttcctctccaagagtgatcattccttcttcaagatcagttacctcaccctcctcccttctgctgaggagagttatgactgcaaggtggagcactggggcctggacaagcctcttctgaaacactgggagcctgagattccagcccctatgtcagagctcacagagactgtggtctgcgccctgggattgtctgtgggcctcgtgggcattgtggtgggcactgtcttcatcatccgaggcctgcgttcagttggtgcttccagacaccaagggcccttgtgaatcccatcctggaatggaagggctgactgaaaccgtggctaagaattgggagactctcttgtttcaagccaatttaacatcatttaccagatcatttgtcatgtccagtaacacagaagcaaccaactacagtatagcctgataacatgatttcttagctgacattaatatttctttcttccttgtgttcccacccttggcattgccacccacccctcaattaaggcaacaatgaagttaatggataccctctgcctttggctcagaaatgttatagcaaaaattttaaaataaaaaagtaagtctgtactaatttcaa

SEQ ID NO: 151096 - DNA, 1237 bp, Homo sapiens
  Payload ID: 9772
  Gene Symbol: HLA-DQA1
  Gene Name: major histocompatibility complex, class II, DQ alpha 1
  Uniprot ID: P01909
  ENST ID: ENST00000399678
  CDS Start-End: 20-784
aggctgccttgggaagaggatgatcctaaacaaagctctgatgctgggggcccttgccctgaccaccgtgatgagcccctgtggaggtgaagacattgtggctgaccacgtcgcctcttatggtgtaaacttgtaccagtcttacggtccctctggccagtacacccatgaatttgatggagatgagcagttctacgtggacctggggaggaaggagactgtctggtgtttgcctgttctcagacaatttagatttgacccgcaatttgcactgacaaacatcgctgtcctaaaacataacttgaacagtctgattaaacgctccaactctaccgctgctaccaatgaggttcctgaggtcacagtgttttccaagtctcccgtgacactgggtcagcccaacatcctcatctgtcttgtggacaacatctttcctcctgtggtcaacatcacatggctgagcaatgggcactcagtcacagaaggtgtttctgagaccagcttcctctccaagagtgatcattccttcttcaagatcagttacctcaccctcctcccttctgctgaggagagttatgactgcaaggtggagcactggggcctggacaagcctcttctgaaacactgggagcctgagattccagcccctatgtcagagctcacagagactgtggtctgcgccctgggattgtctgtgggcctcgtgggcattgtggtgggcactgtcttcatcatccgaggcctgcgttcagttggtgcttccagacaccaagggcccttgtgaatcccatcctggaatggaagtgttacctactaagagttgcctggagtaagccacccagctacctaattcctcagtaacctccatctataatctccatggaagcaacaaattccctttatgagatatatgtcaaatttttccatctttcatccagggctgactgaaaccgtggctaagaattgggagactctcttgtttcaagccaatttaacatcatttaccagatcatttgtcatgtccagtaacacagaagcaaccaactacagtatagcctgataacatgatttcttagctgacattaatatttctttcttccttgtgttcccacccttggcattgccacccacccctcaattaaggcaacaatgaagttaatggataccctctgcctttggctcagaaatgttatagcaaaaattttaaaataaaaaagtaagtctgtactaatttcaa

SEQ ID NO: 151097 - DNA, 1217 bp, Homo sapiens
  Payload ID: 9772
  Gene Symbol: HLA-DQA1
  Gene Name: major histocompatibility complex, class II, DQ alpha 1
  Uniprot ID: P01909
  ENST ID: ENST00000418023
  CDS Start-End: 103-870
ggcagggtttggtttgggtgtcttcagatttccttgtcttgaggccctcacaattgctctacagctcagaacagcaactgctgaggctgccttgggaagaggatgatcctaaacaaagctctgatgctgggggccctcgccctgaccaccgtgatgagcccttgtggaggtgaagacattgtggctgaccatgttgcctcttacggtgtaaacttgtaccagtcttatggtccctctgggcagtacagccatgaatttgatggagacgaggagttctatgtggacctggagaggaaggagactgtctggcagttgcctctgttccgcagatttagaagatttgacccgcaatttgcactgacaaacatcgctgtgctaaaacataacttgaacatcgtgattaaacgctccaactctaccgctgctaccaatgaggttcctgaggtcacagtgttttccaagtctcccgtgacactgggtcagcccaacaccctcatctgtcttgtggacaacatctttcctcctgtggtcaacatcacctggctgagcaatgggcactcagtcacagaaggtgtttctgagaccagcttcctctccaagagtgatcattccttcttcaagatcagttacctcaccttcctcccttctgctgatgagatttatgactgcaaggtggagcactggggcctggatgagcctcttctgaaacactgggagcctgagattccaacacctatgtcagagctcacagagactgtggtctgcgccctggggttgtctgtgggcctcgtgggcattgtggtggggaccgtcttgatcatccgaggcctgcgttcagttggtgcttccagacaccaagggcccttgtgaatcccatcctgaaaaggaaggtgcatcaccatctacagcagcggaagagtggacttgctacatgacctagcactattctctggcccgatttatcataccctttttctcctgcaaatgtttctcctcttaccttttctctgctttttttttcttaagcttctgtatcccctcagagctcacaaatgcctttgaattctttccctgacctcctgatttttttttcttttctcaggtgttacctactaagagatgcctggggtaagccgcccagctacctaattcctcagtaacatcgatctaaaatctccatggaagcaataaattccctttaagagatctatgtcaaa

SEQ ID NO: 151098 - DNA, 1385 bp, Homo sapiens
  Payload ID: 9772
  Gene Symbol: HLA-DQA1
  Gene Name: major histocompatibility complex, class II, DQ alpha 1
  ENST ID: ENST00000456258
  CDS Start-End: 103-870
ggcagggtttggtttgggtgtcttcagatttccttgtcttgaggccctcacaattgctctacagctcagaacagcaactgctgaggctgccttgggaagaggatgatcctaaacaaagctctgatgctgggggccctcgccctgaccaccgtgatgagcccttgtggaggtgaagacattgtggctgaccatgttgcctcttacggtgtaaacttgtaccagtcttatggtccctctgggcagtacagccatgaatttgatggagacgaggagttctatgtggacctggagaggaaggagactgtctggcagttgcctctgttccgcagatttagaagatttgacccgcaatttgcactgacaaacatcgctgtgctaaaacataacttgaacatcgtgattaaacgctccaactctaccgctgctaccaatgaggttcctgaggtcacagtgttttccaagtctcccgtgacactgggtcagcccaacaccctcatctgtcttgtggacaacatctttcctcctgtggtcaacatcacctggctgagcaatgggcactcagtcacagaaggtgtttctgagaccagcttcctctccaagagtgatcattccttcttcaagatcagttacctcaccttcctcccttctgatgatgagatttatgactgcaaggtggagcactggggcctggatgagcctcttctgaaacactgggagcctgagattccaacacctatgtcagagctcacagagactgtggtctgcgccctggggttgtctgtgggcctcgtgggcattgtggtggggaccgtcttgatcatccgaggcctgcgttcagttggtgcttccagacaccaagggcccttgtgaatcccatcctgaaaaggaaggtgttacctactaagagatgcctggggtaagccgcccagctacctaattcctcagtaacatcgatctaaaatctccatggaagcaataaattccctttaagagatctatgtcaaatttttctatctttcatccggggctgactgaacctatggctaagaattgtgacactctcatgtttcaagccaatttcatctcatttcccagatcatatttcatatccagtaacacagaagcaaccaagtacaatatagcctgataatatgttgatttcttagctgacattaatatttctttcttctttgtgttctcacccttggcactgccgcccatccctcaattcaggcaacaatgaagttaatggatactctctgccctttgctcagaattgttatagcaaaaattttaaaaccaaaaaataagtttgtactaatttcaatatggcttttaaaagtatgatggagaaataaattaggataaaggaactttgaatcaca

SEQ ID NO: 151099 - DNA, 520 bp, Homo sapiens
  Payload ID: 9772
  Gene Symbol: HLA-DQA1
  Gene Name: major histocompatibility complex, class II, DQ alpha 1
  ENST ID: ENST00000414549
  CDS Start-End: 448-520
aagagcaaaataatatgaaaagtatttaacaaggaatataaagaatcatcaaagaaaatgttataaaacttctttgagaccacaagagatgatagagatggggtttcactgtgttagcgaggatggtcttgatctcctgacctcgtgatccgcctgcttctgcctcccaaagtgctgggattacagtcgtgagccaccgcgcctggcctcctcatattattttttattgtgcagtttattcaagagagctttccagcacctgtgataagcctcagcccgcctgctggataatgagcccacatggattgagagaggcctcctatccctgccaaacctattgatgctacagagatgtgagggagcccacctgagaaaagctgaacctgcccagtacataaaaaccactcagctcagaacagcaactgctgaggctgccttgggaagaagatgatcctaaacaaagctctgatgctgggggccctcgccctgaccaccgtgatgagcccttgtggaggtgaag

SEQ ID NO: 151100 - DNA, 1206 bp, Homo sapiens
  Payload ID: 9772
  Gene Symbol: HLA-DQA1
  Gene Name: major histocompatibility complex, class II, DQ alpha 1
  ENST ID: ENST00000450614
  CDS Start-End: 59-826
ccctcacaattgctctacagctcagaacagcaactgctgaggctgccttgggaagaggatgatcctaaacaaagctctgatgctgggggccctcgccctgaccaccgtgatgagcccttgtggaggtgaagacattgtggctgaccatgttgcctcttacggtgtaaacttgtaccagtcttatggtccctctgggcagtacagccatgaatttgatggagacgaggagttctatgtggacctggagaggaaggagactgtctggcagttgcctctgttccgcagatttagaagatttgacccgcaatttgcactgacaaacatcgctgtgctaaaacataacttgaacatcgtgattaaacgctccaactctaccgctgctaccaatgaggttcctgaggtcacagtgttttccaagtctcccgtgacactgggtcagcccaacaccctcatctgtcttgtggacaacatctttcctcctgtggtcaacatcacctggctgagcaatgggcactcagtcacagaaggtgtttctgagaccagcttcctctccaagagtgatcattccttcttcaagatcagttacctcaccttcctcccttctgatgatgagatttatgactgcaaggtggagcactggggcctggatgagcctcttctgaaacactgggagcctgagattccaacacctatgtcagagctcacagagactgtggtctgcgccctggggttgtctgtgggcctcgtgggcattgtggtggggaccgtcttgatcatccgaggcctgcgttcagttggtgcttccagacaccaagggcccttgtgaatcccatcctgaaaaggaagggctgactgaacctatggctaagaattgtgacactctcatgtttcaagccaatttcatctcatttcccagatcatatttcatatccagtaacacagaagcaaccaagtacaatatagcctgataatatgttgatttcttagctgacattaatatttctttcttctttgtgttctcacccttggcactgccgcccatccctcaattcaggcaacaatgaagttaatggatactctctgccctttgctcagaattgttatagcaaaaattttaaaaccaaaaaataagtttgtactaatttcaatatggcttttaaaagtatgatggagaaataaattaggataaaggaactttgaatcaca

SEQ ID NO: 151101 - DNA, 1594 bp, Homo sapiens
  Payload ID: 9772
  Gene Symbol: HLA-DQA1
  Gene Name: major histocompatibility complex, class II, DQ alpha 1
  ENST ID: ENST00000443320
  CDS Start-End: 103-867
ggcagggtttggtttgggtgtcttcagatttccttgtcttgaggtcctcacaattactctacagctcagaacagcaactgctgaggctgccttgggaagaagatgatcctaaacaaagctctgatgctgggggccctcgccctgaccaccgtgatgagcccttgtggaggtgaagacattgtggctgaccacgttgcctcttacggtgtaaacttgtaccagtcttacggtccctctggccagttcacccatgaatttgatggagacgaggagttctatgtggacctggagaggaaggagactgtctggaagttgcctctgttccacagacttagatttgacccgcaatttgcactgacaaacatcgctgtgctaaaacataacttgaacatcctgattaaacgctccaactctaccgctgctaccaatgaggttcctgaggtcacagtgttttccaagtctcccgtgacactgggtcagcccaacaccctcatctgtcttgtggacaacatctttcctcctgtggtcaacatcacctggctgagcaatgggcactcagtcacagaaggtgtttctgagaccagcttcctctccaagagtgatcattccttcttcaagatcagttacctcaccttcctcccttctgctgatgagatttatgactgcaaggtggagcactggggcctggatgagcctcttctgaaacactgggagcctgagattccagcacctatgtcagagctcacagagactgtggtctgtgccctggggttgtctgtgggcctcgtgggcattgtggtggggaccgtcttgatcatccgaggcctgcgttcagttggtgcttccagacaccaagggcccttgtgaatcccatcctgaaaaagaaggtgcatcaccatctacagcagcggaagagtggacttgctacatgacctagcactattctctggcccgatttatcataccctttttctcctgcaaatgtttctcctcttaccttttctctgcttttttttccttaagcttctgtatcccctcagagctcacaaatgcctttgaattctttccctgacctcctgatttttttttcttttctcaggtgttacctactaagagatgcctggggtaagccgcccagctacctaattcctcagtaacatcgatctaaaatctccatggaagcaataaattccctttaagagatctatgtcaaatttttccatctttcatccggggctgactgaacctatggctaagaattgggacactctcatgtttcaagccaatttcatctcatttcccagatcatatttcatatccagtaacacagaagcaaccaagtacaatatagcctgataatatgttgatttcttagctgacattaatatttctttcttctttgtgttctcacccttggcactgccgcccatccctcaattcaggcaacaatgaagttaatggatactctctgccctttgctcagaattgttatagcaaaaattttaaaaccaaaaaataagtttgtactaatttcaatatggcttttaaaagtatgatggagaaataaattaggataaaggaactttgaatcaca

SEQ ID NO: 151102 - DNA, 1049 bp, Homo sapiens
  Payload ID: 9772
  Gene Symbol: HLA-DQA1
  Gene Name: major histocompatibility complex, class II, DQ alpha 1
  ENST ID: ENST00000442680
  CDS Start-End: 40-804
gctcagaacagcaactgctgaggctgccttgggaagaagatgatcctaaacaaagctctgatgctgggggccctcgccctgaccaccgtgatgagcccttgtggaggtgaagacattgtggctgaccacgttgcctcttacggtgtaaacttgtaccagtcttacggtccctctggccagttcacccatgaatttgatggagacgaggagttctatgtggacctggagaggaaggagactgtctggaagttgcctctgttccacagacttagatttgacccgcaatttgcactgacaaacatcgctgtgctaaaacataacttgaacatcctgattaaacgctccaactctaccgctgctaccaatgaggttcctgaggtcacagtgttttccaagtctcccgtgacactgggtcagcccaacaccctcatctgtcttgtggacaacatctttcctcctgtggtcaacatcacctggctgagcaatgggcactcagtcacagaaggtgtttctgagaccagcttcctctccaagagtgatcattccttcttcaagatcagttacctcaccttcctcccttctgctgatgagatttatgactgcaaggtggagcactggggcctggatgagcctcttctgaaacactgggagcctgagattccagcacctatgtcagagctcacagagactgtggtctgtgccctggggttgtctgtgggcctcgtgggcattgtggtggggaccgtcttgatcatccgaggcctgcgttcagttggtgcttccagacaccaagggcccttgtgaatcccatcctgaaaaagaaggtaagtttgagatttgttagagctgaagctgcaggaaggaaagtgggaggaggctgtggacatgaatgtggttgaaagttgtaggggaattgggaagtggcatgatgatgacacaggagcccccttggacccatcgatctcatgtctgtcctgttgcaggtgcatcaccatctacagcagcggaagagtggacttgctacatgacctagcactattctctggccc

SEQ ID NO: 151103 - DNA, 1594 bp, Homo sapiens; identical to SEQ ID NO: 151101
  Payload ID: 9772
  Gene Symbol: HLA-DQA1
  Gene Name: major histocompatibility complex, class II, DQ alpha 1
  ENST ID: ENST00000453504
  CDS Start-End: 103-867

SEQ ID NO: 151104 - DNA, 1548 bp, Homo sapiens
  Payload ID: 9772
  Gene Symbol: HLA-DQA1
  Gene Name: major histocompatibility complex, class II, DQ alpha 1
  ENST ID: ENST00000441297
  CDS Start-End: 54-821
acaattgctctacagctcagaacagcaactgctgaggctgccttgggaagaggatgatcctaaacaaagctctgatgctgggggccctcgccctgaccaccgtgatgagcccttgtggaggtgaagacattgtggctgaccatgttgcctcttacggtgtaaacttgtaccagtcttatggtccctctgggcagtacagccatgaatttgatggagacgaggagttctatgtggacctggagaggaaggagactgtctggcagttgcctctgttccgcagatttagaagatttgacccgcaatttgcactgacaaacatcgctgtgctaaaacataacttgaacatcgtgattaaacgctccaactctaccgctgctaccaatgaggttcctgaggtcacagtgttttccaagtctcccgtgacactgggtcagcccaacaccctcatctgtcttgtggacaacatctttcctcctgtggtcaacatcacctggctgagcaatgggcactcagtcacagaaggtgtttctgagaccagcttcctctccaagagtgatcattccttcttcaagatcagttacctcaccttcctcccttctgatgatgagatttatgactgcaaggtggagcactggggcctggatgagcctcttctgaaacactgggagcctgagattccaacacctatgtcagagctcacagagactgtggtctgcgccctggggttgtctgtgggcctcgtgggcattgtggtggggaccgtcttgatcatccgaggcctgcgttcagttggtgcttccagacaccaagggcccttgtgaatcccatcctgaaaaggaaggtgcatcaccatctacagcagcggaagagtggacttgctacatgacctagcactattctctggcccgatttatcataccctttttctcctgcaaatgtttctcctcttaccttttctctgctttttttttcttaagcttctgtatcccctcagagctcacaaatgcctttgaattctttccctgacctcctgatttttttttcttttctcaggtgttacctactaagagatgcctggggtaagccgcccagctacctaattcctcagtaacatcgatctaaaatctccatggaagcaataaattccctttaagagatctatgtcaaatttttctatctttcatccggggctgactgaacctatggctaagaattgtgacactctcatgtttcaagccaatttcatctcatttcccagatcatatttcatatccagtaacacagaagcaaccaagtacaatatagcctgataatatgttgatttcttagctgacattaatatttctttcttctttgtgttctcacccttggcactgccgcccatccctcaattcaggcaacaatgaagttaatggatactctctgccctttgctcagaattgttatagcaaaaattttaaaaccaaaaaataagtttgtactaatttcaatatggcttttaaaagtatgatggagaaataaattaggataaaggaactttgaatcaca

SEQ ID NO: 151105 - DNA, 1382 bp, Homo sapiens
  Payload ID: 9772
  Gene Symbol: HLA-DQA1
  Gene Name: major histocompatibility complex, class II, DQ alpha 1
  ENST ID: ENST00000457246
  CDS Start-End: 103-867
ggcagggtttggtttgggtgtcttcagatttccttgtcttgaggtcctcacaattactctacagctcagaacagcaactgctgaggctgccttgggaagaagatgatcctaaacaaagctctgatgctgggggccctcgccctgaccaccgtgatgagcccttgtggaggtgaagacattgtggctgaccacgttgcctcttacggtgtaaacttgtaccagtcttacggtccctctggccagttcacccatgaatttgatggagacgaggagttctatgtggacctggagaggaaggagactgtctggaagttgcctctgttccacagacttagatttgacccgcaatttgcactgacaaacatcgctgtgctaaaacataacttgaacatcctgattaaacgctccaactctaccgctgctaccaatgaggttcctgaggtcacagtgttttccaagtctcccgtgacactgggtcagcccaacaccctcatctgtcttgtggacaacatctttcctcctgtggtcaacatcacctggctgagcaatgggcactcagtcacagaaggtgtttctgagaccagcttcctctccaagagtgatcattccttcttcaagatcagttacctcaccttcctcccttctgctgatgagatttatgactgcaaggtggagcactggggcctggatgagcctcttctgaaacactgggagcctgagattccagcacctatgtcagagctcacagagactgtggtctgtgccctggggttgtctgtgggcctcgtgggcattgtggtggggaccgtcttgatcatccgaggcctgcgttcagttggtgcttccagacaccaagggcccttgtgaatcccatcctgaaaaagaaggtgttacctactaagagatgcctggggtaagccgcccagctacctaattcctcagtaacatcgatctaaaatctccatggaagcaataaattccctttaagagatctatgtcaaatttttccatctttcatccggggctgactgaacctatggctaagaattgggacactctcatgtttcaagccaatttcatctcatttcccagatcatatttcatatccagtaacacagaagcaaccaagtacaatatagcctgataatatgttgatttcttagctgacattaatatttctttcttctttgtgttctcacccttggcactgccgcccatccctcaattcaggcaacaatgaagttaatggatactctctgccctttgctcagaattgttatagcaaaaattttaaaaccaaaaaataagtttgtactaatttcaatatggcttttaaaagtatgatggagaaataaattaggataaaggaactttgaatcaca

SEQ ID NO: 151106 - DNA, 520 bp, Homo sapiens
  Payload ID: 9772
  Gene Symbol: HLA-DQA1
  Gene Name: major histocompatibility complex, class II, DQ alpha 1
  ENST ID: ENST00000422863
  CDS Start-End: 448-520
aagagcaaaataatatgaaaagtatttaacaaggaatataaagaatcatcaaagaaaatgttataaaacttctttgagaccacaagagatgatagagatggggtttcactgtgttagcgaggatggtcttgatctcctgacctcgtgatccgcctgcttctgcctcccaaagtgctgggattacagtcgtgagccaccgcgcctggcctcctcatattattttttattgtgcagtttattcaagagagctttccagcacctgtgataagcctcagcccgcctgccggataatgagcccacatggattgagagaggcctcctatccctgccaaacctattgatgctacagagatgtgagggagcccacctgagaaaagctgaacctgcccagtacataaaaaccactcagctcagaacaccaactgctgaggctgccttgggaagaggatgatcctaaacaaagctctgctgctgggggccctcgctctgaccaccgtgatgagcccctgtggaggtgaag

SEQ ID NO: 151107 - DNA, 1203 bp, Homo sapiens
  Payload ID: 9772
  Gene Symbol: HLA-DQA1
  Gene Name: major histocompatibility complex, class II, DQ alpha 1
  ENST ID: ENST00000416403
  CDS Start-End: 59-823
tcctcacaattactctacagctcagaacagcaactgctgaggctgccttgggaagaagatgatcctaaacaaagctctgatgctgggggccctcgccctgaccaccgtgatgagcccttgtggaggtgaagacattgtggctgaccacgttgcctcttacggtgtaaacttgtaccagtcttacggtccctctggccagttcacccatgaatttgatggagacgaggagttctatgtggacctggagaggaaggagactgtctggaagttgcctctgttccacagacttagatttgacccgcaatttgcactgacaaacatcgctgtgctaaaacataacttgaacatcctgattaaacgctccaactctaccgctgctaccaatgaggttcctgaggtcacagtgttttccaagtctcccgtgacactgggtcagcccaacaccctcatctgtcttgtggacaacatctttcctcctgtggtcaacatcacctggctgagcaatgggcactcagtcacagaaggtgtttctgagaccagcttcctctccaagagtgatcattccttcttcaagatcagttacctcaccttcctcccttctgctgatgagatttatgactgcaaggtggagcactggggcctggatgagcctcttctgaaacactgggagcctgagattccagcacctatgtcagagctcacagagactgtggtctgtgccctggggttgtctgtgggcctcgtgggcattgtggtggggaccgtcttgatcatccgaggcctgcgttcagttggtgcttccagacaccaagggcccttgtgaatcccatcctgaaaaagaagggctgactgaacctatggctaagaattgggacactctcatgtttcaagccaatttcatctcatttcccagatcatatttcatatccagtaacacagaagcaaccaagtacaatatagcctgataatatgttgatttcttagctgacattaatatttctttcttctttgtgttctcacccttggcactgccgcccatccctcaattcaggcaacaatgaagttaatggatactctctgccctttgctcagaattgttatagcaaaaattttaaaaccaaaaaataagtttgtactaatttcaatatggcttttaaaagtatgatggagaaataaattaggataaaggaactttgaatcaca

SEQ ID NO: 151108 - DNA, 1382 bp, Homo sapiens; identical to SEQ ID NO: 151105
  Payload ID: 9772
  Gene Symbol: HLA-DQA1
  Gene Name: major histocompatibility complex, class II, DQ alpha 1
  ENST ID: ENST00000451947
  CDS Start-End: 103-867

SEQ ID NO: 151109 - DNA, 922 bp, Homo sapiens
  Payload ID: 9772
  Gene Symbol: HLA-DQA1
  Gene Name: major histocompatibility complex, class II, DQ alpha 1
  Uniprot ID: P01909
  ENST ID: ENST00000444296
  CDS Start-End: 20-787
aggctgccttgggaagaggatgatcctaaacaaagctctgatgctgggggccctcgccctgaccaccgtgatgagcccttgtggaggtgaagacattgtggctgaccatgttgcctcttacggtgtaaacttgtaccagtcttatggtccctctgggcagtacagccatgaatttgatggagacgaggagttctatgtggacctggagaggaaggagactgtctggcagttgcctctgttccgcagatttagaagatttgacccgcaatttgcactgacaaacatcgctgtgctaaaacataacttgaacatcgtgattaaacgctccaactctaccgctgctaccaatgaggttcctgaggtcacagtgttttccaagtctcccgtgacactgggtcagcccaacaccctcatctgtcttgtggacaacatctttcctcctgtggtcaacatcacctggctgagcaatgggcactcagtcacagaaggtgtttctgagaccagcttcctctccaagagtgatcattccttcttcaagatcagttacctcaccttcctcccttctgctgatgagatttatgactgcaaggtggagcactggggcctggatgagcctcttctgaaacactgggagcctgagattccaacacctatgtcagagctcacagagactgtggtctgcgccctggggttgtctgtgggcctcgtgggcattgtggtggggaccgtcttgatcatccgaggcctgcgttcagttggtgcttccagacaccaagggcccttgtgaatcccatcctgaaaaggaaggtgttacctactaagagatgcctggggtaagccgcccagctacctaattcctcagtaacatcgatctaaaatctccatggaagcaataaattccctttaagagatctatgtcaaa

SEQ ID NO: 151110 - DNA, 520 bp, Homo sapiens
  Payload ID: 9772
  Gene Symbol: HLA-DQA1
  Gene Name: major histocompatibility complex, class II, DQ alpha 1
  ENST ID: ENST00000445944
  CDS Start-End: 448-520
aagagcaaaataatatgaaaagtatttaacaaggaatataaagaatcatcaaagaaaatgttataaaacttctttgagaccacaagagatgatagagatggggtttcactgtgttagcgaggatggtcttgatctcctgacctcgtgatccgcctgcttctgcctcccaaagtgctgggattacagtcgtgagccaccgcgcctggcctcctcatattattttttattgtgcagtttattcaagagagctttccagcacctgtgataagcctcagcccgcctgccggataatgagcccacatggattgagagaggcctcctatccctgccaaacctattgatgctacagagatgtgagggagcccacctgagaaaagctgaacctgcccagtacataaaaaccactcagctcagaacagcaactgctgaggctgccttgggaagaggatgatcctaaacaaagctctgatgctgggggccctcgccctgaccaccgtgatgagcccttgtggaggtgaag

SEQ ID NO: 151111 - DNA, 520 bp, Homo sapiens; identical to SEQ ID NO: 151099
  Payload ID: 9772
  Gene Symbol: HLA-DQA1
  Gene Name: major histocompatibility complex, class II, DQ alpha 1
  ENST ID: ENST00000448163
  CDS Start-End: 448-520

SEQ ID NO: 151112 - DNA, 1001 bp, Homo sapiens
  Payload ID: 9772
  Gene Symbol: HLA-DQA1
  Gene Name: major histocompatibility complex, class II, DQ alpha 1
  ENST ID: ENST00000420385
  CDS Start-End: 34-801
aacagcaactgctgaggctgccttgggaagaggatgatcctaaacaaagctctgatgctgggggccctcgccctgaccaccgtgatgagcccttgtggaggtgaagacattgtggctgaccatgttgcctcttacggtgtaaacttgtaccagtcttatggtccctctgggcagtacagccatgaatttgatggagacgaggagttctatgtggacctggagaggaaggagactgtctggcagttgcctctgttccgcagatttagaagatttgacccgcaatttgcactgacaaacatcgctgtgctaaaacataacttgaacatcgtgattaaacgctccaactctaccgctgctaccaatgaggttcctgaggtcacagtgttttccaagtctcccgtgacactgggtcagcccaacaccctcatctgtcttgtggacaacatctttcctcctgtggtcaacatcacctggctgagcaatgggcactcagtcacagaaggtgtttctgagaccagcttcctctccaagagtgatcattccttcttcaagatcagttacctcaccttcctcccttctgatgatgagatttatgactgcaaggtggagcactggggcctggatgagcctcttctgaaacactgggagcctgagattccaacacctatgtcagagctcacagagactgtggtctgcgccctggggttgtctgtgggcctcgtgggcattgtggtggggaccgtcttgatcatccgaggcctgcgttcagttggtgcttccagacaccaagggcccttgtgaatcccatcctgaaaaggaaggtaagattgagatttgttagagctgaagctgcaggaaggaaagtgggaggaggctgtggacatgaatgtggttgaaagttgtaggggaattgggaagtggcatgatgatgacacaggagcccccttggacccatcgatctcatgtctgtcctgttgcaggtgcatcaccatctacagcag

SEQ ID NO: 151113 - DNA, 1049 bp, Homo sapiens; identical to SEQ ID NO: 151102
  Payload ID: 9772
  Gene Symbol: HLA-DQA1
  Gene Name: major histocompatibility complex, class II, DQ alpha 1
  ENST ID: ENST00000450960
  CDS Start-End: 40-804

SEQ ID NO: 151114 - DNA, 1203 bp, Homo sapiens; identical to SEQ ID NO: 151107
  Payload ID: 9772
  Gene Symbol: HLA-DQA1
  Gene Name: major histocompatibility complex, class II, DQ alpha 1
  ENST ID: ENST00000442315
  CDS Start-End: 59-823

SEQ ID NO: 151115 - DNA, 2100 bp, Homo sapiens
  Payload ID: 9772
  Gene Symbol: HLA-DQA1
  Gene Name: major histocompatibility complex, class II, DQ alpha 1
  ENST ID: ENST00000468299
  CDS Start-End: 33-380
acagcaactgctgaggctgccttgggaagaagatgatcctaaacaaagctctgatgctgggggccctcgccctgaccaccgtgatgagcccttgtggaggtgaagacattgtgggatccatctctgactccctgctcctttatagagatggacatgagtttgtaaaacaaaagttgaaaagtcagatagttaaaaggggaagtaaactggaaggtactctaaactttcacaaccttattaaccgtggcagctcccattctgattttgttcagcagtggaagtttcaccctctcctccagagcgcttggcttctttgttccaaatttcctttcttcagcctcacaccagagtgccctggtcaggctcagctcatccattaggcacaatgtgggcagtgcaggggaacctccatactgtaaagccacatgagaatgttttaactccttttaaaattataaaaaaatgaaattgtagagcctaagaaaatgttttaacttttaattcagcctatattatattgtctttataccaattcagtcataaaatataattttccatatttttatggaggaaggcgtccacacaagcaagagtgcttggggctcacatgtcagaacgcatccctgatcatggctgatcctgaccttcgtgtggttctgctaactatgtgcctgtcagtcttccccaaaatctatgtggtcctcaaatataacaactgtcattcaatacacatgtttgagcacccagtgagctaagttttaaggattcaaagatgaaaagtcatgctgtctcccctgcagagggtgctcagactagtgatggaaacagtatgggatgaaagaaagcagaaggccattgctgagcaggcagtggactcagcagaggctgaaactatacaagtgacttggttccagctgggccagcaggataaccagacgaaaagaaggattgcatatattccatatatatttatgtttgaacaaagagtcaaggtttattgcaaggataaggaggctttgttggtggcctgttaagaccatccagcgtggtcatactggatagggaagaagctgaccacgttgcctcttacggtgtaaacttgtaccagtcttacggtccctctggccagttcacccatgaatttgatggagacgaggagttctatgtggacctggagaggaaggagactgtctggaagttgcctctgttccacagacttagatttgacccgcaatttgcactgacaaacatcgctgtgctaaaacataacttgaacatcctgattaaacgctccaactctaccgctgctaccaatgaggttcctgaggtcacagtgttttccaagtctcccgtgacactgggtcagcccaacaccctcatctgtcttgtggacaacatctttcctcctgtggtcaacatcacctggctgagcaatgggcactcagtcacagaaggtgtttctgagaccagcttcctctccaagagtgatcattccttcttcaagatcagttacctcaccttcctcccttctgctgatgagatttatgactgcaaggtggagcactggggcctggatgagcctcttctgaaacactgggagcctgagattccagcacctatgtcagagctcacagagactgtggtctgtgccctggggttgtctgtgggcctcgtgggcattgtggtggggaccgtcttgatcatccgaggcctgcgttcagttggtgcttccagacaccaagggcccttgtgaatcccatcctgaaaaagaaggtgcatcaccatctacagcagcggaagagtggacttgctacatgacctagcactattctctggcccgatttatcataccctttttctcctgcaaatgtttctcctcttaccttttctctgcttttttttccttaagcttctgtatcccctcagagctcacaaatgcctttgaattctttccctgacctcctgatttttttttcttttctcaggtgttacctactaagagatgcctggggtaagccgcccagctacctaattcctcagtaacatcgatctaaaatctccatggaagcaataaattccctttaagagatctatgtcaaa

SEQ ID NO: 151116 - DNA, 2100 bp, Homo sapiens; identical to SEQ ID NO: 151115
  Payload ID: 9772
  Gene Symbol: HLA-DQA1
  Gene Name: major histocompatibility complex, class II, DQ alpha 1
  ENST ID: ENST00000461508
  CDS Start-End: 33-380

SEQ ID NO: 151117 - DNA, 2135 bp, Homo sapiens
  Payload ID: 9772
  Gene Symbol: HLA-DQA1
  Gene Name: major histocompatibility complex, class II, DQ alpha 1
  ENST ID: ENST00000482745
  CDS Start-End: 33-194
acaccaactgctgaggctgccttgggaagaggatgatcctaaacaaagctctgctgctgggggccctcgctctgaccaccgtgatgagcccctgtggaggtgaagacattgtgggatccatctctgactccctgctcctttatagagatggacagtgggtttgtaaaacaaaagttgaaaagtcagatagttaaaaggggaagtgaactggaaggtactttaaactttcacaactttattaaccgtggctgctcccattatgattttgttcggcagtggaagtttcacctgcttctccagagcgcttggcgtctttgttccaaatttcctttcttcaacctcacaccagagtgccctggtcaggcttggctcattcattaggcacaatgtgggcagtgcaggggaccctccatactgtaaagccacatgagaaggttttaactccttttaaaattagaaaaataatggaatattagagcctaagaaaatgttttaacttttaattcagcctagattatattgtctttataccaattcagtcataaaatataattttccatatttttgtggaggaagaggcccatacaagcaagaatgctcggggctcacatgtcagaatgcagccttggtcatgactgatcctggccttcgtatggttctgctacctgtgtgcctgcccgtcttccccaaaatctatgtggtcctcgaatatagcaactgtcattcaatacacatgtttgagcacacagtgagctaagttttaaggattcaaagatgaaaagtcatgctgtcttccctgcagagggtgctcagattagtgatggaaacagtatggggtgcaggaaagcagaaggccattgctgagcagggcagtggacccagcagaggctgaaacaatacaagtgacttggttccaggtgggccagcagggtgacgtcctctagcaaaatttggcacccaagacaagtaccagaagaaaagaaagactgcatgtattccacatatattcatgtttgaacaaggagtcaagatttatggcaaggataaggaggctttgttggtgacctgttaagaccaaccagggcagtcatgctggatagggaagaagctgaccacgttgcctcttgtggtgtaaacttgtaccagttttacggtccctctggccagtacacccatgaatttgatggagatgagcagttctacgtggacctggagaggaaggagactgcctggcggtggcctgagttcagcaaatttggaggttttgacccgcagggtgcactgagaaacatggctgtggcaaaacacaacttgaacatcatgattaaacgctacaactctaccgctgctaccaatgaggttcctgaggtcacagtgttttccaagtctcccgtgacactgggtcagcccaacaccctcatttgtcttgtggacaacatctttcctcctgtggtcaacatcacatggctgagcaatgggcagtcagtcacagaaggtgtttctgagaccagcttcctctccaagagtgatcattccttcttcaagatcagttacctcaccttcctcccttctgctgatgagatttatgactgcaaggtggagcactggggcctggaccagcctcttctgaaacactgggagcctgagattccagcccctatgtcagagctcacagagactgtggtctgtgccctggggttgtctgtgggcctcatgggcattgtggtgggcactgtcttcatcatccaaggcctgcgttcagttggtgcttccagacaccaagggccattgtgaatcccatcctggaagggaaggtgcatcgccatctacaggagcagaagaatggacttgctaaatgacctagcactattctctggcccgatttatcatatcccttttctcctccaaatatttctcctctcaccttttctctgggacttaagctgctatatcccctcagagctcacaaatgcctttacattctttccctgacctcctgattttttttttcttttctcaaatgttacctacaaagacatgcctggggtaagccacccggctacctaattcctcagtaacctccatctaaaatctccaaggaagcaataaattccttttatgagatctatgtcaaa

SEQ ID NO: 151118 - DNA, 2104 bp, Homo sapiens
  Payload ID: 9772
  Gene Symbol: HLA-DQA1
  Gene Name: major histocompatibility complex, class II, DQ alpha 1
  ENST ID: ENST00000484643
  CDS Start-End: 33-158
acagcaactgctgaggctgccttgggaagaggatgatcctaaacaaagctctgatgctgggggccctcgccctgaccaccgtgatgagcccttgtggaggtgaagacattgtgggatccatctctgactccctgctcctttatagagatggacagtgagtttgtaaaacaaaagttgaaaagtcagatagttaaaaggggaagtgaactggaaggtactctaaactttcacaaccttattaaccatggctgctcccattctgattttgttcagcagtggaagtttcacccgctcctccagagcgcttggcttctttgttccaaatttcctttcttcaacctcacaccagagtgccctggtcaggctcagctcatccattaggcacaatgtgggcagtgcaggggaccctccagactgtaaagccacatgagaatgttttaactccttttaaaattataaaaaaatgaaattgtagagcctaagaaaatgttttaacttttaattcagcctagattatattgtctttataccaattcagtcataaaatatagttttccatatttttatggaggaaggcgtccacacaagcaagagtgcttggggctcacatgtcagaacgcaaccctgatcatggctgatcctggccttcgtgtggttctgctaactatgtgcctgtcagtcttccccaaaatctatgtggtcctcaaatataacaactgtcattcaatacacatgtttgagcacccagtgagctaagttttaaggattcaaagatgaaaagtcatgctgtctcctctgcaaagggtgctcagactagtgatggaaacagtatgggatgaaagaaagcagaaggccattgctgagcaggcagtggactcagcagaggctgaaactatacaagtgacttggttccagctgggccagcaggataaccagatgaaaagaaggattgcatatattccatatatatttatgtttgaacaaagagtcaaggtttattgcaaggataaggaggttttgttggtggcctgttaagaccatccagggtggtcatactggatagggaagaagctgaccatgttgcctcttacggtgtaaacttgtaccagtcttatggtccctctgggcagtacagccatgaatttgatggagacgaggagttctatgtggacctggagaggaaggagactgtctggcagttgcctctgttccgcagatttagaagatttgacccgcaatttgcactgacaaacatcgctgtgctaaaacataacttgaacatcgtgattaaacgctccaactctaccgctgctaccaatgaggttcctgaggtcacagtgttttccaagtctcccgtgacactgggtcagcccaacaccctcatctgtcttgtggacaacatctttcctcctgtggtcaacatcacctggctgagcaatgggcactcagtcacagaaggtgtttctgagaccagcttcctctccaagagtgatcattccttcttcaagatcagttacctcaccttcctcccttctgatgatgagatttatgactgcaaggtggagcactggggcctggatgagcctcttctgaaacactgggagcctgagattccaacacctatgtcagagctcacagagactgtggtctgcgccctggggttgtctgtgggcctcgtgggcattgtggtggggaccgtcttgatcatccgaggcctgcgttcagttggtgcttccagacaccaagggcccttgtgaatcccatcctgaaaaggaaggtgcatcaccatctacagcagcggaagagtggacttgctacatgacctagcactattctctggcccgatttatcataccctttttctcctgcaaatgtttctcctcttaccttttctctgctttttttttcttaagcttctgtatcccctcagagctcacaaatgcctttgaattctttccctgacctcctgatttttttttcttttctcaggtgttacctactaagagatgcctggggtaagccgcccagctacctaattcctcagtaacatcgatctaaaatctccatggaagcaataaattccctttaagagatctatgtcaaa

SEQ ID NO: 151119 - DNA, 696 bp, Homo sapiens
  Payload ID: 9772
  Gene Symbol: HLA-DQA1
  Gene Name: major histocompatibility complex, class II, DQ alpha 1
  ENST ID: ENST00000496318
  CDS Start-End: 54-696
acaattactctacagctcagaacaccaactgctgaggctgccttgggaagaggatgatcctaaacaaagctctgctgctgggggccctcgctctgaccaccgtgatgagcccctgtggaggtgaagacattgtggctgaccacgttgcctcttgtggtgtaaacttgtaccagttttacggtccctctggccagtacacccatgaatttgatggagatgagcagttctacgtggacctggagaggaaggagactgcctggcggtggcctgagttcagcaaatttggaggttttgacccgcagggtgcactgagaaacatggctgtggcaaaacacaacttgaacatcatgattaaacgctacaactctaccgctgctaccaatgaggttcctgaggtcacagtgttttccaagtctcccgtgacactgggtcagcccaacaccctcatttgtcttgtggacaacatctttcctcctgtggtcaacatcacatggctgagcaatgggcagtcagtcacagaaggtgtttctgagaccagcttcctctccaagagtgatcattccttcttcaagatcagttacctcaccttcctcccttctgctgatgagatttatgactgcaaggtggagcactggggcctggaccagcctcttctgaaacactggggtgcatcgccatctacaggagcagaagaat

SEQ ID NO: 151120 - DNA, 1079 bp, Homo sapiens
  Payload ID: 9772
  Gene Symbol: HLA-DQA1
  Gene Name: major histocompatibility complex, class II, DQ alpha 1
  Uniprot ID: P01909
  ENST ID: ENST00000548014
  CDS Start-End: 51-815
attgctctacaactcagaacagcaactgctaaggctgccttgggaagaggatgatcctaaacaaagctctgatgctgggggcccttgccctgaccaccgtgatgagcccctgtggaggtgaagacattgtggctgaccacgtcgcctcttatggtgtaaacttgtaccagtcttacggtccctctggccagtacacccatgaatttgatggagatgagcagttctacgtggacctggggaggaaggagactgtctggtgtttgcctgttctcagacaatttagatttgacccgcaatttgcactgacaaacatcgctgtcctaaaacataacttgaacagtctgattaaacgctccaactctaccgctgctaccaatgaggttcctgaggtcacagtgttttccaagtctcccgtgacactgggtcagcccaacatcctcatctgtcttgtggacaacatctttcctcctgtggtcaacatcacatggctgagcaatgggcactcagtcacagaaggtgtttctgagaccagcttcctctccaagagtgatcattccttcttcaagatcagttacctcaccctcctcccttctgctgaggagagttatgactgcaaggtggagcactggggcctggacaagcctcttctgaaacactgggagcctgagattccagcccctatgtcagagctcacagagactgtggtctgcgccctgggattgtctgtgggcctcgtgggcattgtggtgggcactgtcttcatcatccgaggcctgcgttcagttggtgcttccagacaccaagggcccttgtgaatcccatcctggaatggaaggtgttacctactaagagttgcctggagtaagccacccagctacctaattcctcagtaacctccatctataatctccatggaagcaacaaattccctttatgagatatatgtcaaatttttccatctttcatccagggctgactgaaaccgtggctaagaattgggagactctcttgtttcaagccaatttcatatcattccccagatcatatttcatgtccagtaacacaggagcaaccaagta

SEQ ID NO: 151121 - DNA, 768 bp, Homo sapiens
  Payload ID: 9772
  Gene Symbol: HLA-DQA1
  Gene Name: major histocompatibility complex, class II, DQ alpha 1
  ENST ID: ENST00000547425
  CDS Start-End: 1-768
atgatcctaaacaaagctctgatgctgggggccctcgccctgaccaccgtgatgagcccttgtggaggtgaagacattgtggctgaccatgttgcctcttacggtgtaaacttgtaccagtcttatggtccctctgggcagtacagccatgaatttgatggagacgaggagttctatgtggacctggagaggaaggagactgtctggcagttgcctctgttccgcagatttagaagatttgacccgcaatttgcactgacaaacatcgctgtgctaaaacataacttgaacatcgtgattaaacgctccaactctaccgctgctaccaatgaggttcctgaggtcacagtgttttccaagtctcccgtgacactgggtcagcccaacaccctcatctgtcttgtggacaacatctttcctcctgtggtcaacatcacctggctgagcaatgggcactcagtcacagaaggtgtttctgagaccagcttcctctccaagagtgatcattccttcttcaagatcagttacctcaccttcctcccttctgctgatgagatttatgactgcaaggtggagcactggggcctggatgagcctcttctgaaacactgggagcctgagattccagcccctatgtcagagctcacagagactttggtctgcgccctggggttgtctgtgggcctcatgggcattgtggtgggcactgtcttcatcatccaaggcctgcgttcagttggtgcttccagacaccaagggctcttatga

SEQ ID NO: 151122 - DNA, 768 bp, Homo sapiens
  Payload ID: 9772
  Gene Symbol: HLA-DQA1
  Gene Name: major histocompatibility complex, class II, DQ alpha 1
  ENST ID: ENST00000614772
  CDS Start-End: 1-768
atgatcctaaacaaagctctgatgctgggggccctcgccctgaccaccgtgatgagcccttgtggaggtgaagacattgtggctgaccatgttgcctcttacggtgtaaacttgtaccagtcttatggtccctctgggcagtacagccatgaatttgatggagacgaggagttctatgtggacctggagaggaaggagactgtctggcagttgcctctgttccgcagatttagaagatttgacccgcaatttgcactgacaaacatcgctgtgctaaaacataacttgaacatcgtgattaaacgctccaactctaccgctgctaccaatgaggttcctgaggtcacagtgttttccaagtctcccgtgacactgggtcagcccaacaccctcatctgtcttgtggacaacatctttcctcctgtggtcaacatcacctggctgagcaatgggcactcagtcacagaaggtgtttctgagaccagcttcctctccaagagtgatcattccttcttcaagatcagttacctcaccttcctcccttctgctgatgagatttatgactgcaaggtggagcactggggcctggacgagcctcttctgaaacactgggagcctgagattccagcccctatgtcagagctcacagagactttggtctgcgccctggggttgtctgtgggcctcatgggcattgtggtgggcactgtcttcatcatccaaggcctgcgttcagttgatgcttccagacaccaagggctcttatga

SEQ ID NO: 151123 - DNA, 1517 bp, Homo sapiens
  Payload ID: 9773
  Gene Symbol: HLA-DQA2
  Gene Name: major histocompatibility complex, class II, DQ alpha 2
  Uniprot ID: P01906
  ENST ID: ENST00000241802
  CDS Start-End: 103-870
ggcagggtttggtttgggtgtcttcagatttgcttgtctcgaggtcctcacaattgctctacagctcagagcagcaactgctgaggctgccttgggaagaagatgatcctaaacaaagctctgctgctgggggccctcgccctgactgccgtgatgagcccctgtggaggtgaagacattgtggctgaccatgttgcctcctatggtgtgaacttctaccagtctcacggtccctctggccagtacacccatgaatttgatggagacgaggagttctacgtggacctggagacgaaagagactgtctggcagttgcctatgtttagcaaatttataagttttgacccgcagagtgcactgagaaatatggctgtgggaaaacacaccttggaattcatgatgagacagtccaactctaccgctgccaccaatgaggttcctgaggtcacagtgttttccaagtttcctgtgacgctgggtcagcccaacaccctcatctgtcttgtggacaacatctttcctcctgtggtcaacatcacctggctgagcaatgggcactcagtcacagaaggtgtttctgagaccagcttcctctccaagagtgatcattccttcttcaagatcagttacctcaccttcctcccttctgctgatgagatttatgactgcaaggtggagcactggggcctggacgagcctcttctgaaacactgggagcctgagattccagcccctatgtcagagctcacagagactttggtctgcgccctggggttgtctgtgggcctcatgggcattgtggtgggcactgtcttcatcatccaaggcctgcgttcagttgatgcttccagacaccaagggctcttatgaatctcatcctgaaaggaaggtgcatcaccatctacaggagaagaagaatggacttgctaaatgacctagcactattctctggcctgatttatcatatcccttttctcctccaaatgtttcttctctcacctcttctctgggacttaaggtgctatattccctcagagctcacaaatgcctttcaattctttccctgacctcctttcctgaatttttttattttctcaaatgttacctactaagggatgcctgagtaagccactcagctacctaattcctcaatgacctttatctaaaatctccatggaagcaataaattcccttttgatgcctctattgaatttttcccatctttcatctcagggctgactgagagcataacttagaatgggtgactcttatgttttaggccaatttcatgtcattccccagatcatatttcatgtccagtaacacaggagcaaccaagtacagtgtatcctgataatttgttgatttcttaactggtgttaatatttctttcttccttttgttcctacccttggccactgccacccacccctcaattcaggtaccaacgaaccctctgcccttggctcagaatggttatagcagaaatacaaaaaaaaaaaaaaaaagtctgtact

SEQ ID NO: 151124 - DNA, 1524 bp, Homo sapiens
  Payload ID: 9773
  Gene Symbol: HLA-DQA2
  Gene Name: major histocompatibility complex, class II, DQ alpha 2
  Uniprot ID: P01906
  ENST ID: ENST00000374940
  CDS Start-End: 103-870
ggcagggtttggtttgggtgtcttcagatttgcttgtctcgaggtcctcacaattgctctacagctcagagcagcaactgctgaggctgccttgggaagaagatgatcctaaacaaagctctgctgctgggggccctcgccctgactgccgtgatgagcccctgtggaggtgaagacattgtggctgaccatgttgcctcctatggtgtgaacttctaccagtctcacggtccctctggccagtacacccatgaatttgatggagacgaggagttctatgtggacctggagacgaaagagactgtctggcagttgcctatgtttagcaaatttataagttttgacccgcagagtgcactgagaaatatggctgtgggaaaacacaccttggaattcatgatgagacagtccaactctaccgctgccaccaatgaggttcctgaggtcacagtgttttccaagtttcctgtgacgctgggtcagcccaacaccctcatctgtcttgtggacaacatctttcctcctgtggtcaacatcacctggctgagcaatgggcactcagtcacagaaggtgtttctgagaccagcttcctctccaagagtgatcattccttcttcaagatcagttacctcaccttcctcccttctgctgatgagatttatgactgcaaggtggagcactggggcctggacgagcctcttctgaaacactgggagcctgagattccagcccctatgtcagagctcacagagactttggtctgcgccctggggttgtctgtgggcctcatgggcattgtggtgggcactgtcttcatcatccaaggcctgcgttcagttggtgcttccagacaccaagggctcttatgaatcccatcctgaaaaggaaggtgcatcaccatctacaggagaagaagaatggacttgctaaatgacctagcactattctctggcctgatttatcatatcccttttctcctccaaatgtttcttctctcacctcttctctgggacttaaggtgctatattccctcagagctcacaaatgcctttcaattctttccctgacctcctttcctgaatttttttattttctcaaatgttacctactaagggatgcctgggtaagccactcagctacctaattcctcaatgacctttatctaaaatctccatggaagcaataaattcccttttgatgcctctattgaatttttcccatctttcatctcagggctgactgagagcataacttagaatgggcgactcttatgttttaggccaatttcatatcattccccagatcatatttcaagtccagtaacacaggagcaaccaagtacagtgtatcctgataatttgttgatttcttaactggtgttaatatttctttcttccttttgttcctacccttggccactgccagccacccctcaattcaggtaccaacgaaccctctgcccttggctcagaatggttatagcagaaatacaaaaaaaaaaaaaaagtctgtactaatttcaa

SEQ ID NO: 151125 - DNA, 1201 bp, Homo sapiens
  Payload ID: 9773
  Gene Symbol: HLA-DQA2
  Gene Name: major histocompatibility complex, class II, DQ alpha 2
  Uniprot ID: P01906
  ENST ID: ENST00000453672
  CDS Start-End: 103-870
ggcagggtttggtttgggtgtcttcagatttgcttgtctcgaggtcctcacaattgctctgcagctcagagcagcaactgctgaggctgccttgggaagaagatgatcctaaacaaagctctgctgctgggggccctcgccctgactgccgtgatgagcccctgtggaggtgaagacattgtggctgaccatgttgcctcctatggtgtgaacttctaccagtctcacggtccctctggccagtacacccatgaatttgatggagatgaggagttctacgtggacctggagacgaaagagactgtctggcagttgcctatgtttagcaaatttataagttttgacccgcagagtgcactgagaaatatggctgtgggaaaacacaccttggaattcatgatgagacagtccaactctaccgctgccaccaatgaggttcctgaggtcacagtgttttccaagtttcctgtgacgctgggtcagcccaacaccctcatctgtcttgtggacaacatctttcctcctgtggtcaacatcacctggctgagcaatgggcactcagtcacagaaggtgtttctgagaccagcttcctctccaagagtgatcattccttcttcaagatcagttacctcaccttcctcccttctgctgatgagatttatgactgcaaggtggagcactggggcctggacgagcctcttctgaaacactgggagcctgagattccagcccctatgtcagagctcacagagactttggtctgcgccctggggttgtctgcgggcctcatgggcattgtggtgggcactgtcttcatcatccaaggcctgcgttcagttggtgcttccagacaccaagggctcttgtgaatcccatcctgaaaaggaaggtgcatcaccatctacaggagaagaagaatggacttgctaaatgacctagcactattctctggcctgatttatcatatcccttttctcctccaaatgtttcttctctcacctcttctctgggacttaaggtgctatattccctcagagctcacaaatacctttcaattctttccctgacctcctttcctgaatttttttattttctcaaatgttacctactaagggatgcctgggtaagccacttagctacctaattcctcaatgacctttatctaaaatctccatggaagcaataaattcccttttatga

SEQ ID NO: 151126 - DNA, 1499 bp, Homo sapiens
  Payload ID: 9773
  Gene Symbol: HLA-DQA2
  Gene Name: major histocompatibility complex, class II, DQ alpha 2
  Uniprot ID: P01906
  ENST ID: ENST00000446482
  CDS Start-End: 103-870
ggcagggtttggtttgggtgtcttcagatttgcttgtctcgaggtcctcacaattgctctgcagctcagagcagcaactgctgaggctgccttgggaagaagatgatcctaaacaaagctctgctgctgggggccctcgccctgactgccgtgatgagcccctgtggaggtgaagacattgtggctgaccatgttgcctcctatggtgtgaacttctaccagtctcacggtccctctggccagtacacccatgaatttgatggagatgaggagttctacgtggacctggagacgaaagagactgtctggcagttgcctatgtttagcaaatttataagttttgacccgcagagtgcactgagaaatatggctgtgggaaaacacaccttggaattcatgatgagacagtccaactctaccgctgccaccaatgaggttcctgaggtcacagtgttttccaagtttcctgtgacgctgggtcagcccaacaccctcatctgtcttgtggacaacatctttcctcctgtggtcaacatcacctggctgagcaatgggcactcagtcacagaaggtgtttctgagaccagcttcctctccaagagtgatcattccttcttcaagatcagttacctcaccttcctcccttctgctgatgagatttatgactgcaaggtggagcactggggcctggacgagcctcttctgaaacactgggagcctgagattccagcccctatgtcagagctcacagagactttggtctgcgccctggggttgtctgcgggcctcatgggcattgtggtgggcactgtcttcatcatccaaggcctgcgttcagttggtgcttccagacaccaagggctcttgtgaatcccatcctgaaaaggaaggtgcatcaccatctacaggagaagaagaatggacttgctaaatgacctagcactattctctggcctgatttatcatatcccttttctcctccaaatgtttcttctctcacctcttctctgggacttaaggtgctatattccctcagagctcacaaatacctttcaattctttccctgacctcctttcctgaatttttttattttctcaaatgttacctactaagggatgcctgggtaagccacttagctacctaattcctcaatgacctttatctaaaatctccatggaagcaataaattcccttttatgatgcctctattgaatttttcccatctttcatctcagggctgactgagagcataacttagaatgggcgactcttatgttttaggccaatttcatatcattccccagatcatatttcatgtccagtaacacaggagcaaccaagtacagtgtatcctgataatttgttgatttcttaactggtgttaatatttctttcttccttttgttcctacccttggccactgccacccacccttcaattcaggtaccaacgaaccctctgcccttggctcagaatggttatagcagaaatccaaaaa

SEQ ID NO: 151127 - DNA, 1500 bp, Homo sapiens
  Payload ID: 9773
  Gene Symbol: HLA-DQA2
  Gene Name: major histocompatibility complex, class II, DQ alpha 2
  Uniprot ID: P01906
  ENST ID: ENST00000447735
  CDS Start-End: 87-854
ggtgtcttcagatttgcttgtctcgaggtcctcacaattgctctacagctcagagcagcaactgctgaggctgccttgggaagaagatgatcctaaacaaagctctgctgctgggggccctcgccctgactgccgtgatgagcccctgtggaggtgaagacattgtggctgaccatgttgcctcctatggtgtgaacttctaccagtctcacggtccctctggccagtacacccatgaatttgatggagacgaggagttctacgtggacctggagacgaaagagactgtctggcagttgcctatgtttagcaaatttataagttttgacccgcagagtgcactgagaaatatggctgtgggaaaacacaccttggaattcatgatgagacagtccaactctaccgctgccaccaatgaggttcctgaggtcacagtgttttccaagtttcctgtgacgctgggtcagcccaacaccctcatctgtcttgtggacaacatctttcctcctgtggtcaacatcacctggctgagcaatgggcactcagtcacagaaggtgtttctgagaccagcttcctctccaagagtgatcattccttcttcaagatcagttacctcaccttcctcccttctgctgatgagatttatgactgcaaggtggagcactggggcctggacgagcctcttctgaaacactgggagcctgagattccagcccctatgtcagagctcacagagactttggtctgcgccctggggttgtctgtgggcctcatgggcattgtggtgggcactgtcttcatcatccaaggcctgcgttcagttggtgcttccagacaccaagggctcttatgaatctcatcctgaaaggaaggtgcatcaccatctacaggagaagaagaatggacttgctaaatgacctagcactattctctggcctgatttatcatatcccttttctcctccaaatgtttcttctctcacctcttctctgggacttaaggtgctatattccctcagagctcacaaatgcctttcaattctttccctgacctcctttcctgaatttttttattttctcaaatgttacctactaagggatgcctgagtaagccactcagctacctaattcctcaatgacctttatctaaaatctccatggaagcaataaattcccttttgatgcctctattgaatttttcccatctttcatctcagggctgactgagagcataacttagaatgggtgactcttatgttttaggccaatttcatgtcattccccagatcatatttcatgtccagtaacacaggagcaaccaagtacagtgtatcctgataatttgttgatttcttaactggtgttaatatttctttcttccttttgttcctacccttggccactgccacccacccctcaattcaggtaccaacgaaccctctgcccttggctcagaatggttatagcagaaatacaaaaaaaaaaaaaaaagtctgtact

SEQ ID NO: 151128 - DNA, 1521 bp, Homo sapiens
  Payload ID: 9773
  Gene Symbol: HLA-DQA2
  Gene Name: major histocompatibility complex, class II, DQ alpha 2
  Uniprot ID: P01906
  ENST ID: ENST00000415898
  CDS Start-End: 103-870
ggcagggtttggtttgggtgtcttcagatttgcttgtctcgaggtcctcacaattgctctacagctcagagcagcaactgctgaggctgccttgggaagaagatgatcctaaacaaagctctgctgctgggggccctcgccctgactgccgtgatgagcccctgtggaggtgaagacattgtggctgaccatgttgcctcctatggtgtgaacttctaccagtctcacggtccctctggccagtacacccatgaatttgatggagacgaggagttctatgtggacctggagacgaaagagactgtctggcagttgcctatgtttagcaaatttataagttttgacccgcagagtgcactgagaaatatggctgtgggaaaacacaccttggaattcatgatgggacagtccaactctaccgctgccaccaatgaggttcctgaggtcacagtgttttccaagtttcctgtgacgctgggtcagcccaacaccctcatctgtcttgtggacaacatctttcctcctgtggtcaacatcacctggctgagcaatgggcactcagtcacagaaggtgtttctgagaccagcttcctctccaagagtgatcattccttcttcaagatcagttacctcaccttcctcccttctgctgatgagatttatgactgcaaggtggagcactggggcctggacgagcctcttctgaaacactgggagcctgagattccagcccctatgtcagagctcacagagactttggtctgcgccctggggttgtctgtgggcctcatgggcattgtggtgggcactgtcttcatcatccaaggcctgcgttcagttggtgcttccagacaccaagggctcttatgaatcccatcctgaaaaggaaggtgcatcaccatctacaggagaagaagaatggacttgctaaatgacctagcactattctctggcctgatttatcatatcccttttctcctccaaatgtttcttctctcacctcttctctgggacttaaggtgctatattccctcagagctcacaaatgcctttcaattctttccctgacctcctttcctgaatttttttattttctcaaatgttacctactaagggatgcctgggtaagccactcagctacctaattcctcaatgacctttatctaaaatctccatggaagcaataaattcccttttgatgcctctattgaatttttcccatctttcatctcagggctgactgagagcataacttagaatgggcgactcttatgttttaggccaatttcatatcattccccagatcatatttcaagtccagtaacacaggagcaaccaagtacagtgtatcctgataatttgttgatttcttaactggtgttaatatttctttcttccttttgttcctacccttggccactgccagccacccctcaattcaggtaccaacgaaccctctgcccttggctcagaatggttatagcagaaatacaaaaaaaaaaaaaaaagtctgtactaatt

SEQ ID NO: 151129 - DNA, 1648 bp, Homo sapiens
  Payload ID: 9773
  Gene Symbol: HLA-DQA2
  Gene Name: major histocompatibility complex, class II, DQ alpha 2
  Uniprot ID: P01906
  ENST ID: ENST00000449560
  CDS Start-End: 63-830
gaggtcctcacaattgctctacagctcagagcagcaactgctgagcctgccttgggaagaagatgatcctaaacaaagctctgctgctgggggccctcgccctgactgccgtgatgagcccctgtggaggtgaagacattgtggctgaccatgttgcctcctatggtgtgaacttctaccagtctcacggtccctctggccagtacacccatgaatttgatggagacgaggagttctatgtggacctggagacgaaagagactgtctggcagttgcctatgtttagcaaatttataagttttgacccgcagagtgcactgagaaatatggctgtgggaaaacacaccttggaattcatgatgagacagtccaactctaccgctgccaccaatgaggttcctgaggtcacagtgttttccaagtttcctgtgacgctgggtcagcccaacaccctcatctgtcttgtggacaacatctttcctcctgtggtcaacatcacctggctgagcaatgggcactcagtcacagaaggtgtttctgagaccagcttcctctccaagagtgatcattccttcttcaagatcagttacctcaccttcctcccttctgctgatgagatttatgactgcaaggtggagcactggggcctggacgagcctcttctgaaacactgggagcctgagattccagcccctatgtcagagctcacagagactttggtctgcgccctggggttgtctgtgggcctcatgggcattgtggtgggcactgtcttcatcatccaaggcctgcgttcagttggtgcttccagacaccaagggctcttatgaatcccatcctgaaaaggaaggtaagattgagatttgttggagctgaaacctcagtatgagagggaggaaagtgggagggggttgtggacatgaatgtggttgaaagttgtaggcgaattgggaagtggcatgatgatcacacaggaggcccctcagacccatcgatctcatgtctgtcctgttgcaggtgcatcaccatctacaggagaagaagaatggacttgctaaatgacctagcactattctctggcctgatttatcatatcccttttctcctccaaatgtttcttctctcacctcttctctgggacttaaggtgctatattccctcagagctcacaaatgcctttcaattctttccctgacctcctttcctgaatttttttattttctcaaatgttacctactaagggatgcctgggtaagccactcagctacctaattcctcaatgacctttatctaaaatctccatggaagcaataaattcccttttgatgcctctattgaatttttcccatctttcatctcagggctgactgagagcataacttagaatgggcgactcttatgttttaggccaatttcatatcattccccagatcatatttcaagtccagtaacacaggagcaaccaagtacagtgtatcctgataatttgttgatttcttaactggtgttaatatttctttcttccttttgttcctacccttggccactgccagccacccctcaattcaggtaccaacgaaccctctgcccttggctcagaatggttatagcagaaatacaaaaaaaaaaaaaaaagtctgtactaatt

SEQ ID NO: 151130 - DNA, 1725 bp, Homo sapiens
  Payload ID: 9773
  Gene Symbol: HLA-DQA2
  Gene Name: major histocompatibility complex, class II, DQ alpha 2
  Uniprot ID: P01906
  ENST ID: ENST00000443184
  CDS Start-End: 103-870
ggcagggtttggtttgggtgtcttcagatttgcttgtctcgaggtcctcacaattgctctacagctcagagcagcaactgctgagcctgccttgggaagaagatgatcctaaacaaagctctgctgctgggggccctcgccctgactgccgtgatgagcccctgtggaggtgaagacattgtggctgaccatgttgcctcctatggtgtgaacttctaccagtctcacggtccctctggccagtacacccatgaatttgatggagacgaggagttctatgtggacctggagacgaaagagactgtctggcagttgcctatgtttagcaaatttataagttttgacccgcagagtgcactgagaaatatggctgtgggaaaacacaccttggaattcatgatgagacagtccaactctaccgctgccaccaatgaggttcctgaggtcacagtgttttccaagtttcctgtgacgctgggtcagcccaacaccctcatctgtcttgtggacaacatctttcctcctgtggtcaacatcacctggctgagcaatgggcactcagtcacagaaggtgtttctgagaccagcttcctctccaagagtgatcattccttcttcaagatcagttacctcaccttcctcccttctgctgatgagatttatgactgcaaggtggagcactggggcctggacgagcctcttctgaaacactgggagcctgagattccagcccctatgtcagagctcacagagactttggtctgcgccctggggttgtctgtgggcctcatgggcattgtggtgggcactgtcttcatcatccaaggcctgcgttcagttggtgcttccagacaccaagggctcttatgaatcccatcctgaaaaggaaggtgcatcaccatctacaggagaagaagaatggacttgctaaatgacctagcactattctctggcctgatttatcatatcccttttctcctccaaatgtttcttctctcacctcttctctgggacttaaggtgctatattccctcagagctcacaaatgcctttcaattctttccctgacctcctttcctgaatttttttattttctcaaatgttacctactaagggatgcctgggtaagccactcagctacctaattcctcaatgacctttatctaaaatctccatggaagcaataaattcccttttgatgcctctattgaatttttcccatctttcatctcagggctgactgagagcataacttagaatgggcgactcttatgttttaggccaatttcatatcattccccagatcatatttcaagtccagtaacacaggagcaaccaagtacagtgtatcctgataatttgttgatttcttaactggtgttaatatttctttcttccttttgttcctacccttggccactgccagccacccctcaattcaggtaccaacgaaccctctgcccttggctcagaatggttatagcagaaatacaaaaaaaaaaaaaaaagtctgtactaatttcaatatggctcttaaaaggaatgacagagaaataggatacaagaattttgaatctcaaaagttatcaaaagtaaaaaattttgttaccaaaagtcaaactgcattctcaaaactttaaatttgtgaagaatgacaacagtagaagctttcctctccccttctcaccttgaggagataaaaattctctaggcaggaaaagaaat

SEQ ID NO: 151131 - DNA, 768 bp, Homo sapiens
  Payload ID: 9773
  Gene Symbol: HLA-DQA2
  Gene Name: major histocompatibility complex, class II, DQ alpha 2
  ENST ID: ENST00000547960
  CDS Start-End: 1-768
atgatcctaaacaaagctctgctgctgggggccctcgccctgactgccgtgatgagcccctgtggaggtgaagacattgtggctgaccatgttgcctcctatggtgtgaacttctaccagtctcacggtccctctggccagtacacccatgaatttgatggagacgaggagttctacgtggacctggagacgaaagagactgtctggcagttgcctatgtttagcaaatttataagttttgacccgcagagtgcactgagaaatatggctgtgggaaaacacaccttggaattcatgatgagacagtccaactctaccgctgccaccaatgaggttcctgaggtcacagtgttttccaagtttcctgtgacgctgggtcagcccaacaccctcatctgtcttgtggacaacatctttcctcctgtggtcaacatcacctggctgagcaatgggcactcagtcacagaaggtgtttctgagaccagcttcctctccaagagtgatcattccttcttcaagatcagttacctcaccttcctcccttctgctgatgagatttatgactgcaaggtggagcactggggcctggacgagcctcttctgaaacactgggagcctgagattccagcccctatgtcagagctcacagagactttggtctgcgccctggggttgtctgtgggcctcatgggcattgtggtgggcactgtcttcatcatccaaggcctgcgttcagttgatgcttccagacaccaagggctcttatga

SEQ ID NO: 151132 - DNA, 1422 bp, Homo sapiens
  Payload ID: 9773
  Gene Symbol: HLA-DQA2
  Gene Name: major histocompatibility complex, class II, DQ alpha 2
  ENST ID: ENST00000552745
  CDS Start-End: 35-799
gaacagcaactgctaaggctgccttgggaagaggatgatcctaaacaaagctctgatgctgggggcccttgccctgaccaccgtgatgagcccctgtggaggtgaagacattgtggctgaccacgtcgcctcttatggtgtaaacttgtaccagtcttacggtccctctggccagtacacccatgaatttgatggagatgagcagttctacgtggacctggggaggaaggagactgtctggtgtttgcctgttctcagacaatttagatttgacccgcaatttgcactgacaaacatcgctgtcctaaaacataacttgaacagtctgattaaacgctccaactctaccgctgctaccaatgaggttcctgaggtcacagtgttttccaagtctcccgtgacactgggtcagcccaacatcctcatctgtcttgtggacaacatctttcctcctgtggtcaacatcacatggctgagcaatgggcactcagtcacagaaggtgtttctgagaccagcttcctctccaagagtgatcattccttcttcaagatcagttacctcaccctcctcccttctgctgaggagagttatgactgcaaggtggagcactggggcctggacaagcctcttctgaaacactgggagcctgagattccagcccctatgtcagagctcacagagactgtggtctgcgccctgggattgtctgtgggcctcgtgggcattgtggtgggcactgtcttcatcatccgaggcctgcgttcagttggtgcttccagacaccaagggcccttgtgaatcccatcctggaatggaaggtgcatcgccatctacaggagcagaagagtggacttgctacatgacctagcattattttctggccccatttatcatatcccttttctcctccaaatgtttctcctctcacctcttctgtgggacttaaattgctatatctgctcagagctcacaaatgcctttgaattatttccctgacttcctgatttttttcttcttaagtgttacctactaagagttgcctggagtaagccacccagctacctaattcctcagtaacctccatctataatctccatggaagcaacaaattccctttatgagatatatgtcaaatttttccatctttcatccagggctgactgaaaccgtggctaagaattgggagactctcttgtttcaagccaatttaacatcatttaccagatcatttgtcatgtccagtaacacagaagcaaccaactacagtatagcctgataacatgatttcttagctgacattaatatttctttcttccttgtgttcccacccttggcattgccacccacccctcaattaaggcaacaatgaagttaatggataccctctgcctttggctcagaaatgttatagcaaaaatttt

SEQ ID NO: 151133 - DNA, 1152 bp, Homo sapiens
  Payload ID: 9773
  Gene Symbol: HLA-DQA2
  Gene Name: major histocompatibility complex, class II, DQ alpha 2
  Uniprot ID: P01906
  ENST ID: ENST00000546801
  CDS Start-End: 59-826
tcctcacaattgctctacagctcagagcagcaactgctgagcctgccttgggaagaagatgatcctaaacaaagctctgctgctgggggccctcgccctgactgccgtgatgagcccctgtggaggtgaagacattgtggctgaccatgttgcctcctatggtgtgaacttctaccagtctcacggtccctctggccagtacacccatgaatttgatggagacgaggagttctatgtggacctggagacgaaagagactgtctggcagttgcctatgtttagcaaatttataagttttgacccgcagagtgcactgagaaatatggctgtgggaaaacacaccttggaattcatgatgagacagtccaactctaccgctgccaccaatgaggttcctgaggtcacagtgttttccaagtttcctgtgacgctgggtcagcccaacaccctcatctgtcttgtggacaacatctttcctcctgtggtcaacatcacctggctgagcaatgggcactcagtcacagaaggtgtttctgagaccagcttcctctccaagagtgatcattccttcttcaagatcagttacctcaccttcctcccttctgctgatgagatttatgactgcaaggtggagcactggggcctggacgagcctcttctgaaacactgggagcctgagattccagcccctatgtcagagctcacagagactttggtctgcgccctggggttgtctgtgggcctcatgggcattgtggtgggcactgtcttcatcatccaaggcctgcgttcagttggtgcttccagacaccaagggctcttatgaatcccatcctgaaaaggaaggtgcatcaccatctacaggagaagaagaatggacttgctaaatgacctagcactattctctggcctgatttatcatatcccttttctcctccaaatgtttcttctctcacctcttctctgggacttaaggtgctatattccctcagagctcacaaatgcctttcaattctttccctgacctcctttcctgaatttttttattttctcaaatgttacctactaagggatgcctgggtaagccactcagctacctaattcctcaatgacctttatctaaaatctccatggaagcaataaattcccttt

SEQ ID NO: 151134 - DNA, 768 bp, Homo sapiens
  Payload ID: 9773
  Gene Symbol: HLA-DQA2
  Gene Name: major histocompatibility complex, class II, DQ alpha 2
  Uniprot ID: P01906
  ENST ID: ENST00000551533
  CDS Start-End: 1-768
atgatcctaaacaaagctctgctgctgggggccctcgccctgactgccgtgatgagcccctgtggaggtgaagacattgtggctgaccatgttgcctcctatggtgtgaacttctaccagtctcacggtccctctggccagtacacccatgaatttgatggagacgaggagttctacgtggacctggagacgaaagagactgtctggcagttgcctatgtttagcaaatttataagttttgacccgcagagtgcactgagaaatatggctgtgggaaaacacaccttggaattcatgatgagacagtccaactctaccgctgccaccaatgaggttcctgaggtcacagtgttttccaagtttcctgtgacgctgggtcagcccaacaccctcatctgtcttgtggacaacatctttcctcctgtggtcaacatcacctggctgagcaatgggcactcagtcacagaaggtgtttctgagaccagcttcctctccaagagtgatcattccttcttcaagatcagttacctcaccttcctcccttctgctgatgagatttatgactgcaaggtggagcactggggcctggacgagcctcttctgaaacactgggagcctgagattccagcccctatgtcagagctcacagagactttggtctgcgccctggggttgtctgtgggcctcatgggcattgtggtgggcactgtcttcatcatccaaggcctgcgttcagttggtgcttccagacaccaagggctcttatga

SEQ ID NO: 151135 - DNA, 1079 bp, Homo sapiens
  Payload ID: 9773
  Gene Symbol: HLA-DQA2
  Gene Name: major histocompatibility complex, class II, DQ alpha 2
  ENST ID: ENST00000548145
  CDS Start-End: 51-815
attgctctacaactcagaacagcaactgctaaggctgccttgggaagaggatgatcctaaacaaagctctgatgctgggggcccttgccctgaccaccgtgatgagcccctgtggaggtgaagacattgtggctgaccacgtcgcctcttatggtgtaaacttgtaccagtcttacggtccctctggccagtacacccatgaatttgatggagatgagcagttctacgtggacctggggaggaaggagactgtctggtgtttgcctgttctcagacaatttagatttgacccgcaatttgcactgacaaacatcgctgtcctaaaacataacttgaacagtctgattaaacgctccaactctaccgctgctaccaatgaggttcctgaggtcacagtgttttccaagtctcccgtgacactgggtcagcccaacatcctcatctgtcttgtggacaacatctttcctcctgtggtcaacatcacatggctgagcaatgggcactcagtcacagaaggtgtttctgagaccagcttcctctccaagagtgatcattccttcttcaagatcagttacctcaccctcctcccttctgctgaggagagttatgactgcaaggtggagcactggggcctggacaagcctcttctgaaacactgggagcctgagattccagcccctatgtcagagctcacagagactgtggtctgcgccctgggattgtctgtgggcctcgtgggcattgtggtgggcactgtcttcatcatccgaggcctgcgttcagttggtgcttccagacaccaagggcccttgtgaatcccatcctggaatggaaggtgttacctactaagagttgcctggagtaagccacccagctacctaattcctcagtaacctccatctataatctccatggaagcaacaaattccctttatgagatatatgtcaaatttttccatctttcatccagggctgactgaaaccgtggctaagaattgggagactctcttgtttcaagccaatttcatatcattccccagatcatatttcaagtccagtaacacaggagcaaccaagta

SEQ ID NO: 151136 - DNA, 1656 bp, Homo sapiens
  Payload ID: 9774
  Gene Symbol: HLA-DQB1
  Gene Name: major histocompatibility complex, class II, DQ beta 1
  ENST ID: ENST00000374943
  CDS Start-End: 78-887
attctttctgccaggtacatcagatccatcaggtccgagctgtgttgactaccactgcttttcccttcgtctcagttatgtcttggaagaaggctttgcggatccccggagaccttcgggtagcaactgtcaccttgatgctggcgatgctgagctccctactggctgagggcagagactctcccgaggatttcgtgttccagtttaagggcatgtgctacttcaccaacgggacggagcgcgtgcgtcttgtgaccagatacatctataaccgagaggagtacgcgcgcttcgacagcgacgtgggggtgtaccgcgcggtgacgccgcaggggcggcctgatgccgagtactggaacagccagaaggaagtcctggaggggacccgggcggagttggacacggtgtgcagacacaactacgaggtggcgttccgcgggatcttgcagaggagagtggagcccacagtgaccatctccccatccaggacagaggccctcaaccaccacaacctgctggtctgctcggtgacagatttctatccaggccagatcaaagtccggtggtttcggaatgatcaggaggagacagccggcgttgtgtccaccccccttattaggaatggtgactggactttccagatcctggtgatgctggaaatgactccccagcgtggagatgtctacacctgccacgtggagcaccccagcctccagagccccatcaccgtggagtggcgggctcagtctgaatctgcccagagcaagatgctgagtggcgttggaggcttcgtgctggggctgatcttccttgggctgggccttatcatccgtcaaaggagtcagaaaggacctcaagggcctccaccagcagggcttctgcactgactcctgagactattttaactaggattggttatcactcttctgtgatgcctgcttatgcctgcccagaattcccagctgcctgtgtcagcttgtccccctgagatcaaagtcctacagtggctgtcacgcagccaccaggtcatctcctttcatccccaccccaaggcgctggctgtgactctgcttcctgcactgacccagagcctctgcctgtgcatggccagctgcgtctactcaggtcccaaggggtttctgtttctattctttcctcagactgctcaagagaagcacatgaaaaacattacctgactttagagcttttttacataattaaacatgatcctgagttatctgtattctgaactttcttaattgagaagaggcaggaaatcactgcagaatgaaggaacatcccttgaggtgacccagcaaacctgtggccagaaggaggattgtaccttgaaaagacactgaaagcattttggggtgtgaagtaagggtgggcagaggaggtagaaaataattcaattgtcgcatcattcatggttctttaatactgatgctcagtgcattggccttagaatatcccagcctctcttctggtttggtgagtgctgtgtaaataagcatggtagaattgtttggagacatatatagtgatccttggtcactggtgtttcaaacattctggaaagtcacatcgatcaagaatattttttatttttaagaaagcataaccagcaataaaaatactatttttgagtctaaa

SEQ ID NO: 151137 - DNA, 1649 bp, Homo sapiens
  Payload ID: 9774
  Gene Symbol: HLA-DQB1
  Gene Name: major histocompatibility complex, class II, DQ beta 1
  ENST ID: ENST00000383121
  CDS Start-End: 57-842
atcagatccatcaggtccgagctgtgttgactaccacttttcccttcgtctcaattatgtcttggaaaaaggctttgcggatccccggaggccttcgggcagcaactgtgaccttgatgctgtcgatgctgagcaccccagtggctgagggcagagactctcccgaggatttcgtgtaccagtttaagggcatgtgctacttcaccaacgggacagagcgcgtgcgtcttgtgagcagaagcatctataaccgagaagagatcgtgcgcttcgacagcgacgtgggggagttccgggcggtgacgctgctggggctgcctgccgccgagtactggaacagccagaaggacatcctggagaggaaacgggcggcggtggacagggtgtgcagacacaactaccagttggagctccgcacgaccttgcagcggcgagtggagcccacagtgaccatctccccatccaggacagaggccctcaaccaccacaacctgctggtctgctcggtgacagatttctatccagcccagatcaaagtccggtggtttcggaatgaccaggaggagacagctggcgttgtgtccaccccccttattaggaatggtgactggaccttccagatcctggtgatgctggaaatgactccccagcgtggagacgtctacacctgccacgtggagcaccccagcctccagagccccatcaccgtggagtggcgggctcaatctgaatctgcccagagcaagatgctgagtggcattggaggcttcgtgctggggctgatcttcctcgggctgggccttatcatccatcacaggagtcagaaagggctcctgcactgactcctgagactattttaactgggattggttatcacttttctgtaacgcctgcttgtccctgcccagaattcccagctgtctgtgtcagcctgtccccctgagatcagagtcctacagtggctgtcacgcagccaccaggtcatctcctttcatccccaccttgaggcggatggctgtgaccctacttcctgcactgacccacagcctctgcctgtgcacggccagctgcatctactcaggccccaaggggtttctgtttctattctctcctcagactgctcaagagaagcacatgaaaaccattacctgactttagagcttttttacataattaaacatgatcctgagttatctgtattctgaacttccttaattgagcagaggcaggaaatcactgcagaatgaaggaacataccttgaggtgacccagccaacctgtgcccagaaggagggttgtaccttgaaaagacactgaaagaatttggggtgcaaagtcatggtgggcagaggaggtagaaaatcaactcagttgttgcatcattcatggttctttcatattgatgttcagtgcagtggcctgagaatatcccagcctctcttctggtttggtgagtgctatataagtaaacatggtggaattgtttgggggcagatatagtgacccttggtcactggtgtttcaaacattctggcaagtcacatcaatcaagaataatttttacttttaagaaagcataaccagcaataaaagtattatttttgattctaaatgatagaaacccaaatatattttgttcatggtgcaaa

SEQ ID NO: 151138 - DNA, 1649 bp, Homo sapiens; identical to SEQ ID NO: 151137
  Payload ID: 9774
  Gene Symbol: HLA-DQB1
  Gene Name: major histocompatibility complex, class II, DQ beta 1
  ENST ID: ENST00000383247
  CDS Start-End: 57-842

SEQ ID NO: 151139 - DNA, 1788 bp, Homo sapiens
  Payload ID: 9774
  Gene Symbol: HLA-DQB1
  Gene Name: major histocompatibility complex, class II, DQ beta 1
  ENST ID: ENST00000399065
  CDS Start-End: 210-1019
gcactggattgagaaccttcacaaaaaaaaatctgcccagagacagatgaggtccttcagctccagtgctgattggttcctttccaagggaccatccaatcctaccacgcatggaaacatccacaggtttttattctttctgccaggtacatcagatccatcaggtccgagctgtgttgactaccactacttttcccttcgtctcaattatgtcttggaaaaaggctttgcggatccccggaggccttcgggcagcaactgttaccttgatgctggcgatgctgagcaccccagtggctgagggcagagactctcccgaggatttcgtgtaccagtttaaggccatgtgctacttcaccaacgggacggagcgcgtgcgttatgtgaccagatacatctataaccgagaggagtacgcacgcttcgacagcgacgtggaggtgtaccgggcggtgacgccgctggggccgcctgacgccgagtactggaacagccagaaggaagtcctggagaggacccgggcggagttggacacggtgtgcagacacaactaccagttggagctccgcacgaccttgcagcggcgagtggagcccacagtgaccatctccccatccaggacagaggccctcaaccaccacaacctgctggtctgctcagtgacagatttctatccagcccagatcaaagtccggtggtttcggaatgaccaggaggagacaaccggcgttgtgtccaccccccttattaggaacggtgactggaccttccagatcctggtgatgctggaaatgactccccagcatggagacgtctacacctgccacgtggagcaccccagcctccagaaccccatcaccgtggagtggcgggctcagtctgaatctgcccagagcaagatgctgagtggcattggaggcttcgtgctggggctcatcttcctcgggctgggccttattatccatcacaggagtcagaaaggacctcaagggcctccaccagcagggctcctgcactgactcctgagactattttaactgggattggttatcacttttctgtaacgcctgcttgtccctgcccagaattcccaactgcctgtgtcagcctgtccccctgagatcagagtcctacagtggctgtcacgcagccaccaggtcatctcctttcatccccaccccaaggcgctggctgtgactctgcttcctgcactgacccagagcctctgcctgtgcatggccagctgcgtctactcaggccccaaggggtttctgtttctattctctcctcagactgctcaagagaagcacatgaaaaccattacctgactttagagcttttttacataattaaacatgatcctgagttatctgtattctcaacttccttaattgagcagaggcaggaaatcactgcagaatgaaggaacataccttgaggtgacccagccaacctgtgcccagaaggagggttgtaccttgaaaagacactgaaagaatttggggtgcaaagtcatggtgggcagaggaggtagaaaatcaactcagttgtcgcatcattcatggttctttcatattgatgttcagtgcagtggcctgagaatatcccagcctctcttctggtttggtgagtgctatataagtaaacatggtggaattgtttgggggcagatatagtgacccttggtcactggtgtttcaaacattctggcaagtcacatcaatcaagaataatttttacttttaagaaagcataaccagcaataaaagtattatttttgattctaaa

SEQ ID NO: 151140 - DNA, 1789 bp, Homo sapiens
  Payload ID: 9774
  Gene Symbol: HLA-DQB1
  Gene Name: major histocompatibility complex, class II, DQ beta 1
  ENST ID: ENST00000399074
  CDS Start-End: 211-1020
actggattgagaaccttcacaaaaaaaaaatgtctgcctagagacagattaggtccttcagctccagtgctgattggttcctttccaaaggaccatccaatcctgccacgcagggaaacatccacaggtttttattctttctgccaggtacatcagatccatcaggtccaagctgtgttgactaccactacttttcccttcgtctcaattatgtcttggaagaaggctttgcggatccctggaggccttcgggtagcaactgtgaccttgatgctggcgatgctgagcaccccggtggctgagggcagagactctcccgaggatttcgtgtaccagtttaagggcatgtgctacttcaccaacgggacggagcgcgtgcgtcttgtgaccagatacatctataaccgagaggagtacgcacgcttcgacagcgacgtgggggtgtatcgggcggtgacgccgctggggccgcctgacgccgagtactggaacagccagaaggaagtcctggagaggacccgggcggagttggacacggtgtgcagacacaactaccagttggagctccgcacgaccttgcagcggcgagtggagcccacagtgaccatctccccatccaggacagaggccctcaaccaccacaacctgctggtctgctcagtgacagatttctatccagcccagatcaaagtccggtggtttcggaatgaccaggaggagacaactggcgttgtgtccaccccccttattaggaacggtgactggaccttccagatcctggtgatgctggaaatgactccccagcgtggagacgtctacacctgccacgtggagcaccccagcctccagaaccccatcatcgtggagtggcgggctcagtctgaatctgcccagagcaagatgctgagtggcattggaggcttcgtgctggggctgatcttcctcgggctgggccttattatccatcacaggagtcagaaaggacctcaagggcctccaccagcagggctcctgcactgactcctgagactattttaactgggattggttatcacttttctgtaacgcctgcttgtccctgcccagaattcccagctgcctgtgtcagcctgtcccccgagatcagagtcctacagtggctgtcacgcagccaccaggtcatctcctttcatccccacctcaaggctgatggctgtgaccctgcttcctgcactgacccagagcctctgcctgtgcacggccagctgcgtctactgaggccccaaggggtttctgtttctattctctcctcagactgctcaagagaagcacatgaaaaccattacctgactttagagcttttttacataattaaacatgatcctgagttatctgtattctcaacttccttaattgagcagaggcaggaaatcactgcagaatgaaggaacataccttgaggtgacccagccaacctgtgcccagaaggagggttgtaccttgaaaagacactgaaagaattttgggtgcaaagtcagggtgggcagaggaggtagaagatcaactcagttgtcgcatcattcatggttctttcatattgatgttcaatgcagtggcctgagaatatcccagcctctcttctggtttggtgagtgctatataagtaagcatggtggaattgtttgggggcagatatagtgacccttggtcactggtgtttcaaacattctggcaagtcacatcaatcaagaataatttttacttttaagaaagcataaccagcaataaaagtattatttttgagtctaaa

SEQ ID NO: 151141 - DNA, 1501 bp, Homo sapiens
  Payload ID: 9774
  Gene Symbol: HLA-DQB1
  Gene Name: major histocompatibility complex, class II, DQ beta 1
  ENST ID: ENST00000399079
  CDS Start-End: 58-732
cagatccatcaggtccgagctgtgttgactaccactgcttttcccttcgtctcagttatgtcttggaagaaggctttgcggatccccggagaccttcgggtagcaactgtcaccttgatgctggcgatgctgagctccctactggctgagggcagagactctcccgaggatttcgtgttccagtttaagggcatgtgctacttcaccaacgggacggagcgcgtgcgtcttgtgaccagatacatctataaccgagaggagtacgcgcgcttcgacagcgacgtgggggtgtaccgcgcggtgacgccgcaggggcggcctgatgccgagtactggaacagccagaaggaagtcctggaggggacccgggcggagttggacacggtgtgcagacacaactacgaggtggcgttccgcgggatcttgcagaggagagtggagcccacagtgaccatctccccatccaggacagaggccctcaaccaccacaacctgctggtctgctcggtgacagatttctatccaggccagatcaaagtccggtggtttcggaatgatcaggaggagacagccggcgttgtgtccaccccccttattaggaatggtgactggactttccagatcctggtgatgctggaaatgactccccagcgtggagatgtctacacctgccacgtggagcaccccagcctccagagccccatcaccgtggagtggcggcttctgcactgactcctgagactattttaactaggattggttatcactcttctgtgatgcctgcttatgcctgcccagaattcccagctgcctgtgtcagcttgtccccctgagatcaaagtcctacagtggctgtcacgcagccaccaggtcatctcctttcatccccaccccaaggcgctggctgtgactctgcttcctgcactgacccagagcctctgcctgtgcatggccagctgcgtctactcaggtcccaaggggtttctgtttctattctttcctcagactgctcaagagaagcacatgaaaaacattacctgactttagagcttttttacataattaaacatgatcctgagttatctgtattctgaactttcttaattgagaagaggcaggaaatcactgcagaatgaaggaacatcccttgaggtgacccagcaaacctgtggccagaaggaggattgtaccttgaaaagacactgaaagcattttggggtgtgaagtaagggtgggcagaggaggtagaaaataattcaattgtcgcatcattcatggttctttaatactgatgctcagtgcattggccttagaatatcccagcctctcttctggtttggtgagtgctgtgtaaataagcatggtagaattgtttggagacatatatagtgatccttggtcactggtgtttcaaacattctggaaagtcacatcgatcaagaatattttttatttttaagaaagcataaccagcaataaaaatactatttttgagtctaaa

SEQ ID NO: 151142 - DNA, 1219 bp, Homo sapiens
  Payload ID: 9774
  Gene Symbol: HLA-DQB1
  Gene Name: major histocompatibility complex, class II, DQ beta 1
  ENST ID: ENST00000399082
  CDS Start-End: 46-450
gtccgagctgtgttgactaccactgcttttcccttcgtctcagttatgtcttggaagaaggctttgcggatccccggagaccttcgggtagcaactgtcaccttgatgctggcgatgctgagctccctactggctgagggcagagactctcccgtggagcccacagtgaccatctccccatccaggacagaggccctcaaccaccacaacctgctggtctgctcggtgacagatttctatccaggccagatcaaagtccggtggtttcggaatgatcaggaggagacagccggcgttgtgtccaccccccttattaggaatggtgactggactttccagatcctggtgatgctggaaatgactccccagcgtggagatgtctacacctgccacgtggagcaccccagcctccagagccccatcaccgtggagtggcggcttctgcactgactcctgagactattttaactaggattggttatcactcttctgtgatgcctgcttatgcctgcccagaattcccagctgcctgtgtcagcttgtccccctgagatcaaagtcctacagtggctgtcacgcagccaccaggtcatctcctttcatccccaccccaaggcgctggctgtgactctgcttcctgcactgacccagagcctctgcctgtgcatggccagctgcgtctactcaggtcccaaggggtttctgtttctattctttcctcagactgctcaagagaagcacatgaaaaacattacctgactttagagcttttttacataattaaacatgatcctgagttatctgtattctgaactttcttaattgagaagaggcaggaaatcactgcagaatgaaggaacatcccttgaggtgacccagcaaacctgtggccagaaggaggattgtaccttgaaaagacactgaaagcattttggggtgtgaagtaagggtgggcagaggaggtagaaaataattcaattgtcgcatcattcatggttctttaatactgatgctcagtgcattggccttagaatatcccagcctctcttctggtttggtgagtgctgtgtaaataagcatggtagaattgtttggagacatatatagtgatccttggtcactggtgtttcaaacattctggaaagtcacatcgatcaagaatattttttatttttaagaaagcataaccagcaataaaaatactatttttgagtctaaa

SEQ ID NO: 151143 - DNA, 1734 bp, Homo sapiens
  Payload ID: 9774
  Gene Symbol: HLA-DQB1
  Gene Name: major histocompatibility complex, class II, DQ beta 1
  ENST ID: ENST00000399084
  CDS Start-End: 180-965
aggatggattagagacctctattttgaggcgcactgatgtaggggctgaggaaggacattgagggcaccttcaggtctctctgcctattcttccttgccccaactccattccaggtgtacatcagatccatcaggtccgagctgtgttgactaccactgcttttcccttcgtctcagttatgtcttggaagaaggctttgcggatccccggagaccttcgggtagcaactgtcaccttgatgctggcgatgctgagctccctactggctgagggcagagactctcccgaggatttcgtgttccagtttaagggcatgtgctacttcaccaacgggacggagcgcgtgcgtcttgtgaccagatacatctataaccgagaggagtacgcgcgcttcgacagcgacgtgggggtgtaccgcgcggtgacgccgcaggggcggcctgatgccgagtactggaacagccagaaggaagtcctggaggggacccgggcggagttggacacggtgtgcagacacaactacgaggtggcgttccgcgggatcttgcagaggagagtggagcccacagtgaccatctccccatccaggacagaggccctcaaccaccacaacctgctggtctgctcggtgacagatttctatccaggccagatcaaagtccggtggtttcggaatgatcaggaggagacagccggcgttgtgtccaccccccttattaggaatggtgactggactttccagatcctggtgatgctggaaatgactccccagcgtggagatgtctacacctgccacgtggagcaccccagcctccagagccccatcaccgtggagtggcgggctcagtctgaatctgcccagagcaagatgctgagtggcgttggaggcttcgtgctggggctgatcttccttgggctgggccttatcatccgtcaaaggagtcagaaagggcttctgcactgactcctgagactattttaactaggattggttatcactcttctgtgatgcctgcttatgcctgcccagaattcccagctgcctgtgtcagcttgtccccctgagatcaaagtcctacagtggctgtcacgcagccaccaggtcatctcctttcatccccaccccaaggcgctggctgtgactctgcttcctgcactgacccagagcctctgcctgtgcatggccagctgcgtctactcaggtcccaaggggtttctgtttctattctttcctcagactgctcaagagaagcacatgaaaaacattacctgactttagagcttttttacataattaaacatgatcctgagttatctgtattctgaactttcttaattgagaagaggcaggaaatcactgcagaatgaaggaacatcccttgaggtgacccagcaaacctgtggccagaaggaggattgtaccttgaaaagacactgaaagcattttggggtgtgaagtaagggtgggcagaggaggtagaaaataattcaattgtcgcatcattcatggttctttaatactgatgctcagtgcattggccttagaatatcccagcctctcttctggtttggtgagtgctgtgtaaataagcatggtagaattgtttggagacatatatagtgatccttggtcactggtgtttcaaacattctggaaagtcacatcgatcaagaatattttttatttttaagaaagcataaccagcaataaaaatactatttttgagtctaaa

SEQ ID NO: 151144 - DNA, 1642 bp, Homo sapiens
  Payload ID: 9774
  Gene Symbol: HLA-DQB1
  Gene Name: major histocompatibility complex, class II, DQ beta 1
  Uniprot ID: P01920
  ENST ID: ENST00000399088
  CDS Start-End: 88-873
acaggtttttattctttctgccaggtacatcagatccatcaggtccgagctgtgttgactaccactacttttcccttcgtctcaattatgtcttggaaaaaggctttgcggatccccggaggccttcgggcagcaactgttaccttgatgctggcgatgctgagcaccccagtggctgagggcagagactctcccgaggatttcgtgtaccagtttaaggccatgtgctacttcaccaacgggacggagcgcgtgcgttatgtgaccagatacatctataaccgagaggagtacgcacgcttcgacagcgacgtggaggtgtaccgggcggtgacgccgctggggccgcctgacgccgagtactggaacagccagaaggaagtcctggagaggacccgggcggagttggacacggtgtgcagacacaactaccagttggagctccgcacgaccttgcagcggcgagtggagcccacagtgaccatctccccatccaggacagaggccctcaaccaccacaacctgctggtctgctcagtgacagatttctatccagcccagatcaaagtccggtggtttcggaatgaccaggaggagacaaccggcgttgtgtccaccccccttattaggaacggtgactggaccttccagatcctggtgatgctggaaatgactccccagcatggagacgtctacacctgccacgtggagcaccccagcctccagaaccccatcaccgtggagtggcgggctcagtctgaatctgcccagagcaagatgctgagtggcattggaggcttcgtgctggggctcatcttcctcgggctgggccttattatccatcacaggagtcagaaagggctcctgcactgactcctgagactattttaactgggattggttatcacttttctgtaacgcctgcttgtccctgcccagaattcccaactgcctgtgtcagcctgtccccctgagatcagagtcctacagtggctgtcacgcagccaccaggtcatctcctttcatccccaccccaaggcgctggctgtgactctgcttcctgcactgacccagagcctctgcctgtgcatggccagctgcgtctactcaggccccaaggggtttctgtttctattctctcctcagactgctcaagagaagcacatgaaaaccattacctgactttagagcttttttacataattaaacatgatcctgagttatctgtattctcaacttccttaattgagcagaggcaggaaatcactgcagaatgaaggaacataccttgaggtgacccagccaacctgtgcccagaaggagggttgtaccttgaaaagacactgaaagaatttggggtgcaaagtcatggtgggcagaggaggtagaaaatcaactcagttgtcgcatcattcatggttctttcatattgatgttcagtgcagtggcctgagaatatcccagcctctcttctggtttggtgagtgctatataagtaaacatggtggaattgtttgggggcagatatagtgacccttggtcactggtgtttcaaacattctggcaagtcacatcaatcaagaataatttttacttttaagaaagcataaccagcaataaaagtattatttttgattctaaa

SEQ ID NO: 151145 - DNA, 1473 bp, Homo sapiens
  Payload ID: 9774
  Gene Symbol: HLA-DQB1
  Gene Name: major histocompatibility complex, class II, DQ beta 1
  ENST ID: ENST00000399670
  CDS Start-End: 36-710
ctgtgttgactaccacttttcccttcgtctcaattatgtcttggaaaaaggctttgcggatccccggaggccttcgggcagcaactgtgaccttgatgctgtcgatgctgagcaccccagtggctgagggcagagactctcccgaggatttcgtgtaccagtttaagggcatgtgctacttcaccaacgggacagagcgcgtgcgtcttgtgagcagaagcatctataaccgagaagagatcgtgcgcttcgacagcgacgtgggggagttccgggcggtgacgctgctggggctgcctgccgccgagtactggaacagccagaaggacatcctggagaggaaacgggcggcggtggacagggtgtgcagacacaactaccagttggagctccgcacgaccttgcagcggcgagtggagcccacagtgaccatctccccatccaggacagaggccctcaaccaccacaacctgctggtctgctcggtgacagatttctatccagcccagatcaaagtccggtggtttcggaatgaccaggaggagacagctggcgttgtgtccaccccccttattaggaatggtgactggaccttccagatcctggtgatgctggaaatgactccccagcgtggagacgtctacacctgccacgtggagcaccccagcctccagagccccatcaccgtggagtggcggctcctgcactgactcctgagactattttaactgggattggttatcacttttctgtaacgcctgcttgtccctgcccagaattcccagctgtctgtgtcagcctgtccccctgagatcagagtcctacagtggctgtcacgcagccaccaggtcatctcctttcatccccaccttgaggcggatggctgtgaccctacttcctgcactgacccacagcctctgcctgtgcacggccagctgcatctactcaggccccaaggggtttctgtttctattctctcctcagactgctcaagagaagcacatgaaaaccattacctgactttagagcttttttacataattaaacatgatcctgagttatctgtattctgaacttccttaattgagcagaggcaggaaatcactgcagaatgaaggaacataccttgaggtgacccagccaacctgtgcccagaaggagggttgtaccttgaaaagacactgaaagaatttggggtgcaaagtcatggtgggcagaggaggtagaaaatcaactcagttgttgcatcattcatggttctttcatattgatgttcagtgcagtggcctgagaatatcccagcctctcttctggtttggtgagtgctatataagtaaacatggtggaattgtttgggggcagatatagtgacccttggtcactggtgtttcaaacattctggcaagtcacatcaatcaagaataatttttacttttaagaaagcataaccagcaataaaagtattatttttga

SEQ ID NO: 151146 - DNA, 1219 bp, Homo sapiens
  Payload ID: 9774
  Gene Symbol: HLA-DQB1
  Gene Name: major histocompatibility complex, class II, DQ beta 1
  ENST ID: ENST00000430790
  CDS Start-End: 46-450
gtccaagctgtgttgactaccactacttttcccttcgtctcaattatgtcttggaagaaggctttgcggatccctggaggccttcgggtagcaactgtgaccttgatgctggcgatgctgagcaccccggtggctgagggcagagactctcccgtggagcccacagtgaccatctccccatccaggacagaggccctcaaccaccacaacctgctggtctgctcagtgacagatttctatccagcccagatcaaagtccggtggtttcggaatgaccaggaggagacaactggcgttgtgtccaccccccttattaggaacggtgactggaccttccagatcctggtgatgctggaaatgactccccagcgtggagacgtctacacctgccacgtggagcaccccagcctccagaaccccatcatcgtggagtggcggctcctgcactgactcctgagactattttaactgggattggttatcacttttctgtaacgcctgcttgtccctgcccagaattcccagctgcctgtgtcagcctgtcccccgagatcagagtcctacagtggctgtcacgcagccaccaggtcatctcctttcatccccacctcaaggctgatggctgtgaccctgcttcctgcactgacccagagcctctgcctgtgcacggccagctgcgtctactgaggccccaaggggtttctgtttctattctctcctcagactgctcaagagaagcacatgaaaaccattacctgactttagagcttttttacataattaaacatgatcctgagttatctgtattctcaacttccttaattgagcagaggcaggaaatcactgcagaatgaaggaacataccttgaggtgacccagccaacctgtgcccagaaggagggttgtaccttgaaaagacactgaaagaattttgggtgcaaagtcagggtgggcagaggaggtagaagatcaactcagttgtcgcatcattcatggttctttcatattgatgttcaatgcagtggcctgagaatatcccagcctctcttctggtttggtgagtgctatataagtaagcatggtggaattgtttgggggcagatatagtgacccttggtcactggtgtttcaaacattctggcaagtcacatcaatcaagaataatttttacttttaagaaagcataaccagcaataaaagtattatttttgagtctaaa

SEQ ID NO: 151147 - DNA, 1643 bp, Homo sapiens
  Payload ID: 9774
  Gene Symbol: HLA-DQB1
  Gene Name: major histocompatibility complex, class II, DQ beta 1
  ENST ID: ENST00000414518
  CDS Start-End: 88-873
acaggtttttattctttctgccaggtacatcagatccatcaggtccaagctgtgttgactaccactacttttcccttcgtctcaattatgtcttggaagaaggctttgcggatccctggaggccttcgggtagcaactgtgaccttgatgctggcgatgctgagcaccccggtggctgagggcagagactctcccgaggatttcgtgtaccagtttaagggcatgtgctacttcaccaacgggaccgagcgcgtgcggggtgtgaccagatacatctataaccgagaggagtacgcgcgcttcgacagcgacgtgggggtgtatcgggcggtgacgccgctggggccgcctgccgccgagtactggaacagccagaaggaagtcctggagaggacccgggcggagttggacacggtgtgcagacacaactaccagttggagctccgcacgaccttgcagcggcgagtggagcccacagtgaccatctccccatccaggacagaggccctcaaccaccacaacctgctggtctgctcagtgacagatttctatccagcccagatcaaagtccggtggtttcggaatgaccaggaggagacaactggcgttgtgtccaccccccttattaggaacggtgactggaccttccagatcctggtgatgctggaaatgactccccagcgtggagacgtctacacctgccacgtggagcaccccagcctccagaaccccatcatcgtggagtggcgggctcagtctgaatctgcccagagcaagatgctgagtggcattggaggcttcgtgctggggctgatcttcctcgggctgggccttattatccatcacaggagtcagaaagggctcctgcactgactcctgagactattttaactgggattggttatcacttttctgtaacgcctgcttgtccctgcccagaattcccagctgcctgtgtcagcctgtccccctgagatcagagtcctacagtggctgtcacgcagccaccaggtcatctcctttcatccccacctcgaggctgatggctgtgaccctgcttcctgcacttacccagagcctctgcctgtgcacggccagctgcgtctactgaggccccaaggggtttctgtttctattctctcctcagactgctcaagagaagcacatgaaaaccattacctgactttagagcttttttacataattaaacatgatcctgagttatctgtattctcaacttccttaattgagcagaggcaggaaatcactgcagaatgaaggaacataccttgaggtgacccagccaacctgtgcccagaaggagggttgtaccttgaaaagacactgaaagaatttggggtgcaaagtcagggtgggcagaggaggtagaagatcaactcagttgttgcatcattcatggttctttcatattgatgctcagtgcagtggcctgagaatatcccagcctctcttctggtttggtgagtgctatataagtaagcatggtggaattgtttgggggcagatatagtgacccttggtcactggtgtttcaaacattctggcaagtcacatcaatcaagaataatttttacttttaagaaagcataaccagcaataaaagtactatttttgattctaaa

SEQ ID NO: 151148 - DNA, 1484 bp, Homo sapiens
  Payload ID: 9774
  Gene Symbol: HLA-DQB1
  Gene Name: major histocompatibility complex, class II, DQ beta 1
  ENST ID: ENST00000434886
  CDS Start-End: 41-715
agctgtgttgactaccactacttttcccttcgtctcaattatgtcttggaagaaggctttgcggatccctggaggccttcgggtagcaactgtgaccttgatgctggcgatgctgagcaccccggtggctgagggcagagactctcccgaggatttcgtgtaccagtttaagggcatgtgctacttcaccaacgggacggagcgcgtgcgtcttgtgaccagatacatctataaccgagaggagtacgcacgcttcgacagcgacgtgggggtgtatcgggcggtgacgccgctggggccgcctgacgccgagtactggaacagccagaaggaagtcctggagaggacccgggcggagttggacacggtgtgcagacacaactaccagttggagctccgcacgaccttgcagcggcgagtggagcccacagtgaccatctccccatccaggacagaggccctcaaccaccacaacctgctggtctgctcagtgacagatttctatccagcccagatcaaagtccggtggtttcggaatgaccaggaggagacaactggcgttgtgtccaccccccttattaggaacggtgactggaccttccagatcctggtgatgctggaaatgactccccagcgtggagacgtctacacctgccacgtggagcaccccagcctccagaaccccatcatcgtggagtggcggctcctgcactgactcctgagactattttaactgggattggttatcacttttctgtaacgcctgcttgtccctgcccagaattcccagctgcctgtgtcagcctgtcccccgagatcagagtcctacagtggctgtcacgcagccaccaggtcatctcctttcatccccacctcaaggctgatggctgtgaccctgcttcctgcactgacccagagcctctgcctgtgcacggccagctgcgtctactgaggccccaaggggtttctgtttctattctctcctcagactgctcaagagaagcacatgaaaaccattacctgactttagagcttttttacataattaaacatgatcctgagttatctgtattctcaacttccttaattgagcagaggcaggaaatcactgcagaatgaaggaacataccttgaggtgacccagccaacctgtgcccagaaggagggttgtaccttgaaaagacactgaaagaattttgggtgcaaagtcagggtgggcagaggaggtagaagatcaactcagttgtcgcatcattcatggttctttcatattgatgttcaatgcagtggcctgagaatatcccagcctctcttctggtttggtgagtgctatataagtaagcatggtggaattgtttgggggcagatatagtgacccttggtcactggtgtttcaaacattctggcaagtcacatcaatcaagaataatttttacttttaagaaagcataaccagcaataaaagtattatttttgagtctaaa

SEQ ID NO: 151149 - DNA, 484 bp, Homo sapiens
  Payload ID: 9774
  Gene Symbol: HLA-DQB1
  Gene Name: major histocompatibility complex, class II, DQ beta 1
  ENST ID: ENST00000432856
  CDS Start-End: 51-484
atcaggtccaagctgtgttgactaccactacttttcccttcgtctcaattatgtcttggaagaaggctttgcggatccctggaggccttcgggtagcaactgtgacgccgctggggccgcctgacgccgagtactggaacagccagaaggaagtcctggagaggacccgggcggagttggacacggtgtgcagacacaactaccagttggagctccgcacgaccttgcagcggcgagtggagcccacagtgaccatctccccatccaggacagaggccctcaaccaccacaacctgctggtctgctcagtgacagatttctatccagcccagatcaaagtccggtggtttcggaatgaccaggaggagacaactggcgttgtgtccaccccccttattaggaacggtgactggaccttccagatcctggtgatgctggaaatgactccccagcgtggagacgtctacacctgccacgtggagca

SEQ ID NO: 151150 - DNA, 1734 bp, Homo sapiens
  Payload ID: 9774
  Gene Symbol: HLA-DQB1
  Gene Name: major histocompatibility complex, class II, DQ beta 1
  Uniprot ID: P01920
  ENST ID: ENST00000413089
  CDS Start-End: 180-965
aggatggattagaggcctctattctgagggacactgaggtgggggctgaggaaggacattgagggcagcttcaggtctctctgcctactcttccttgccccaactccattccaggtgtacatcagatccatcaggtccgagctgtgttgactaccactacttttcccttcgtctcaattatgtcttggaaaaaggctttgcggatccccggaggccttcgggcagcaactgttaccttgatgctggcgatgctgagcaccccagtggctgagggcagagactctcccgaggatttcgtgtaccagtttaaggccatgtgctacttcaccaacgggacggagcgcgtgcgttatgtgaccagatacatctataaccgagaggagtacgcacgcttcgacagcgacgtggaggtgtaccgggcggtgacgccgctggggccgcctgacgccgagtactggaacagccagaaggaagtcctggagaggacccgggcggagttggacacggtgtgcagacacaactaccagttggagctccgcacgaccttgcagcggcgagtggagcccacagtgaccatctccccatccaggacagaggccctcaaccaccacaacctgctggtctgctcagtgacagatttctatccagcccagatcaaagtccggtggtttcggaatgaccaggaggagacaaccggcgttgtgtccaccccccttattaggaacggtgactggaccttccagatcctggtgatgctggaaatgactccccagcatggagacgtctacacctgccacgtggagcaccccagcctccagaaccccatcaccgtggagtggcgggctcagtctgaatctgcccagagcaagatgctgagtggcattggaggcttcgtgctggggctcatcttcctcgggctgggccttattatccatcacaggagtcagaaagggctcctgcactgactcctgagactattttaactgggattggttatcacttttctgtaacgcctgcttgtccctgcccagaattcccaactgcctgtgtcagcctgtccccctgagatcagagtcctacagtggctgtcacgcagccaccaggtcatctcctttcatccccaccccaaggcgctggctgtgactctgcttcctgcactgacccagagcctctgcctgtgcatggccagctgcgtctactcaggccccaaggggtttctgtttctattctctcctcagactgctcaagagaagcacatgaaaaccattacctgactttagagcttttttacataattaaacatgatcctgagttatctgtattctcaacttccttaattgagcagaggcaggaaatcactgcagaatgaaggaacataccttgaggtgacccagccaacctgtgcccagaaggagggttgtaccttgaaaagacactgaaagaatttggggtgcaaagtcatggtgggcagaggaggtagaaaatcaactcagttgtcgcatcattcatggttctttcatattgatgttcagtgcagtggcctgagaatatcccagcctctcttctggtttggtgagtgctatataagtaaacatggtggaattgtttgggggcagatatagtgacccttggtcactggtgtttcaaacattctggcaagtcacatcaatcaagaataatttttacttttaagaaagcataaccagcaataaaagtattatttttgattctaaa

SEQ ID NO: 151151 - DNA, 1640 bp, Homo sapiens
  Payload ID: 9774
  Gene Symbol: HLA-DQB1
  Gene Name: major histocompatibility complex, class II, DQ beta 1
  Uniprot ID: P01920
  ENST ID: ENST00000419914
  CDS Start-End: 85-870
acagatttttattctttctgccaggtacatcagatccatcaggtccgagctgtgttgactaccacttttcccttcgtctcaattatgtcttggaaaaaggctttgcggatccccggaggccttcgggcagcaactgtgaccttgatgctgtcgatgctgagcaccccagtggctgagggcagagactctcccgaggatttcgtgtaccagtttaagggcatgtgctacttcaccaacgggacagagcgcgtgcgtcttgtgagcagaagcatctataaccgagaagagatcgtgcgcttcgacagcgacgtgggggagttccgggcggtgacgctgctggggctgcctgccgccgagtactggaacagccagaaggacatcctggagaggaaacgggcggcggtggacagggtgtgcagacacaactaccagttggagctccgcacgaccttgcagcggcgagtggagcccacagtgaccatctccccatccaggacagaggccctcaaccaccacaacctgctggtctgctcggtgacagatttctatccagcccagatcaaagtccggtggtttcggaatggccaggaggagacagctggcgttgtgtccaccccccttattaggaatggtgactggaccttccagatcctggtgatgctggaaatgactccccagcgtggagacgtctacacctgccacgtggagcaccccagcctccagagccccatcaccgtggagtggcgggctcaatctgaatctgcccagagcaagatgctgagtggcattggaggcttcgtgctggggctgatcttcctcgggctgggccttatcatccatcacaggagtcagaaagggctcctgcactgactcctgagactattttaactgggattggttatcacttttctgtaacgcctgcttgtccctgcccagaattcccagctgtctgtgtcagcctgtccccctgagatcagagtcctacagtggctgtcacgcagccaccaggtcatctcctttcatccccaccttgaggcggatggctgtgaccctacttcctgcactgacccacagcccctgcctgtgcacagccagctgcatctactcaggccccaaggggtttctgtttctattctctcctcagactgctcaagagaagcacatgaaaactattacctgactttagagcttttttacataattaaacatgatcctgagttatctgtattctgaacttccttaattgagcagaggcaggaaatcactgcagaatgaaggaacataccttgaggtgacccagccaacctgtgcccagaaggagggttgtaccttgaaaagacactgaaagaatttggggtgcaaagtcagggtgggcagaggaggtagaaaatcaactcagttgtcgcatcattcatggttctttcatattgatgttcagtgcagtggcctgagaatatcccagcctctcttctggtttggtgagtgctatataagtaaacatggtggaattgtttgggggcagatatagtgacccttggtcactggtgtttcaaacattctggcaagtcacatcaatcaagaataatttttacttttaagaaagcataaccagcaataaaagtattatttttgattctaaa

SEQ ID NO: 151152 - DNA, 481 bp, Homo sapiens
  Payload ID: 9774
  Gene Symbol: HLA-DQB1
  Gene Name: major histocompatibility complex, class II, DQ beta 1
  ENST ID: ENST00000456954
  CDS Start-End: 48-481
atcaggtccgagctgtgttgactaccacttttcccttcgtctcaattatgtcttggaaaaaggctttgcggatccccggaggccttcgggcagcaactgtgacgctgctggggctgcctgccgccgagtactggaacagccagaaggacatcctggagaggaaacgggcggcggtggacagggtgtgcagacacaactaccagttggagctccgcacgaccttgcagcggcgagtggagcccacagtgaccatctccccatccaggacagaggccctcaaccaccacaacctgctggtctgctcggtgacagatttctatccagcccagatcaaagtccggtggtttcggaatggccaggaggagacagctggcgttgtgtccaccccccttattaggaatggtgactggaccttccagatcctggtgatgctggaaatgactccccagcgtggagacgtctacacctgccacgtggagca

SEQ ID NO: 151153 - DNA, 1217 bp, Homo sapiens
  Payload ID: 9774
  Gene Symbol: HLA-DQB1
  Gene Name: major histocompatibility complex, class II, DQ beta 1
  ENST ID: ENST00000428219
  CDS Start-End: 43-447
gtccgagctgtgttgactaccacttttcccttcgtctcaattatgtcttggaaaaaggctttgcggatccccggaggccttcgggcagcaactgtgaccttgatgctgtcgatgctgagcaccccagtggctgagggcagagactctcccgtggagcccacagtgaccatctccccatccaggacagaggccctcaaccaccacaacctgctggtctgctcggtgacagatttctatccagcccagatcaaagtccggtggtttcggaatggccaggaggagacagctggcgttgtgtccaccccccttattaggaatggtgactggaccttccagatcctggtgatgctggaaatgactccccagcgtggagacgtctacacctgccacgtggagcaccccagcctccagagccccatcaccgtggagtggcggctcctgcactgactcctgagactattttaactgggattggttatcacttttctgtaacgcctgcttgtccctgcccagaattcccagctgtctgtgtcagcctgtccccctgagatcagagtcctacagtggctgtcacgcagccaccaggtcatctcctttcatccccaccttgaggcggatggctgtgaccctacttcctgcactgacccacagcccctgcctgtgcacagccagctgcatctactcaggccccaaggggtttctgtttctattctctcctcagactgctcaagagaagcacatgaaaactattacctgactttagagcttttttacataattaaacatgatcctgagttatctgtattctgaacttccttaattgagcagaggcaggaaatcactgcagaatgaaggaacataccttgaggtgacccagccaacctgtgcccagaaggagggttgtaccttgaaaagacactgaaagaatttggggtgcaaagtcagggtgggcagaggaggtagaaaatcaactcagttgtcgcatcattcatggttctttcatattgatgttcagtgcagtggcctgagaatatcccagcctctcttctggtttggtgagtgctatataagtaaacatggtggaattgtttgggggcagatatagtgacccttggtcactggtgtttcaaacattctggcaagtcacatcaatcaagaataatttttacttttaagaaagcataaccagcaataaaagtattatttttgattctaaa

SEQ ID NO: 151154 - DNA, 1642 bp, Homo sapiens
  Payload ID: 9774
  Gene Symbol: HLA-DQB1
  Gene Name: major histocompatibility complex, class II, DQ beta 1
  ENST ID: ENST00000434651
  CDS Start-End: 88-873
acaggtttttattctttctgccaggtacatcagatccatcaggtccgagctgtgttgactaccactgcttttcccttcgtctcagttatgtcttggaagaaggctttgcggatccccggagaccttcgggtagcaactgtcaccttgatgctggcgatgctgagctccctactggctgagggcagagactctcccgaggatttcgtgttccagtttaagggcatgtgctacttcaccaacgggacggagcgcgtgcgtcttgtgaccagatacatctataaccgagaggagtacgcgcgcttcgacagcgacgtgggggtgtaccgcgcggtgacgccgcaggggcggcctgatgccgagtactggaacagccagaaggaagtcctggaggggacccgggcggagttggacacggtgtgcagacacaactacgaggtggcgttccgcgggatcttgcagaggagagtggagcccacagtgaccatctccccatccaggacagaggccctcaaccaccacaacctgctggtctgctcggtgacagatttctatccaggccagatcaaagtccggtggtttcggaatgatcaggaggagacagccggcgttgtgtccaccccccttattaggaatggtgactggactttccagatcctggtgatgctggaaatgactccccagcgtggagatgtctacacctgccacgtggagcaccccagcctccagagccccatcaccgtggagtggcgggctcagtctgaatctgcccagagcaagatgctgagtggcgttggaggcttcgtgctggggctgatcttccttgggctgggccttatcatccgtcaaaggagtcagaaagggcttctgcactgactcctgagactattttaactaggattggttatcactcttctgtgatgcctgcttatgcctgcccagaattcccagctgcctgtgtcagcttgtccccctgagatcaaagtcctacagtggctgtcacgcagccaccaggtcatctcctttcatccccaccccaaggcgctggctgtgactctgcttcctgcactgacccagagcctctgcctgtgcatggccagctgcgtctactcaggtcccaaggggtttctgtttctattctttcctcagactgctcaagagaagcacatgaaaaacattacctgactttagagcttttttacataattaaacatgatcctgagttatctgtattctgaactttcttaattgagaagaggcaggaaatcactgcagaatgaaggaacatcccttgaggtgacccagcaaacctgtggccagaaggaggattgtaccttgaaaagacactgaaagcattttggggtgtgaagtaagggtgggcagaggaggtagaaaataattcaattgtcgcatcattcatggttctttaatactgatgctcagtgcattggccttagaatatcccagcctctcttctggtttggtgagtgctgtgtaaataagcatggtagaattgtttggagacatatatagtgatccttggtcactggtgtttcaaacattctggaaagtcacatcgatcaagaatattttttatttttaagaaagcataaccagcaataaaaatactatttttgagtctaaa

SEQ ID NO: 151155 - DNA, 1642 bp, Homo sapiens
  Payload ID: 9774
  Gene Symbol: HLA-DQB1
  Gene Name: major histocompatibility complex, class II, DQ beta 1
  Uniprot ID: P01920
  ENST ID: ENST00000416192
  CDS Start-End: 88-873
acaggtttttattctttctgccaggtacatcagatccatcaggtccaagctgtgttgactaccactacttttcccttcgtctcaattatgtcttggaagaaggctttgcggatccctggaggccttcgggtagcaactgtgaccttgatgctggcgatgctgagcaccccggtggctgagggcagagactctcccgaggatttcgtgtaccagtttaagggcatgtgctacttcaccaacgggacggagcgcgtgcgtcttgtgaccagatacatctataaccgagaggagtacgcacgcttcgacagcgacgtgggggtgtatcgggcggtgacgccgctggggccgcctgacgccgagtactggaacagccagaaggaagtcctggagaggacccgggcggagttggacacggtgtgcagacacaactaccagttggagctccgcacgaccttgcagcggcgagtggagcccacagtgaccatctccccatccaggacagaggccctcaaccaccacaacctgctggtctgctcagtgacagatttctatccagcccagatcaaagtccggtggtttcggaatgaccaggaggagacaactggcgttgtgtccaccccccttattaggaacggtgactggaccttccagatcctggtgatgctggaaatgactccccagcgtggagacgtctacacctgccacgtggagcaccccagcctccagaaccccatcatcgtggagtggcgggctcagtctgaatctgcccagagcaagatgctgagtggcattggaggcttcgtgctggggctgatcttcctcgggctgggccttattatccatcacaggagtcagaaagggctcctgcactgactcctgagactattttaactgggattggttatcacttttctgtaacgcctgcttgtccctgcccagaattcccagctgcctgtgtcagcctgtcccccgagatcagagtcctacagtggctgtcacgcagccaccaggtcatctcctttcatccccacctcaaggctgatggctgtgaccctgcttcctgcactgacccagagcctctgcctgtgcacggccagctgcgtctactgaggccccaaggggtttctgtttctattctctcctcagactgctcaagagaagcacatgaaaaccattacctgactttagagcttttttacataattaaacatgatcctgagttatctgtattctcaacttccttaattgagcagaggcaggaaatcactgcagaatgaaggaacataccttgaggtgacccagccaacctgtgcccagaaggagggttgtaccttgaaaagacactgaaagaattttgggtgcaaagtcagggtgggcagaggaggtagaagatcaactcagttgtcgcatcattcatggttctttcatattgatgttcaatgcagtggcctgagaatatcccagcctctcttctggtttggtgagtgctatataagtaagcatggtggaattgtttgggggcagatatagtgacccttggtcactggtgtttcaaacattctggcaagtcacatcaatcaagaataatttttacttttaagaaagcataaccagcaataaaagtattatttttgagtctaaa

SEQ ID NO: 151156 - DNA, 1732 bp, Homo sapiens
  Payload ID: 9774
  Gene Symbol: HLA-DQB1
  Gene Name: major histocompatibility complex, class II, DQ beta 1
  Uniprot ID: P01920
  ENST ID: ENST00000424806
  CDS Start-End: 177-962
aggatggattagaggcctctattctgagggacactgaggtgggggctgaggaaggacattgagggcagcttcaggtctctctgcctactcttccttgccccaactccattccaggtgtacatcagatccatcaggtccgagctgtgttgactaccacttttcccttcgtctcaattatgtcttggaaaaaggctttgcggatccccggaggccttcgggcagcaactgtgaccttgatgctgtcgatgctgagcaccccagtggctgagggcagagactctcccgaggatttcgtgtaccagtttaagggcatgtgctacttcaccaacgggacagagcgcgtgcgtcttgtgagcagaagcatctataaccgagaagagatcgtgcgcttcgacagcgacgtgggggagttccgggcggtgacgctgctggggctgcctgccgccgagtactggaacagccagaaggacatcctggagaggaaacgggcggcggtggacagggtgtgcagacacaactaccagttggagctccgcacgaccttgcagcggcgagtggagcccacagtgaccatctccccatccaggacagaggccctcaaccaccacaacctgctggtctgctcggtgacagatttctatccagcccagatcaaagtccggtggtttcggaatggccaggaggagacagctggcgttgtgtccaccccccttattaggaatggtgactggaccttccagatcctggtgatgctggaaatgactccccagcgtggagacgtctacacctgccacgtggagcaccccagcctccagagccccatcaccgtggagtggcgggctcaatctgaatctgcccagagcaagatgctgagtggcattggaggcttcgtgctggggctgatcttcctcgggctgggccttatcatccatcacaggagtcagaaagggctcctgcactgactcctgagactattttaactgggattggttatcacttttctgtaacgcctgcttgtccctgcccagaattcccagctgtctgtgtcagcctgtccccctgagatcagagtcctacagtggctgtcacgcagccaccaggtcatctcctttcatccccaccttgaggcggatggctgtgaccctacttcctgcactgacccacagcccctgcctgtgcacagccagctgcatctactcaggccccaaggggtttctgtttctattctctcctcagactgctcaagagaagcacatgaaaactattacctgactttagagcttttttacataattaaacatgatcctgagttatctgtattctgaacttccttaattgagcagaggcaggaaatcactgcagaatgaaggaacataccttgaggtgacccagccaacctgtgcccagaaggagggttgtaccttgaaaagacactgaaagaatttggggtgcaaagtcagggtgggcagaggaggtagaaaatcaactcagttgtcgcatcattcatggttctttcatattgatgttcagtgcagtggcctgagaatatcccagcctctcttctggtttggtgagtgctatataagtaaacatggtggaattgtttgggggcagatatagtgacccttggtcactggtgtttcaaacattctggcaagtcacatcaatcaagaataatttttacttttaagaaagcataaccagcaataaaagtattatttttgattctaaa

SEQ ID NO: 151157 - DNA, 1787 bp, Homo sapiens
  Payload ID: 9774
  Gene Symbol: HLA-DQB1
  Gene Name: major histocompatibility complex, class II, DQ beta 1
  ENST ID: ENST00000421888
  CDS Start-End: 208-1017
gcactggattcagaaccttcacacaaaaaaaatctgcccagagacagatgaggtccttcagctccagtgctgattggttcctttccaagggaccatccaatcctaccacgcatggaaacatccacagatttttattctttctgccaggtacatcagatccatcaggtccgagctgtgttgactaccacttttcccttcgtctcaattatgtcttggaaaaaggctttgcggatccccggaggccttcgggcagcaactgtgaccttgatgctgtcgatgctgagcaccccagtggctgagggcagagactctcccgaggatttcgtgtaccagtttaagggcatgtgctacttcaccaacgggacagagcgcgtgcgtcttgtgagcagaagcatctataaccgagaagagatcgtgcgcttcgacagcgacgtgggggagttccgggcggtgacgctgctggggctgcctgccgccgagtactggaacagccagaaggacatcctggagaggaaacgggcggcggtggacagggtgtgcagacacaactaccagttggagctccgcacgaccttgcagcggcgagtggagcccacagtgaccatctccccatccaggacagaggccctcaaccaccacaacctgctggtctgctcggtgacagatttctatccagcccagatcaaagtccggtggtttcggaatggccaggaggagacagctggcgttgtgtccaccccccttattaggaatggtgactggaccttccagatcctggtgatgctggaaatgactccccagcgtggagacgtctacacctgccacgtggagcaccccagcctccagagccccatcaccgtggagtggcgggctcaatctgaatctgcccagagcaagatgctgagtggcattggaggcttcgtgctggggctgatcttcctcgggctgggccttatcatccatcacaggagtcagaaaggacctcaagggcctccaccagcagggctcctgcactgactcctgagactattttaactgggattggttatcacttttctgtaacgcctgcttgtccctgcccagaattcccagctgtctgtgtcagcctgtccccctgagatcagagtcctacagtggctgtcacgcagccaccaggtcatctcctttcatccccaccttgaggcggatggctgtgaccctacttcctgcactgacccacagcccctgcctgtgcacagccagctgcatctactcaggccccaaggggtttctgtttctattctctcctcagactgctcaagagaagcacatgaaaactattacctgactttagagcttttttacataattaaacatgatcctgagttatctgtattctgaacttccttaattgagcagaggcaggaaatcactgcagaatgaaggaacataccttgaggtgacccagccaacctgtgcccagaaggagggttgtaccttgaaaagacactgaaagaatttggggtgcaaagtcagggtgggcagaggaggtagaaaatcaactcagttgtcgcatcattcatggttctttcatattgatgttcagtgcagtggcctgagaatatcccagcctctcttctggtttggtgagtgctatataagtaaacatggtggaattgtttgggggcagatatagtgacccttggtcactggtgtttcaaacattctggcaagtcacatcaatcaagaataatttttacttttaagaaagcataaccagcaataaaagtattatttttgattctaaa

SEQ ID NO: 151158 - DNA, 1485 bp, Homo sapiens
  Payload ID: 9774
  Gene Symbol: HLA-DQB1
  Gene Name: major histocompatibility complex, class II, DQ beta 1
  ENST ID: ENST00000424530
  CDS Start-End: 42-716
gagctgtgttgactaccactacttttcccttcgtctcaattatgtcttggaaaaaggctttgcggatccccggaggccttcgggcagcaactgttaccttgatgctggcgatgctgagcaccccagtggctgagggcagagactctcccgaggatttcgtgtaccagtttaaggccatgtgctacttcaccaacgggacggagcgcgtgcgttatgtgaccagatacatctataaccgagaggagtacgcacgcttcgacagcgacgtggaggtgtaccgggcggtgacgccgctggggccgcctgacgccgagtactggaacagccagaaggaagtcctggagaggacccgggcggagttggacacggtgtgcagacacaactaccagttggagctccgcacgaccttgcagcggcgagtggagcccacagtgaccatctccccatccaggacagaggccctcaaccaccacaacctgctggtctgctcagtgacagatttctatccagcccagatcaaagtccggtggtttcggaatgaccaggaggagacaaccggcgttgtgtccaccccccttattaggaacggtgactggaccttccagatcctggtgatgctggaaatgactccccagcatggagacgtctacacctgccacgtggagcaccccagcctccagaaccccatcaccgtggagtggcggctcctgcactgactcctgagactattttaactgggattggttatcacttttctgtaacgcctgcttgtccctgcccagaattcccaactgcctgtgtcagcctgtccccctgagatcagagtcctacagtggctgtcacgcagccaccaggtcatctcctttcatccccaccccaaggcgctggctgtgactctgcttcctgcactgacccagagcctctgcctgtgcatggccagctgcgtctactcaggccccaaggggtttctgtttctattctctcctcagactgctcaagagaagcacatgaaaaccattacctgactttagagcttttttacataattaaacatgatcctgagttatctgtattctcaacttccttaattgagcagaggcaggaaatcactgcagaatgaaggaacataccttgaggtgacccagccaacctgtgcccagaaggagggttgtaccttgaaaagacactgaaagaatttggggtgcaaagtcatggtgggcagaggaggtagaaaatcaactcagttgtcgcatcattcatggttctttcatattgatgttcagtgcagtggcctgagaatatcccagcctctcttctggtttggtgagtgctatataagtaaacatggtggaattgtttgggggcagatatagtgacccttggtcactggtgtttcaaacattctggcaagtcacatcaatcaagaataatttttacttttaagaaagcataaccagcaataaaagtattatttttgattctaaa

SEQ ID NO: 151159 - DNA, 1483 bp, Homo sapiens
  Payload ID: 9774
  Gene Symbol: HLA-DQB1
  Gene Name: major histocompatibility complex, class II, DQ beta 1
  ENST ID: ENST00000415926
  CDS Start-End: 39-713
gagctgtgttgactaccacttttcccttcgtctcaattatgtcttggaaaaaggctttgcggatccccggaggccttcgggcagcaactgtgaccttgatgctgtcgatgctgagcaccccagtggctgagggcagagactctcccgaggatttcgtgtaccagtttaagggcatgtgctacttcaccaacgggacagagcgcgtgcgtcttgtgagcagaagcatctataaccgagaagagatcgtgcgcttcgacagcgacgtgggggagttccgggcggtgacgctgctggggctgcctgccgccgagtactggaacagccagaaggacatcctggagaggaaacgggcggcggtggacagggtgtgcagacacaactaccagttggagctccgcacgaccttgcagcggcgagtggagcccacagtgaccatctccccatccaggacagaggccctcaaccaccacaacctgctggtctgctcggtgacagatttctatccagcccagatcaaagtccggtggtttcggaatggccaggaggagacagctggcgttgtgtccaccccccttattaggaatggtgactggaccttccagatcctggtgatgctggaaatgactccccagcgtggagacgtctacacctgccacgtggagcaccccagcctccagagccccatcaccgtggagtggcggctcctgcactgactcctgagactattttaactgggattggttatcacttttctgtaacgcctgcttgtccctgcccagaattcccagctgtctgtgtcagcctgtccccctgagatcagagtcctacagtggctgtcacgcagccaccaggtcatctcctttcatccccaccttgaggcggatggctgtgaccctacttcctgcactgacccacagcccctgcctgtgcacagccagctgcatctactcaggccccaaggggtttctgtttctattctctcctcagactgctcaagagaagcacatgaaaactattacctgactttagagcttttttacataattaaacatgatcctgagttatctgtattctgaacttccttaattgagcagaggcaggaaatcactgcagaatgaaggaacataccttgaggtgacccagccaacctgtgcccagaaggagggttgtaccttgaaaagacactgaaagaatttggggtgcaaagtcagggtgggcagaggaggtagaaaatcaactcagttgtcgcatcattcatggttctttcatattgatgttcagtgcagtggcctgagaatatcccagcctctcttctggtttggtgagtgctatataagtaaacatggtggaattgtttgggggcagatatagtgacccttggtcactggtgtttcaaacattctggcaagtcacatcaatcaagaataatttttacttttaagaaagcataaccagcaataaaagtattatttttgattctaaa

SEQ ID NO: 151160 - DNA, 1734 bp, Homo sapiens
  Payload ID: 9774
  Gene Symbol: HLA-DQB1
  Gene Name: major histocompatibility complex, class II, DQ beta 1
  Uniprot ID: P01920
  ENST ID: ENST00000422950
  CDS Start-End: 180-965
aggatgcattagaggcctctatcctgagggacactgatgtgggggctgaggaaggacattgagggcaccttcaggtctctctgcctattattccttgtgccaactccattccaggtgtacatcagatccatcaggtccaagctgtgttgactaccactacttttcccttcgtctcaattatgtcttggaagaaggctttgcggatccctggaggccttcgggtagcaactgtgaccttgatgctggcgatgctgagcaccccggtggctgagggcagagactctcccgaggatttcgtgtaccagtttaagggcatgtgctacttcaccaacgggacggagcgcgtgcgtcttgtgaccagatacatctataaccgagaggagtacgcacgcttcgacagcgacgtgggggtgtatcgggcggtgacgccgctggggccgcctgacgccgagtactggaacagccagaaggaagtcctggagaggacccgggcggagttggacacggtgtgcagacacaactaccagttggagctccgcacgaccttgcagcggcgagtggagcccacagtgaccatctccccatccaggacagaggccctcaaccaccacaacctgctggtctgctcagtgacagatttctatccagcccagatcaaagtccggtggtttcggaatgaccaggaggagacaactggcgttgtgtccaccccccttattaggaacggtgactggaccttccagatcctggtgatgctggaaatgactccccagcgtggagacgtctacacctgccacgtggagcaccccagcctccagaaccccatcatcgtggagtggcgggctcagtctgaatctgcccagagcaagatgctgagtggcattggaggcttcgtgctggggctgatcttcctcgggctgggccttattatccatcacaggagtcagaaagggctcctgcactgactcctgagactattttaactgggattggttatcacttttctgtaacgcctgcttgtccctgcccagaattcccagctgcctgtgtcagcctgtcccccgagatcagagtcctacagtggctgtcacgcagccaccaggtcatctcctttcatccccacctcaaggctgatggctgtgaccctgcttcctgcactgacccagagcctctgcctgtgcacggccagctgcgtctactgaggccccaaggggtttctgtttctattctctcctcagactgctcaagagaagcacatgaaaaccattacctgactttagagcttttttacataattaaacatgatcctgagttatctgtattctcaacttccttaattgagcagaggcaggaaatcactgcagaatgaaggaacataccttgaggtgacccagccaacctgtgcccagaaggagggttgtaccttgaaaagacactgaaagaattttgggtgcaaagtcagggtgggcagaggaggtagaagatcaactcagttgtcgcatcattcatggttctttcatattgatgttcaatgcagtggcctgagaatatcccagcctctcttctggtttggtgagtgctatataagtaagcatggtggaattgtttgggggcagatatagtgacccttggtcactggtgtttcaaacattctggcaagtcacatcaatcaagaataatttttacttttaagaaagcataaccagcaataaaagtattatttttgagtctaaa

SEQ ID NO: 151161 - DNA, 1219 bp, Homo sapiens
  Payload ID: 9774
  Gene Symbol: HLA-DQB1
  Gene Name: major histocompatibility complex, class II, DQ beta 1
  ENST ID: ENST00000433936
  CDS Start-End: 46-450
gtccgagctgtgttgactaccactacttttcccttcgtctcaattatgtcttggaaaaaggctttgcggatccccggaggccttcgggcagcaactgttaccttgatgctggcgatgctgagcaccccagtggctgagggcagagactctcccgtggagcccacagtgaccatctccccatccaggacagaggccctcaaccaccacaacctgctggtctgctcagtgacagatttctatccagcccagatcaaagtccggtggtttcggaatgaccaggaggagacaaccggcgttgtgtccaccccccttattaggaacggtgactggaccttccagatcctggtgatgctggaaatgactccccagcatggagacgtctacacctgccacgtggagcaccccagcctccagaaccccatcaccgtggagtggcggctcctgcactgactcctgagactattttaactgggattggttatcacttttctgtaacgcctgcttgtccctgcccagaattcccaactgcctgtgtcagcctgtccccctgagatcagagtcctacagtggctgtcacgcagccaccaggtcatctcctttcatccccaccccaaggcgctggctgtgactctgcttcctgcactgacccagagcctctgcctgtgcatggccagctgcgtctactcaggccccaaggggtttctgtttctattctctcctcagactgctcaagagaagcacatgaaaaccattacctgactttagagcttttttacataattaaacatgatcctgagttatctgtattctcaacttccttaattgagcagaggcaggaaatcactgcagaatgaaggaacataccttgaggtgacccagccaacctgtgcccagaaggagggttgtaccttgaaaagacactgaaagaatttggggtgcaaagtcatggtgggcagaggaggtagaaaatcaactcagttgtcgcatcattcatggttctttcatattgatgttcagtgcagtggcctgagaatatcccagcctctcttctggtttggtgagtgctatataagtaaacatggtggaattgtttgggggcagatatagtgacccttggtcactggtgtttcaaacattctggcaagtcacatcaatcaagaataatttttacttttaagaaagcataaccagcaataaaagtattatttttgattctaaa

SEQ ID NO: 151162 - DNA, 484 bp, Homo sapiens
  Payload ID: 9774
  Gene Symbol: HLA-DQB1
  Gene Name: major histocompatibility complex, class II, DQ beta 1
  ENST ID: ENST00000457445
  CDS Start-End: 51-484
atcaggtccgagctgtgttgactaccactacttttcccttcgtctcaattatgtcttggaaaaaggctttgcggatccccggaggccttcgggcagcaactgtgacgccgctggggccgcctgacgccgagtactggaacagccagaaggaagtcctggagaggacccgggcggagttggacacggtgtgcagacacaactaccagttggagctccgcacgaccttgcagcggcgagtggagcccacagtgaccatctccccatccaggacagaggccctcaaccaccacaacctgctggtctgctcagtgacagatttctatccagcccagatcaaagtccggtggtttcggaatgaccaggaggagacaaccggcgttgtgtccaccccccttattaggaacggtgactggaccttccagatcctggtgatgctggaaatgactccccagcatggagacgtctacacctgccacgtggagca

SEQ ID NO: 151163 - DNA, 1423 bp, Homo sapiens
  Payload ID: 9774
  Gene Symbol: HLA-DQB1
  Gene Name: major histocompatibility complex, class II, DQ beta 1
  ENST ID: ENST00000490862
  CDS Start-End: 32-442
gactaccactacttttcccttcgtctcaattatgtcttggaagaaggctttgcggatccctggaggccttcgggtagcaactgtgaccttgatgctggcgatgctgagcaccccggtggctgagggcagagactctcccgaggatttcgtgtaccagtttaagggcatgtgctacttcaccaacgggacggagcgcgtgcgtcttgtgaccagatacatctataaccgagaggagtacgcacgcttcgacagcgacgtgggggtgtatcgggcggtgacgccgctggggccgcctgacgccgagtactggaacagccagaaggaagtcctggagaggacccgggcggagttggacacggtgtgcagacacaactaccagttggagctccgcacgaccttgcagcggcgaggaacggtgactggaccttccagatcctggtgatgctggaaatgactccccagcgtggagacgtctacacctgccacgtggagcaccccagcctccagaaccccatcatcgtggagtggcgggctcagtctgaatctgcccagagcaagatgctgagtggcattggaggcttcgtgctggggctgatcttcctcgggctgggccttattatccatcacaggagtcagaaagggctcctgcactgactcctgagactattttaactgggattggttatcacttttctgtaacgcctgcttgtccctgcccagaattcccagctgcctgtgtcagcctgtcccccgagatcagagtcctacagtggctgtcacgcagccaccaggtcatctcctttcatccccacctcaaggctgatggctgtgaccctgcttcctgcactgacccagagcctctgcctgtgcacggccagctgcgtctactgaggccccaaggggtttctgtttctattctctcctcagactgctcaagagaagcacatgaaaaccattacctgactttagagcttttttacataattaaacatgatcctgagttatctgtattctcaacttccttaattgagcagaggcaggaaatcactgcagaatgaaggaacataccttgaggtgacccagccaacctgtgcccagaaggagggttgtaccttgaaaagacactgaaagaattttgggtgcaaagtcagggtgggcagaggaggtagaagatcaactcagttgtcgcatcattcatggttctttcatattgatgttcaatgcagtggcctgagaatatcccagcctctcttctggtttggtgagtgctatataagtaagcatggtggaattgtttgggggcagatatagtgacccttggtcactggtgtttcaaacattctggcaagtcacatcaatcaagaataatttttacttttaagaaagcataaccagcaataaaagtattatttttgagtctaaa

SEQ ID NO: 151164 - DNA, 1421 bp, Homo sapiens
  Payload ID: 9774
  Gene Symbol: HLA-DQB1
  Gene Name: major histocompatibility complex, class II, DQ beta 1
  ENST ID: ENST00000473366
  CDS Start-End: 29-439
gactaccacttttcccttcgtctcaattatgtcttggaaaaaggctttgcggatccccggaggccttcgggcagcaactgtgaccttgatgctgtcgatgctgagcaccccagtggctgagggcagagactctcccgaggatttcgtgtaccagtttaagggcatgtgctacttcaccaacgggacagagcgcgtgcgtcttgtgagcagaagcatctataaccgagaagagatcgtgcgcttcgacagcgacgtgggggagttccgggcggtgacgctgctggggctgcctgccgccgagtactggaacagccagaaggacatcctggagaggaaacgggcggcggtggacagggtgtgcagacacaactaccagttggagctccgcacgaccttgcagcggcgaggaatggtgactggaccttccagatcctggtgatgctggaaatgactccccagcgtggagacgtctacacctgccacgtggagcaccccagcctccagagccccatcaccgtggagtggcgggctcaatctgaatctgcccagagcaagatgctgagtggcattggaggcttcgtgctggggctgatcttcctcgggctgggccttatcatccatcacaggagtcagaaagggctcctgcactgactcctgagactattttaactgggattggttatcacttttctgtaacgcctgcttgtccctgcccagaattcccagctgtctgtgtcagcctgtccccctgagatcagagtcctacagtggctgtcacgcagccaccaggtcatctcctttcatccccaccttgaggcggatggctgtgaccctacttcctgcactgacccacagcccctgcctgtgcacagccagctgcatctactcaggccccaaggggtttctgtttctattctctcctcagactgctcaagagaagcacatgaaaactattacctgactttagagcttttttacataattaaacatgatcctgagttatctgtattctgaacttccttaattgagcagaggcaggaaatcactgcagaatgaaggaacataccttgaggtgacccagccaacctgtgcccagaaggagggttgtaccttgaaaagacactgaaagaatttggggtgcaaagtcagggtgggcagaggaggtagaaaatcaactcagttgtcgcatcattcatggttctttcatattgatgttcagtgcagtggcctgagaatatcccagcctctcttctggtttggtgagtgctatataagtaaacatggtggaattgtttgggggcagatatagtgacccttggtcactggtgtttcaaacattctggcaagtcacatcaatcaagaataatttttacttttaagaaagcataaccagcaataaaagtattatttttgattctaaa

SEQ ID NO: 151165 - DNA, 1423 bp, Homo sapiens
  Payload ID: 9774
  Gene Symbol: HLA-DQB1
  Gene Name: major histocompatibility complex, class II, DQ beta 1
  ENST ID: ENST00000480749
  CDS Start-End: 32-442
gactaccactacttttcccttcgtctcaattatgtcttggaaaaaggctttgcggatccccggaggccttcgggcagcaactgttaccttgatgctggcgatgctgagcaccccagtggctgagggcagagactctcccgaggatttcgtgtaccagtttaaggccatgtgctacttcaccaacgggacggagcgcgtgcgttatgtgaccagatacatctataaccgagaggagtacgcacgcttcgacagcgacgtggaggtgtaccgggcggtgacgccgctggggccgcctgacgccgagtactggaacagccagaaggaagtcctggagaggacccgggcggagttggacacggtgtgcagacacaactaccagttggagctccgcacgaccttgcagcggcgaggaacggtgactggaccttccagatcctggtgatgctggaaatgactccccagcatggagacgtctacacctgccacgtggagcaccccagcctccagaaccccatcaccgtggagtggcgggctcagtctgaatctgcccagagcaagatgctgagtggcattggaggcttcgtgctggggctcatcttcctcgggctgggccttattatccatcacaggagtcagaaagggctcctgcactgactcctgagactattttaactgggattggttatcacttttctgtaacgcctgcttgtccctgcccagaattcccaactgcctgtgtcagcctgtccccctgagatcagagtcctacagtggctgtcacgcagccaccaggtcatctcctttcatccccaccccaaggcgctggctgtgactctgcttcctgcactgacccagagcctctgcctgtgcatggccagctgcgtctactcaggccccaaggggtttctgtttctattctctcctcagactgctcaagagaagcacatgaaaaccattacctgactttagagcttttttacataattaaacatgatcctgagttatctgtattctcaacttccttaattgagcagaggcaggaaatcactgcagaatgaaggaacataccttgaggtgacccagccaacctgtgcccagaaggagggttgtaccttgaaaagacactgaaagaatttggggtgcaaagtcatggtgggcagaggaggtagaaaatcaactcagttgtcgcatcattcatggttctttcatattgatgttcagtgcagtggcctgagaatatcccagcctctcttctggtttggtgagtgctatataagtaaacatggtggaattgtttgggggcagatatagtgacccttggtcactggtgtttcaaacattctggcaagtcacatcaatcaagaataatttttacttttaagaaagcataaccagcaataaaagtattatttttgattctaaa

SEQ ID NO: 151166 - DNA, 783 bp, Homo sapiens
  Payload ID: 9774
  Gene Symbol: HLA-DQB1
  Gene Name: major histocompatibility complex, class II, DQ beta 1
  ENST ID: ENST00000484729
  CDS Start-End: 32-442
gactaccactgcttttcccttcgtctcagttatgtcttggaagaaggctttgcggatccccggagaccttcgggtagcaactgtcaccttgatgctggcgatgctgagctccctactggctgagggcagagactctcccgaggatttcgtgttccagtttaagggcatgtgctacttcaccaacgggacggagcgcgtgcgtcttgtgaccagatacatctataaccgagaggagtacgcgcgcttcgacagcgacgtgggggtgtaccgcgcggtgacgccgcaggggcggcctgatgccgagtactggaacagccagaaggaagtcctggaggggacccgggcggagttggacacggtgtgcagacacaactacgaggtggcgttccgcgggatcttgcagaggagaggaatggtgactggactttccagatcctggtgatgctggaaatgactccccagcgtggagatgtctacacctgccacgtggagcaccccagcctccagagccccatcaccgtggagtggcgggctcagtctgaatctgcccagagcaagatgctgagtggcgttggaggcttcgtgctggggctgatcttccttgggctgggccttatcatccgtcaaaggagtcagaaagggcttctgcactgactcctgagactattttaactaggattggttatcactcttctgtgatgcctgcttatgcctgcccagaattcccagctgcctgtgtcagcttgtccccctgagatcaaagtcctacagtggctgtcacgc

SEQ ID NO: 151167 - DNA, 2028 bp, Homo sapiens
  Payload ID: 9775
  Gene Symbol: HLA-DQB2
  Gene Name: major histocompatibility complex, class II, DQ beta 2
  ENST ID: ENST00000323109
  CDS Start-End: 51-890
attaggtttgagctgtgttgactaccactgctttttccttggtctcacttatgtcttggaagatggctctgcagatccctggaggcttttgggcagcagctgtgaccgtgatgctggtgatgctgagcaccccagtggctgaggccagagactttcccaaggatttcttggtccagtttaagggcatgtgctacttcaccaacgggacagagcgcgtgcggggtgtggccagatacatctataaccgcgaggagtacgggcgcttcgacagcgacgttggggagttccaggcggtgaccgagctggggcggagcatcgaggactggaacaactataaggacttcttggagcaggagcgggccgcggtggacaaggtgtgcagacacaactacgaggcggagctacgcacgaccttgcagcggcaagtggagcccacagtgaccatctccccatccaggacagaggccctcaaccaccacaacctgctggtctgctcagtgacagatttctatccagcccagatcaaagtccagtggtttcggaatgaccaggaggagacagccggtgttgtgtccacctccctcattaggaatggtgactggaccttccagattctggtgatgctggaaataactccccagcgtggagacatctacacctgccaagtggagcaccccagcctccagagccccatcaccgtggagtggcgggctcagtctgaatctgcccagagcaagatgctgggtggtgttggaggcttcgtgctggggctgatcttcctcgggctgggccttatcatccgtcacaggggtcagaaaggacctcgagggcctccacctgcaggtaatatttcagccatgatccagtcaggggagagggcacaggcataagagggaagagccatggtgaaaccgcatctctactaaaaatacaaaaattagctggacgtggtggtgtgcatctgtaatcccggctacttgggaggttgaggcaagagaatcacttgaacccaggaggcagaggttgcagtgagccaagatggcgccactgcactccagtctgggcgatagagctagagtctgtctcaaaaaaaaaaaaaagaagagcatgagcggagtgttccagggcacagtggtctctgttcatggcctgtttgctgctatgagggttaagacttaggggagaagtttgccagtttctacgaatctccagagattgtttcctagaaccaggccttaactttggtggcatctttttgtgaaatgtggggacagagccacatcttgaatgtgagatagtagggtgatgcccactttgtgccacattttgttagctactgcctgtaggcattttcagtgactaaaagaggctgctagtggtggagatgaagtgtcacccaatttgctaaaaaaatcaaactcttcatattacccagaagggtaactgctgttccccgacctccacatatctgcatcaagctgaagttctgtgtcctcatgagctgattttacctttacacagatattggggaacgtgatgatgatatgccctggacctcagcatcctctgtttgatgctgcagaggaaactgaggactgggggagagggtgtgtccctcagggtaccctgtgctgaccatgcctcgtctctcttctccaggactcctgcactgactcctgaggacttttgtctgggattggtcatcactcttctttaatgcccacctgcccctgcccagaattcctagctgcctgtttcaccctgtcccactgaggtcagagtcctacagtggctcatgcagccacaggtcaccttctgtgatccccaccccaaggcactggcggtgactctgcttcctgcactgacccagagcctctgcctgtgcactgcaagctgtgtctactcaggccccaaggggcatctctgtttccattctccccccacagacctgtcaagagaagcatgacaaacaaaatcatttacctgactttagtgctttttcccataattaaacctgattctgagtta

SEQ ID NO: 151168 - DNA, 1059 bp, Homo sapiens
  Payload ID: 9775
  Gene Symbol: HLA-DQB2
  Gene Name: major histocompatibility complex, class II, DQ beta 2
  ENST ID: ENST00000399658
  CDS Start-End: 9-704
tctcacttatgtcttggaagatggctctgcagatccctggaggcttttgggcagcagctgtgaccgtgatgctggtgatgctgagcaccccagtggctgaggccagagactttcccaaggatttcttggtccagtttaagggcatgtgctacttcaccaacgggacagagcgcgtgcggggtgtggccagatacatctataaccgcgaggagtacgggcgcttcgacagcgacgttggggagttccaggcggtgaccgagctggggcggagcatcgaggactggaacaactataaggacttcttggagcaggagcgggccgcggtggacaaggtgtgcagacacaactacgaggcggagctacgcacgaccttgcagcggcaagtggagcccacagtgaccatctccccatccaggacagaggccctcaaccaccacaacctgctggtctgctcagtgacagatttctatccagcccagatcaaagtccagtggtttcggaatgaccaggaggagacagccggtgttgtgtccacctccctcattaggaatggtgactggaccttccagattctggtgatgctggaaataactccccagcgtggagacatctacacctgccaagtggagcaccccagcctccagagccccatcaccgtggagtggcgacctcgagggcctccacctgcaggactcctgcactgactcctgaggacttttgtctgggattggtcatcactcttctttaatgcccacctgcccctgcccagaattcctagctgcctgtttcaccctgtcccactgaggtcagagtcctacagtggctcatgcagccacaggtcaccttctgtgatccccaccccaaggcactggcggtgactctgcttcctgcactgacccagagcctctgcctgtgcactgcaagctgtgtctactcaggccccaaggggcatctctgtttccattctccccccacagacctgtcaagagaagcatgacaaacaaaatcatttacctgactttagtgctttttcccataattaaacctgattctgagtta

SEQ ID NO: 151169 - DNA, 1214 bp, Homo sapiens
  Payload ID: 9775
  Gene Symbol: HLA-DQB2
  Gene Name: major histocompatibility complex, class II, DQ beta 2
  Uniprot ID: P05538
  ENST ID: ENST00000399661
  CDS Start-End: 53-859
ccattaggtttgagctgtgttgactaccactgctttttccttggtctcacttatgtcttggaagatggctctgcagatccctggaggcttttgggcagcagctgtgaccgtgatgctggtgatgctgagcaccccagtggctgaggccagagactttcccaaggatttcttggtccagtttaagggcatgtgctacttcaccaacgggacagagcgcgtgcggggtgtggccagatacatctataaccgcgaggagtacgggcgcttcgacagcgacgttggggagttccaggcggtgaccgagctggggcggagcatcgaggactggaacaactataaggacttcttggagcaggagcgggccgcggtggacaaggtgtgcagacacaactacgaggcggagctacgcacgaccttgcagcggcaagtggagcccacagtgaccatctccccatccaggacagaggccctcaaccaccacaacctgctggtctgctcagtgacagatttctatccagcccagatcaaagtccagtggtttcggaatgaccaggaggagacagccggtgttgtgtccacctccctcattaggaatggtgactggaccttccagattctggtgatgctggaaataactccccagcgtggagacatctacacctgccaagtggagcaccccagcctccagagccccatcaccgtggagtggcgggctcagtctgaatctgcccagagcaagatgctgggtggtgttggaggcttcgtgctggggctgatcttcctcgggctgggccttatcatccgtcacaggggtcagaaaggacctcgagggcctccacctgcaggactcctgcactgactcctgaggacttttgtctgggattggtcatcactcttctttaatgcccacctgcccctgcccagaattcctagctgcctgtttcaccctgtcccactgaggtcagagtcctacagtggctcatgcagccacaggtcaccttctgtgatccccaccccaaggcactggcggtgactctgcttcctgcactgacccagagcctctgcctgtgcactgcaagctgtgtctactcaggccccaaggggcatctctgtttccattctccccccacagacctgtcaagagaagcatgacaaacaaaatcatttacctgactttagtgctttttcccataattaaacctgattctgagtta

SEQ ID NO: 151170 - DNA, 2027 bp, Homo sapiens
  Payload ID: 9775
  Gene Symbol: HLA-DQB2
  Gene Name: major histocompatibility complex, class II, DQ beta 2
  ENST ID: ENST00000415137
  CDS Start-End: 63-890
attaggtttgagctgtgttgactaccactgctttttccttggtctcacttacgtcttggaagatggctctgcagatccctggaggcttttgggcagcagctgtgaccgtgatgctggtgatgctgagcaccccagtggctgaggccagagactttcccaaggatttcttggtccagtttaagggcatgtgctacttcaccaacgggacagagcgcgtgcgcggtgtggccagatacatctataaccgcgaggagtacgggcgcttcgacagcgacgttggggagttccaggcggtgaccgagctggggcggagcatcgaggactggaacaactataaggacttcttggagcaggagcgggccgcggtggacaaggtgtgcagacacaactacgaggcggagctgcgcacgaccttgcagcggcaagtggagcccacagtgaccatctccccatccaggacagaggccctcaaccaccacaacctgctggtctgctcagtgacagatttctatccagcccagatcaaagtccggtggtttcggaatgaccaggaggagacagccggtgttgtgtccacctccctcattaggaatggtgactggaccttccagattctggtgatgctggaaataactccccagcgtggagacatctacacctgccaagtggagcaccccagcctccagagccccatcaccgtggagtggcgggctcagtctgaatctgcccagagcaagatgctgagtggcattggaggcttcgtgctggggctgatcttcctcgggctgggccttatcatccgtcacaggggtcagaaaggacctcgagggcctccaccagcaggtaatatttcagccatgatccagtcaggggagagggcacaggcataagagggaagagccatggtgaaaccgcatctctactaaaaatacaaaaattagctggacgtggtggtgtgcatctgtaatcccggctacttgggaggttgaggcaagagaatcacttgaacccaggaggcagaggttgcagtgagccaagatggcgccactgcactccagtctgggcgatagagctagagtctgtctcaaaaaaaaaaaaagaagagcatgagcggagtgttccagggcacagtggtctctgttcatggcctgtttgctgctatgagggttaagacttaggggaaaagtttgccagtttctacgaatctccagagattgtttcctagaaccaggccttaactttggtggcatctttttgtgaaatgtggggacagagccacatcttgaatgtgagatagtagggtgatgcccactttgtgccacattttgttagctactgcctgtaggcattttcagtgactaaaagaggctgctagtggtggagatgaagtgtcacccaatttactaaaaaaatcaaactcttcatattacccagaagggtaactgctgttcccccacctccacatatctgcatcaagctgaagttctgtgtcctcatgagctgattttacctttacacagatattggggaacgtgatgatgatatgccctggacctcagcatcctctgtttgatgctacagagggaactgaggactaggggagagggtgtgtccctcagggtaccctgtgctgatcatgcctcgtctctcttctccaggactcctgcactgactcctgaggacttttgtctgggattggtcatcactcttctgtaatgcccacctgcccctgcccagaattcctagctgcctgtgtcaccctgtcccactgaggtcagagtcctacagtggctcatgcagccacaggtcaccttctgtgatccccatcccaaggcactggtggtgactctgcttcctgcactgacccagagcctctgcctgtgcactgcaagctgtgtctactcaggccccaaggggcatctctgtttccattctccccccacagacctgtcaagagaagcatgacaaacaaaatcatttacctgactttagtgctttttcccataattaaacctgattctgagtta

SEQ ID NO: 151171 - DNA, 1214 bp, Homo sapiens
  Payload ID: 9775
  Gene Symbol: HLA-DQB2
  Gene Name: major histocompatibility complex, class II, DQ beta 2
  ENST ID: ENST00000429783
  CDS Start-End: 65-859
ccattaggtttgagctgtgttgactaccactgctttttccttggtctcacttacgtcttggaagatggctctgcagatccctggaggcttttgggcagcagctgtgaccgtgatgctggtgatgctgagcaccccagtggctgaggccagagactttcccaaggatttcttggtccagtttaagggcatgtgctacttcaccaacgggacagagcgcgtgcgcggtgtggccagatacatctataaccgcgaggagtacgggcgcttcgacagcgacgttggggagttccaggcggtgaccgagctggggcggagcatcgaggactggaacaactataaggacttcttggagcaggagcgggccgcggtggacaaggtgtgcagacacaactacgaggcggagctgcgcacgaccttgcagcggcaagtggagcccacagtgaccatctccccatccaggacagaggccctcaaccaccacaacctgctggtctgctcagtgacagatttctatccagcccagatcaaagtccggtggtttcggaatgaccaggaggagacagccggtgttgtgtccacctccctcattaggaatggtgactggaccttccagattctggtgatgctggaaataactccccagcgtggagacatctacacctgccaagtggagcaccccagcctccagagccccatcaccgtggagtggcgggctcagtctgaatctgcccagagcaagatgctgagtggcattggaggcttcgtgctggggctgatcttcctcgggctgggccttatcatccgtcacaggggtcagaaaggacctcgagggcctccaccagcaggactcctgcactgactcctgaggacttttgtctgggattggtcatcactcttctgtaatgcccacctgcccctgcccagaattcctagctgcctgtgtcaccctgtcccactgaggtcagagtcctacagtggctcatgcagccacaggtcaccttctgtgatccccatcccaaggcactggtggtgactctgcttcctgcactgacccagagcctctgcctgtgcactgcaagctgtgtctactcaggccccaaggggcatctctgtttccattctccccccacagacctgtcaagagaagcatgacaaacaaaatcatttacctgactttagtgctttttcccataattaaacctgattctgagtta

SEQ ID NO: 151172 - DNA, 1214 bp, Homo sapiens
  Payload ID: 9775
  Gene Symbol: HLA-DQB2
  Gene Name: major histocompatibility complex, class II, DQ beta 2
  Uniprot ID: P05538
  ENST ID: ENST00000430849
  CDS Start-End: 53-859
ccattaggtttgagctgtgttgactaccactgctttttccttggtctcacttatgtcttggaagatggctctgcagatccctggaggcttttgggcagcagctgtgaccgtgatgctggtgatgctgagcaccccagtggctgaggccagagactttcccaaggatttcttggtccagtttaagggcatgtgctacttcaccaacgggacagagcgcgtgcggggtgtggccagatacatctataaccgcgaggagtacgggcgcttcgacagcgacgttggggagttccaggcggtgaccgagctggggcggagcatcgaggactggaacaactataaggacttcttggagcaggagcgggccgcggtggacaaggtgtgcagacacaactacgaggcggagctacgcacgaccttgcagcggcaagtggagcccacagtgaccatctccccatccaggacagaggccctcaaccaccacaacctgctggtctgctcagtgacagatttctatccagcccagatcaaagtccagtggtttcggaatgaccaggaggagacagccggtgttgtgtccacctccctcattaggaatggtgactggaccttccagattctggtgatgctggaaataactccccagcgtggagacatctacacctgccaagtggagcaccccagcctccagagccccatcaccgtggagtggcgggctcagtctgaatctgcccagagcaagatgctgggtggtgttggaggcttcgtgctggggctgatcttcctcgggctgggccttatcatccgtcacaggggtcagaaaggacctcgagggcctccacctgcaggactcctgcactgactcctgaggacttttgtctgggattggtcatcactcttctgtaatgcccacctgcccctgcccagaattcctagctgcctgtgtcatcctgtcccactgaggtcagagtcctacagtggctcatgcagccacaggtcaccttctgtgatccccatcccaaggcactggcggtgactctgcttcctgcactgacccagagcctctgcctgtgcactgcaagctgtgtctactcaggccccaaggggcatctctgtttccattctccccccacagacctgtcaagagaagcatgacaaacaaaatcatttacctaactttagtgctttttcccataattaaacctgattctgagtta

SEQ ID NO: 151173 - DNA, 1059 bp, Homo sapiens
  Payload ID: 9775
  Gene Symbol: HLA-DQB2
  Gene Name: major histocompatibility complex, class II, DQ beta 2
  Uniprot ID: P05538
  ENST ID: ENST00000411527
  CDS Start-End: 21-704
tctcacttacgtcttggaagatggctctgcagatccctggaggcttttgggcagcagctgtgaccgtgatgctggtgatgctgagcaccccagtggctgaggccagagactttcccaaggatttcttggtccagtttaagggcatgtgctacttcaccaacgggacagagcgcgtgcgcggtgtggccagatacatctataaccgcgaggagtacgggcgcttcgacagcgacgttggggagttccaggcggtgaccgagctggggcggagcatcgaggactggaacaactataaggacttcttggagcaggagcgggccgcggtggacaaggtgtgcagacacaactacgaggcggagctgcgcacgaccttgcagcggcaagtggagcccacagtgaccatctccccatccaggacagaggccctcaaccaccacaacctgctggtctgctcggtgacagatttctatccagcccagatcaaagtccggtggtttcggaatgaccaggaggagacagccggtgttgtgtccacctccctcattaggaatggtgactggaccttccagattctggtgatgctggaaataactccccagcgtggagacatctacacctgccaagtggagcaccccagcctccagagccccatcaccgtggagtggcgacctcgagggcctccaccagcaggactcctgcactgactcctgaggacttttgtctgggattggtcatcactcttctgtaatgcccacctgcccctgcccagaattcctagctgcctgtgtcaccctgtcccactgaggtcagagtcctacagtggctcatgcagccacaggtcaccttctgtgatccccatcccaaggcactggtggtgactctgcttcctgcactgacccagagcctctgcctgtgcactgcaagctgtgtctactcaggccccaaggggcatctctgtttccattctccccccacagacctgtcaagagaagcatgacaaacaaaatcatttacctgactttagtgctttttcccataattaaacctgattctgagtta

SEQ ID NO: 151174 - DNA, 2027 bp, Homo sapiens
  Payload ID: 9775
  Gene Symbol: HLA-DQB2
  Gene Name: major histocompatibility complex, class II, DQ beta 2
  ENST ID: ENST00000433801
  CDS Start-End: 51-890
attaggtttgagctgtgttgactaccactgctttttccttggtctcacttatgtcttggaagatggctctgcagatccctggaggcttttgggcagcagctgtgaccgtgatgctggtgatgctgagcaccccagtggctgaggccagagactttcccaaggatttcttggtccagtttaagggcatgtgctacttcaccaacgggacagagcgcgtgcggggtgtggccagatacatctataaccgcgaggagtacgggcgcttcgacagcgacgttggggagttccaggcggtgaccgagctggggcggagcatcgaggactggaacaactataaggacttcttggagcaggagcgggccgcggtggacaaggtgtgcagacacaactacgaggcggagctacgcacgaccttgcagcggcaagtggagcccacagtgaccatctccccatccaggacagaggccctcaaccaccacaacctgctggtctgctcagtgacagatttctatccagcccagatcaaagtccagtggtttcggaatgaccaggaggagacagccggtgttgtgtccacctccctcattaggaatggtgactggaccttccagattctggtgatgctggaaataactccccagcgtggagacatctacacctgccaagtggagcaccccagcctccagagccccatcaccgtggagtggcgggctcagtctgaatctgcccagagcaagatgctgggtggtgttggaggcttcgtgctggggctgatcttcctcgggctgggccttatcatccgtcacaggggtcagaaaggacctcgagggcctccacctgcaggtaatatttcagccatgatccagtcaggggagagggcacaggcataagagggaagagccatggtgaaaccgcatctctactaaaaatacaaaaattagctggacgtggtggtgtgcatctgtaatcccggctacttgggaggttgaggcaagagaatcacttgaacccaggaggcagaggttgcagtgagccaagatggcgccactgcactccagtctgggcgatagagctagagtctgtctcaaaaaaaaaaaaaagaagagcatgagcggagtgttccagggcacagtggtctctgttcatggcctgtttgctgctatgagggttaagacttaggggagaagtttgccagtttctacgaatctccagagattgtttcctagaaccaggccttaactttggtggcatctttttgtgaaatgtggggacagagccacatcttgaatgtgagatagtagggtgatgcccactttgtgccacattttgttagctactgcctgtaggcattttcagtgactaaaagaggctgctagtggtggagatgaagtgtcacccaatttactaaaaaaatcaaactcttcatattacccagaagggtaactgctgttcccccacctccacatatctgcatcaagctgaagttctgtgtcctcatgagctgattttacctttacacagatattggggaacgtgatgatgatatgccctggacctcagcatcctctgtttgatgctgcagaggaaactcaggactgggggagagggtgtgtccctcagggtaccctgtgctgatcatgcctcatctctcttctccaggactcctgcactgactcctgaggacttttgtctgggattggtcatcactcttctgtaatgcccacctgcccctgcccagaattcctagctgcctgtgtcatcctgtcccactgaggtcagagtcctacagtggctcatgcagccacaggtcaccttctgtgatccccatcccaaggcactggcggtgactctgcttcctgcactgacccagagcctctgcctgtgcactgcaagctgtgtctactcaggccccaaggggcatctctgtttccattctccccccacagacctgtcaagagaagcatgacaaacaaaatcatttacctaactttagtgctttttcccataattaaacctgattctgagtt

SEQ ID NO: 151175 - DNA, 1214 bp, Homo sapiens
  Payload ID: 9775
  Gene Symbol: HLA-DQB2
  Gene Name: major histocompatibility complex, class II, DQ beta 2
  ENST ID: ENST00000430668
  CDS Start-End: 65-859
ccattaggtttgagctgtgttgactaccactgctttttccttggtctcacttacgtcttggaagatggctctgcagatccctggaggcttttgggcagcagctgtgaccgtgatgctggtgatgctgagcaccccagtggctgaggccagagactttcccaaggatttcttggtccagtttaagggcatgtgctacttcaccaacgggacagagcgcgtgcgcggtgtggccagatacatctataaccgcgaggagtacgggcgcttcgacagcgacgttggggagttccaggcggtgaccgagctggggcggagcatcgaggactggaacaactataaggacttcttggagcaggagcgggccgcggtggacaaggtgtgcagacacaactacgaggcggagctgcgcacgaccttgcagcggcaagtggagcccacagtgaccatctccccatccaggacagaggccctcaaccaccacaacctgctggtctgctcggtgacagatttctatccagcccagatcaaagtccggtggtttcggaatgaccaggaggagacagccggtgttgtgtccacctccctcattaggaatggtgactggaccttccagattctggtgatgctggaaataactccccagcgtggagacatctacacctgccaagtggagcaccccagcctccagagccccatcaccgtggagtggcgggctcagtctgaatctgcccagagcaagatgctgagtggcattggaggcttcgtgctggggctgatcttcctcgggctgggccttatcatccgtcacaggggtcagaaaggacctcgagggcctccaccagcaggactcctgcactgactcctgaggacttttgtctgggattggtcatcactcttctgtaatgcccacctgcccctgcccagaattcctagctgcctgtgtcaccctgtcccactgaggtcagagtcctacagtggctcatgcagccacaggtcaccttctgtgatccccatcccaaggcactggtggtgactctgcttcctgcactgacccagagcctctgcctgtgcactgcaagctgtgtctactcaggccccaaggggcatctctgtttccattctccccccacagacctgtcaagagaagcatgacaaacaaaatcatttacctgactttagtgctttttcccataattaaacctgattctgagtta

SEQ ID NO: 151176 - DNA, 1059 bp, Homo sapiens; identical to SEQ ID NO: 151173
  Payload ID: 9775
  Gene Symbol: HLA-DQB2
  Gene Name: major histocompatibility complex, class II, DQ beta 2
  Uniprot ID: P05538
  ENST ID: ENST00000426733
  CDS Start-End: 21-704

SEQ ID NO: 151177 - DNA, 1059 bp, Homo sapiens
  Payload ID: 9775
  Gene Symbol: HLA-DQB2
  Gene Name: major histocompatibility complex, class II, DQ beta 2
  ENST ID: ENST00000417780
  CDS Start-End: 9-704
tctcacttatgtcttggaagatggctctgcagatccctggaggcttttgggcagcagctgtgaccgtgatgctggtgatgctgagcaccccagtggctgaggccagagactttcccaaggatttcttggtccagtttaagggcatgtgctacttcaccaacgggacagagcgcgtgcggggtgtggccagatacatctataaccgcgaggagtacgggcgcttcgacagcgacgttggggagttccaggcggtgaccgagctggggcggagcatcgaggactggaacaactataaggacttcttggagcaggagcgggccgcggtggacaaggtgtgcagacacaactacgaggcggagctacgcacgaccttgcagcggcaagtggagcccacagtgaccatctccccatccaggacagaggccctcaaccaccacaacctgctggtctgctcagtgacagatttctatccagcccagatcaaagtccagtggtttcggaatgaccaggaggagacagccggtgttgtgtccacctccctcattaggaatggtgactggaccttccagattctggtgatgctggaaataactccccagcgtggagacatctacacctgccaagtggagcaccccagcctccagagccccatcaccgtggagtggcgacctcgagggcctccacctgcaggactcctgcactgactcctgaggacttttgtctgggattggtcatcactcttctgtaatgcccacctgcccctgcccagaattcctagctgcctgtgtcatcctgtcccactgaggtcagagtcctacagtggctcatgcagccacaggtcaccttctgtgatccccatcccaaggcactggcggtgactctgcttcctgcactgacccagagcctctgcctgtgcactgcaagctgtgtctactcaggccccaaggggcatctctgtttccattctccccccacagacctgtcaagagaagcatgacaaacaaaatcatttacctaactttagtgctttttcccataattaaacctgattctgagtta

SEQ ID NO: 151178 - DNA, 2027 bp, Homo sapiens; identical to SEQ ID NO: 151174
  Payload ID: 9775
  Gene Symbol: HLA-DQB2
  Gene Name: major histocompatibility complex, class II, DQ beta 2
  ENST ID: ENST00000442043
  CDS Start-End: 51-890

SEQ ID NO: 151179 - DNA, 2026 bp, Homo sapiens
  Payload ID: 9775
  Gene Symbol: HLA-DQB2
  Gene Name: major histocompatibility complex, class II, DQ beta 2
  ENST ID: ENST00000442806
  CDS Start-End: 63-890
attaggtttgagctgtgttgactaccactgctttttccttggtctcacttacgtcttggaagatggctctgcagatccctggaggcttttgggcagcagctgtgaccgtgatgctggtgatgctgagcaccccagtggctgaggccagagactttcccaaggatttcttggtccagtttaagggcatgtgctacttcaccaacgggacagagcgcgtgcgcggtgtggccagatacatctataaccgcgaggagtacgggcgcttcgacagcgacgttggggagttccaggcggtgaccgagctggggcggagcatcgaggactggaacaactataaggacttcttggagcaggagcgggccgcggtggacaaggtgtgcagacacaactacgaggcggagctgcgcacgaccttgcagcggcaagtggagcccacagtgaccatctccccatccaggacagaggccctcaaccaccacaacctgctggtctgctcggtgacagatttctatccagcccagatcaaagtccggtggtttcggaatgaccaggaggagacagccggtgttgtgtccacctccctcattaggaatggtgactggaccttccagattctggtgatgctggaaataactccccagcgtggagacatctacacctgccaagtggagcaccccagcctccagagccccatcaccgtggagtggcgggctcagtctgaatctgcccagagcaagatgctgagtggcattggaggcttcgtgctggggctgatcttcctcgggctgggccttatcatccgtcacaggggtcagaaaggacctcgagggcctccaccagcaggtaatatttcagccatgatccagtcaggggagagggcacaggcataagagggaagagccatggtgaaaccgcatctctactaaaaatacaaaaattagctggacgtggtggtgtgcatctgtaatcccggctacttgggaggttgaggcaagagaatcacttgaacccaggaggcagaggttgcagtgagccaagatggcgccactgcactccagtctgggcgatagagctagagtctgtctcaaaaaaaaaaaagaagagcatgagcggagtgttccagggcacagtggtctctgttcatggcctgtttgctgctatgagggttaagacttaggggaaaagtttgccagtttctacgaatctccagagattgtttcctagaaccaggccttaactttggtggcatctttttgtgaaatgtggggacagagccacatcttgaatgtgagatagtagggtgatgcccactttgtgccacattttgttagctactgcctgtaggcattttcagtgactaaaagaggctgctagtggtggagatgaagtgtcacccaatttactaaaaaaatcaaactcttcatattacccagaagggtaactgctgttcccccacctccacatatctgcatcaagctgaagttctgtgtcctcatgagctgattttacctttacacagatattggggaacgtgatgatgatatgccctggacctcagcatcctctgtttgatgctacagagggaactgaggactaggggagagggtgtgtccctcagggtaccctgtgctgatcatgcctcgtctctcttctccaggactcctgcactgactcctgaggacttttgtctgggattggtcatcactcttctgtaatgcccacctgcccctgcccagaattcctagctgcctgtgtcaccctgtcccactgaggtcagagtcctacagtggctcatgcagccacaggtcaccttctgtgatccccatcccaaggcactggtggtgactctgcttcctgcactgacccagagcctctgcctgtgcactgcaagctgtgtctactcaggccccaaggggcatctctgtttccattctccccccacagacctgtcaagagaagcatgacaaacaaaatcatttacctgactttagtgctttttcccataattaaacctgattctgagtta

SEQ ID NO: 151180 - DNA, 721 bp, Homo sapiens
  Payload ID: 9775
  Gene Symbol: HLA-DQB2
  Gene Name: major histocompatibility complex, class II, DQ beta 2
  ENST ID: ENST00000416131
  CDS Start-End: 1-656
ctctgcagatccctggaggcttttgggcagcagctgtgaccgtgatgctggtgatgctgagcaccccagtggctgaggccagagactttcccaaggatttcttggtccagtttaagggcatgtgctacttcaccaacgggacagagcgcgtgcggggtgtggccagatacatctataaccgcgaggagtacgggcgcttcgacagcgacgttggggagttccaggcggtgaccgagctggggcggagcatcgaggactggaacaactataaggacttcttggagcaggagcgggccgcggtggacaaggtgtgcagacacaactacgaggcggagctacgcacgaccttgcagcggcaagtggagcccacagtgaccatctccccatccaggacagaggccctcaaccaccacaacctgctggtctgctcagtgacagatttctatccagcccagatcaaagtccagtggtttcggaatgaccaggaggagacagccggtgttgtgtccacctccctcattaggaatggtgactggaccttccagattctggtgatgctggaaataactccccagcgtggagacatctacacctgccaagtggagcaccccagcctccagagccccatcaccgtggagtggcgactcctgcactgactcctgaggacttttgtctgggattggtcatcactcttctttaatgcccacctgcccctgcccag

SEQ ID NO: 151181 - DNA, 1214 bp, Homo sapiens; identical to SEQ ID NO: 151175
  Payload ID: 9775
  Gene Symbol: HLA-DQB2
  Gene Name: major histocompatibility complex, class II, DQ beta 2
  ENST ID: ENST00000437316
  CDS Start-End: 65-859

SEQ ID NO: 151182 - DNA, 1214 bp, Homo sapiens; identical to SEQ ID NO: 151169
  Payload ID: 9775
  Gene Symbol: HLA-DQB2
  Gene Name: major histocompatibility complex, class II, DQ beta 2
  Uniprot ID: P05538
  ENST ID: ENST00000457432
  CDS Start-End: 53-859

SEQ ID NO: 151183 - DNA, 721 bp, Homo sapiens
  Payload ID: 9775
  Gene Symbol: HLA-DQB2
  Gene Name: major histocompatibility complex, class II, DQ beta 2
  ENST ID: ENST00000447979
  CDS Start-End: 1-656
ctctgcagatccctggaggcttttgggcagcagctgtgaccgtgatgctggtgatgctgagcaccccagtggctgaggccagagactttcccaaggatttcttggtccagtttaagggcatgtgctacttcaccaacgggacagagcgcgtgcggggtgtggccagatacatctataaccgcgaggagtacgggcgcttcgacagcgacgttggggagttccaggcggtgaccgagctggggcggagcatcgaggactggaacaactataaggacttcttggagcaggagcgggccgcggtggacaaggtgtgcagacacaactacgaggcggagctacgcacgaccttgcagcggcaagtggagcccacagtgaccatctccccatccaggacagaggccctcaaccaccacaacctgctggtctgctcagtgacagatttctatccagcccagatcaaagtccagtggtttcggaatgaccaggaggagacagccggtgttgtgtccacctccctcattaggaatggtgactggaccttccagattctggtgatgctggaaataactccccagcgtggagacatctacacctgccaagtggagcaccccagcctccagagccccatcaccgtggagtggcgactcctgcactgactcctgaggacttttgtctgggattggtcatcactcttctgtaatgcccacctgcccctgcccag

SEQ ID NO: 151184 - DNA, 1059 bp, Homo sapiens
  Payload ID: 9775
  Gene Symbol: HLA-DQB2
  Gene Name: major histocompatibility complex, class II, DQ beta 2
  Uniprot ID: P05538
  ENST ID: ENST00000456529
  CDS Start-End: 21-704
tctcacttacgtcttggaagatggctctgcagatccctggaggcttttgggcagcagctgtgaccgtgatgctggtgatgctgagcaccccagtggctgaggccagagactttcccaaggatttcttggtccagtttaagggcatgtgctacttcaccaacgggacagagcgcgtgcgcggtgtggccagatacatctataaccgcgaggagtacgggcgcttcgacagcgacgttggggagttccaggcggtgaccgagctggggcggagcatcgaggactggaacaactataaggacttcttggagcaggagcgggccgcggtggacaaggtgtgcagacacaactacgaggcggagctgcgcacgaccttgcagcggcaagtggagcccacagtgaccatctccccatccaggacagaggccctcaaccaccacaacctgctggtctgctcagtgacagatttctatccagcccagatcaaagtccggtggtttcggaatgaccaggaggagacagccggtgttgtgtccacctccctcattaggaatggtgactggaccttccagattctggtgatgctggaaataactccccagcgtggagacatctacacctgccaagtggagcaccccagcctccagagccccatcaccgtggagtggcgacctcgagggcctccaccagcaggactcctgcactgactcctgaggacttttgtctgggattggtcatcactcttctgtaatgcccacctgcccctgcccagaattcctagctgcctgtgtcaccctgtcccactgaggtcagagtcctacagtggctcatgcagccacaggtcaccttctgtgatccccatcccaaggcactggtggtgactctgcttcctgcactgacccagagcctctgcctgtgcactgcaagctgtgtctactcaggccccaaggggcatctctgtttccattctccccccacagacctgtcaagagaagcatgacaaacaaaatcatttacctgactttagtgctttttcccataattaaacctgattctgagtta

SEQ ID NO: 151185 - DNA, 1059 bp, Homo sapiens; identical to SEQ ID NO: 151168
  Payload ID: 9775
  Gene Symbol: HLA-DQB2
  Gene Name: major histocompatibility complex, class II, DQ beta 2
  ENST ID: ENST00000433114
  CDS Start-End: 9-704

SEQ ID NO: 151186 - DNA, 721 bp, Homo sapiens; identical to SEQ ID NO: 151183
  Payload ID: 9775
  Gene Symbol: HLA-DQB2
  Gene Name: major histocompatibility complex, class II, DQ beta 2
  ENST ID: ENST00000424579
  CDS Start-End: 1-656

SEQ ID NO: 151187 - DNA, 721 bp, Homo sapiens
  Payload ID: 9775
  Gene Symbol: HLA-DQB2
  Gene Name: major histocompatibility complex, class II, DQ beta 2
  ENST ID: ENST00000421468
  CDS Start-End: 1-656
ctctgcagatccctggaggcttttgggcagcagctgtgaccgtgatgctggtgatgctgagcaccccagtggctgaggccagagactttcccaaggatttcttggtccagtttaagggcatgtgctacttcaccaacgggacagagcgcgtgcgcggtgtggccagatacatctataaccgcgaggagtacgggcgcttcgacagcgacgttggggagttccaggcggtgaccgagctggggcggagcatcgaggactggaacaactataaggacttcttggagcaggagcgggccgcggtggacaaggtgtgcagacacaactacgaggcggagctgcgcacgaccttgcagcggcaagtggagcccacagtgaccatctccccatccaggacagaggccctcaaccaccacaacctgctggtctgctcagtgacagatttctatccagcccagatcaaagtccggtggtttcggaatgaccaggaggagacagccggtgttgtgtccacctccctcattaggaatggtgactggaccttccagattctggtgatgctggaaataactccccagcgtggagacatctacacctgccaagtggagcaccccagcctccagagccccatcaccgtggagtggcgactcctgcactgactcctgaggacttttgtctgggattggtcatcactcttctgtaatgcccacctgcccctgcccag

SEQ ID NO: 151188 - DNA, 721 bp, Homo sapiens
  Payload ID: 9775
  Gene Symbol: HLA-DQB2
  Gene Name: major histocompatibility complex, class II, DQ beta 2
  ENST ID: ENST00000435081
  CDS Start-End: 1-656
ctctgcagatccctggaggcttttgggcagcagctgtgaccgtgatgctggtgatgctgagcaccccagtggctgaggccagagactttcccaaggatttcttggtccagtttaagggcatgtgctacttcaccaacgggacagagcgcgtgcgcggtgtggccagatacatctataaccgcgaggagtacgggcgcttcgacagcgacgttggggagttccaggcggtgaccgagctggggcggagcatcgaggactggaacaactataaggacttcttggagcaggagcgggccgcggtggacaaggtgtgcagacacaactacgaggcggagctgcgcacgaccttgcagcggcaagtggagcccacagtgaccatctccccatccaggacagaggccctcaaccaccacaacctgctggtctgctcggtgacagatttctatccagcccagatcaaagtccggtggtttcggaatgaccaggaggagacagccggtgttgtgtccacctccctcattaggaatggtgactggaccttccagattctggtgatgctggaaataactccccagcgtggagacatctacacctgccaagtggagcaccccagcctccagagccccatcaccgtggagtggcgactcctgcactgactcctgaggacttttgtctgggattggtcatcactcttctgtaatgcccacctgcccctgcccag

SEQ ID NO: 151189 - DNA, 2028 bp, Homo sapiens; identical to SEQ ID NO: 151167
  Payload ID: 9775
  Gene Symbol: HLA-DQB2
  Gene Name: major histocompatibility complex, class II, DQ beta 2
  ENST ID: ENST00000419519
  CDS Start-End: 51-890

SEQ ID NO: 151190 - DNA, 1059 bp, Homo sapiens; identical to SEQ ID NO: 151177
  Payload ID: 9775
  Gene Symbol: HLA-DQB2
  Gene Name: major histocompatibility complex, class II, DQ beta 2
  ENST ID: ENST00000428972
  CDS Start-End: 9-704

SEQ ID NO: 151191 - DNA, 1059 bp, Homo sapiens; identical to SEQ ID NO: 151184
  Payload ID: 9775
  Gene Symbol: HLA-DQB2
  Gene Name: major histocompatibility complex, class II, DQ beta 2
  Uniprot ID: P05538
  ENST ID: ENST00000438757
  CDS Start-End: 21-704

SEQ ID NO: 151192 - DNA, 2027 bp, Homo sapiens; identical to SEQ ID NO: 151170
  Payload ID: 9775
  Gene Symbol: HLA-DQB2
  Gene Name: major histocompatibility complex, class II, DQ beta 2
  ENST ID: ENST00000455520
  CDS Start-End: 63-890

SEQ ID NO: 151193 - DNA, 1214 bp, Homo sapiens; identical to SEQ ID NO: 151172
  Payload ID: 9775
  Gene Symbol: HLA-DQB2
  Gene Name: major histocompatibility complex, class II, DQ beta 2
  Uniprot ID: P05538
  ENST ID: ENST00000432486
  CDS Start-End: 53-859

SEQ ID NO: 151194 - DNA, 2026 bp, Homo sapiens; identical to SEQ ID NO: 151179
  Payload ID: 9775
  Gene Symbol: HLA-DQB2
  Gene Name: major histocompatibility complex, class II, DQ beta 2
  ENST ID: ENST00000435145
  CDS Start-End: 63-890

SEQ ID NO: 151195 - DNA, 721 bp, Homo sapiens; identical to SEQ ID NO: 151187
  Payload ID: 9775
  Gene Symbol: HLA-DQB2
  Gene Name: major histocompatibility complex, class II, DQ beta 2
  ENST ID: ENST00000418419
  CDS Start-End: 1-656

SEQ ID NO: 151196 - DNA, 721 bp, Homo sapiens; identical to SEQ ID NO: 151180
  Payload ID: 9775
  Gene Symbol: HLA-DQB2
  Gene Name: major histocompatibility complex, class II, DQ beta 2
  ENST ID: ENST00000419109
  CDS Start-End: 1-656

SEQ ID NO: 151197 - DNA, 721 bp, Homo sapiens; identical to SEQ ID NO: 151188
  Payload ID: 9775
  Gene Symbol: HLA-DQB2
  Gene Name: major histocompatibility complex, class II, DQ beta 2
  ENST ID: ENST00000427449
  CDS Start-End: 1-656

SEQ ID NO: 151198 - DNA, 1214 bp, Homo sapiens; identical to SEQ ID NO: 151171
  Payload ID: 9775
  Gene Symbol: HLA-DQB2
  Gene Name: major histocompatibility complex, class II, DQ beta 2
  ENST ID: ENST00000419685
  CDS Start-End: 65-859

SEQ ID NO: 151199 - DNA, 1169 bp, Homo sapiens
  Payload ID: 9776
  Gene Symbol: HLA-DRA
  Gene Name: major histocompatibility complex, class II, DR alpha
  ENST ID: ENST00000374982
  CDS Start-End: 74-763
ttttcttttattcttgtctgttctgcctcactcccgagctctactgactcccaacagagcgcccaagaagaaaatggccataagtggagtccctgtgctaggatttttcatcatagctgtgctgatgagcgctcaggaatcatgggctatcaaagaagaacatgtgatcatccaggccgagttctatctgaatcctgaccaatcaggcgagtttatgtttgactttgatggtgatgagattttccatgtggatatggcaaagaaggagacggtctggcggcttgaagaatttggacgatttgccagctttgaggctcaaggtgcattggccaacatagctgtggacaaagccaacctggaaatcatgacaaagcgctccaactatactccgatcaccaatgacaagttcaccccaccagtggtcaatgtcacgtggcttcgaaatggaaaacctgtcaccacaggagtgtcagagacagtcttcctgcccagggaagaccaccttttccgcaagttccactatctccccttcctgccctcaactgaggacgtttacgactgcagggtggagcactggggcttggatgagcctcttctcaagcactgggagtttgatgctccaagccctctcccagagactacagagaacgtggtgtgtgccctgggcctgactgtgggtctggtgggcatcattattgggaccatcttcatcatcaagggattgcgcaaaagcaatgcagcagaacgcagggggcctctgtaaggcacatggaggtgatggtgtttcttagagagaagatcactgaagaaacttctgctttaatggctttacaaagctggcaatattacaatccttgacctcagtgaaagcagtcatcttcagcattttccagccctatagccaccccaagtgtggatatgcctcttcgattgctccgtactctaacatctagctggcttccctgtctattgccttttcctgtatctattttcctctatttcctatcattttattatcaccatgcaatgcctctggaataaaacatacaggagtctgtctctgctatggaatgccccatggggcatctcttgtgtacttattgtttaaggtttcctcaaactgtgatttttctgaacacaataaactattttgatgatcttgggtggaa

SEQ ID NO: 151200 - DNA, 1280 bp, Homo sapiens
  Payload ID: 9776
  Gene Symbol: HLA-DRA
  Gene Name: major histocompatibility complex, class II, DR alpha
  Uniprot ID: P01903
  ENST ID: ENST00000383127
  CDS Start-End: 110-874
ttttaatggtcagactctattacaccccacattctcttttcttttattcttgtctgttctgcctcactcccgagctctactgactcccaacagagcgcccaagaagaaaatggccataagtggagtccctgtgctaggatttttcatcatagctgtgctgatgagcgctcaggaatcatgggctatcaaagaagaacatgtgatcatccaggccgagttctatctgaatcctgaccaatcaggcgagtttatgtttgactttgatggtgatgagattttccatgtggatatggcaaagaaggagacggtctggcggcttgaagaatttggacgatttgccagctttgaggctcaaggtgcattggccaacatagctgtggacaaagccaacctggaaatcatgacaaagcgctccaactatactccgatcaccaatgtacctccagaggtaactgtgctcacgaacagccctgtggaactgagagagcccaacgtcctcatctgtttcatagacaagttcaccccaccagtggtcaatgtcacgtggcttcgaaatggaaaacctgtcaccacaggagtgtcagagacagtcttcctgcccagggaagaccaccttttccgcaagttccactatctccccttcctgccctcaactgaggacgtttacgactgcagggtggagcactggggcttggatgagcctcttctcaagcactgggagtttgatgctccaagccctctcccagagactacagagaacgtggtgtgtgccctgggcctgactgtgggtctggtgggcatcattattgggaccatcttcatcatcaagggattgcgcaaaagcaatgcagcagaacgcagggggcctctgtaaggcacatggaggtgatggtgtttcttagagagaagatcactgaagaaacttctgctttaatggctttacaaagctggcaatattacaatccttgacctcagtgaaagcagtcatcttcagcattttccagccctatagccaccccaagagtggttatgcctcctcgattgctccatactctaacatctagctggcttccctgtctattgccttttcctgtatctattttcctctatttcctatcattttattatcaccatgcaatgcctctggaataaaacatacaggagtctgtctctgctatggaatgccccatggggcatctcttgtgtacttattgtttaaggtttcctcaaactgtgatttttctgaacacaataaactattttgaagatcttgggtggaa

SEQ ID NO: 151201 - DNA, 1123 bp, Homo sapiens
  Payload ID: 9776
  Gene Symbol: HLA-DRA
  Gene Name: major histocompatibility complex, class II, DR alpha
  ENST ID: ENST00000383258
  CDS Start-End: 28-717
actcccaaaagagcgcccaagaagaaaatggccataagtggagtccctgtgctaggatttttcatcatagctgtgctgatgagcgctcaggaatcatgggctatcaaagaagaacatgtgatcatccaggccgagttctatctgaatcctgaccaatcaggcgagtttatgtttgactttgatggtgatgagattttccatgtggatatggcaaagaaggagacggtctggcggcttgaagaatttggacgatttgccagctttgaggctcaaggtgcattggccaacatagctgtggacaaagccaacctggaaatcatgacaaagcgctccaactatactccgatcaccaatgacaagttcaccccaccagtggtcaatgtcacgtggcttcgaaatggaaaacctgtcaccacaggagtgtcagagacagtcttcctgcccagggaagaccaccttttccgcaagttccactatctccccttcctgccctcaactgaggacgtttacgactgcagggtggagcactggggcttggatgagcctcttctcaagcactgggagtttgatgctccaagccctctcccagagactacagagaacgtggtgtgtgccctgggcctgactgtgggtctggtgggcatcattattgggaccatcttcatcatcaagggagtgcgcaaaagcaatgcagcagaacgcagggggcctctgtaaggcacatggaggtgatggtgtttcttagagagaagatcactgaagaaacttctgctttaatgactttacaaagctggcaatattacaatccttgacctcagtgaaagcagtcatcttcagcgttttccagccctatagccaccccaagtgtggttatgcctcctcgattgctccgtactctaacatctagctggcttccctgtctattgccttttcctgtatctattttcctctatttcctatcattttattatcaccatgcaatgcctctggaataaaacatacaggagtctgtctctgctatggaatgccccatggggcatctcttgtgtacttattgtttaaggtttcctcaaactgtgatttttctgaacacaataaactattttgatgatcttgggtggaa

SEQ ID NO: 151202 - DNA, 1280 bp, Homo sapiens
  Payload ID: 9776
  Gene Symbol: HLA-DRA
  Gene Name: major histocompatibility complex, class II, DR alpha
  Uniprot ID: P01903
  ENST ID: ENST00000383259
  CDS Start-End: 110-874
ttttaatggtcagactctattacaccccacattctcttttcttttattcttgtctgttctgcctcactcccgagctctactgactcccaaaagagcgcccaagaagaaaatggccataagtggagtccctgtgctaggatttttcatcatagctgtgctgatgagcgctcaggaatcatgggctatcaaagaagaacatgtgatcatccaggccgagttctatctgaatcctgaccaatcaggcgagtttatgtttgactttgatggtgatgagattttccatgtggatatggcaaagaaggagacggtctggcggcttgaagaatttggacgatttgccagctttgaggctcaaggtgcattggccaacatagctgtggacaaagccaacctggaaatcatgacaaagcgctccaactatactccgatcaccaatgtacctccagaggtaactgtgctcacgaacagccctgtggaactgagagagcccaacgtcctcatctgtttcatcgacaagttcaccccaccagtggtcaatgtcacgtggcttcgaaatggaaaacctgtcaccacaggagtgtcagagacagtcttcctgcccagggaagaccaccttttccgcaagttccactatctccccttcctgccctcaactgaggacgtttacgactgcagggtggagcactggggcttggatgagcctcttctcaagcactgggagtttgatgctccaagccctctcccagagactacagagaacgtggtgtgtgccctgggcctgactgtgggtctggtgggcatcattattgggaccatcttcatcatcaagggagtgcgcaaaagcaatgcagcagaacgcagggggcctctgtaaggcacatggaggtgatggtgtttcttagagagaagatcactgaagaaacttctgctttaatgactttacaaagctggcaatattacaatccttgacctcagtgaaagcagtcatcttcagcgttttccagccctatagccaccccaagtgtggttatgcctcctcgattgctccgtactctaacatctagctggcttccctgtctattgccttttcctgtatctattttcctctatttcctatcattttattatcaccatgcaatgcctctggaataaaacatacaggagtctgtctctgctatggaatgccccatggggcatctcttgtgtacttattgtttaaggtttcctcaaactgtgatttttctgaacacaataaactattttgatgatcttgggtggaa

SEQ ID NO: 151203 - DNA, 1280 bp, Homo sapiens
  Payload ID: 9776
  Gene Symbol: HLA-DRA
  Gene Name: major histocompatibility complex, class II, DR alpha
  Uniprot ID: P01903
  ENST ID: ENST00000395388
  CDS Start-End: 110-874
ttttaatggtcagactctattacaccccacattctcttttcttttattcttgtctgttctgcctcactcccgagctctactgactcccaacagagcgcccaagaagaaaatggccataagtggagtccctgtgctaggatttttcatcatagctgtgctgatgagcgctcaggaatcatgggctatcaaagaagaacatgtgatcatccaggccgagttctatctgaatcctgaccaatcaggcgagtttatgtttgactttgatggtgatgagattttccatgtggatatggcaaagaaggagacggtctggcggcttgaagaatttggacgatttgccagctttgaggctcaaggtgcattggccaacatagctgtggacaaagccaacctggaaatcatgacaaagcgctccaactatactccgatcaccaatgtacctccagaggtaactgtgctcacaaacagccctgtggaactgagagagcccaacgtcctcatctgtttcatagacaagttcaccccaccagtggtcaatgtcacgtggcttcgaaatggaaaacctgtcaccacaggagtgtcagagacagtcttcctgcccagggaagaccaccttttccgcaagttccactatctccccttcctgccctcaactgaggacgtttacgactgcagggtggagcactggggcttggatgagcctcttctcaagcactgggagtttgatgctccaagccctctcccagagactacagagaacgtggtgtgtgccctgggcctgactgtgggtctggtgggcatcattattgggaccatcttcatcatcaagggattgcgcaaaagcaatgcagcagaacgcagggggcctctgtaaggcacatggaggtgatggtgtttcttagagagaagatcactgaagaaacttctgctttaatggctttacaaagctggcaatattacaatccttgacctcagtgaaagcagtcatcttcagcattttccagccctatagccaccccaagtgtggatatgcctcttcgattgctccgtactctaacatctagctggcttccctgtctattgccttttcctgtatctattttcctctatttcctatcattttattatcaccatgcaatgcctctggaataaaacatacaggagtctgtctctgctatggaatgccccatggggcatctcttgtgtacttattgtttaaggtttcctcaaactgtgatttttctgaacacaataaactattttgatgatcttgggtggaa

SEQ ID NO: 151204 - DNA, 1123 bp, Homo sapiens
  Payload ID: 9776
  Gene Symbol: HLA-DRA
  Gene Name: major histocompatibility complex, class II, DR alpha
  ENST ID: ENST00000415767
  CDS Start-End: 28-717
actcccaacagagcgcccaagaagaaaatggccataagtggagtccctgtgctaggatttttcatcatagctgtgctgatgagcgctcaggaatcatgggctatcaaagaagaacatgtgatcatccaggccgagttctatctgaatcctgaccaatcaggcgagtttatgtttgactttgatggtgatgagattttccatgtggatatggcaaagaaggagacggtctggcggcttgaagaatttggacgatttgccagctttgaggctcaaggtgcattggccaacatagctgtggacaaagccaacctggaaatcatgacaaagcgctccaactatactccgatcaccaatgacaagttcaccccaccagtggtcaatgtcacgtggcttcgaaatggaaaacctgtcaccacaggagtgtcagagacagtcttcctgcccagggaagaccaccttttccgcaagttccactatctccccttcctgccctcaactgaggacgtttacgactgcagggtggagcactggggcttggatgagcctcttctcaagcactgggagtttgatgctccaagccctctcccagagactacagagaacgtggtgtgtgccctgggcctgactgtgggtctggtgggcatcattattgggaccatcttcatcatcaagggagtgcgcaaaagcaatgcagcagaacgcagggggcctctgtaaggcacatggaggtgatggtgtttcttagagagaagatcactgaagaaacttctgctttaatgactttacaaagctggcaatattacaatccttgacctcagtgaaagcagtcatcttcagcgttttccagccctatagccaccccaagtgtggttatgcctcctcgattgctccgtactctaacatctagctggcttccctgtctattgccttttcctgtatctattttcctctatttcctatcattttattatcaccatgcaatgcctctggaataaaacatacaggagtctgtctctgctatggaatgccccatggggcatctcttgtgtacttattgtttaaggtttcctcaaactgtgatttttctgaacacaataaactattttgatgatcttgggtggaa

SEQ ID NO: 151205 - DNA, 1123 bp, Homo sapiens; identical to SEQ ID NO: 151201
  Payload ID: 9776
  Gene Symbol: HLA-DRA
  Gene Name: major histocompatibility complex, class II, DR alpha
  ENST ID: ENST00000427753
  CDS Start-End: 28-717

SEQ ID NO: 151206 - DNA, 1280 bp, Homo sapiens; identical to SEQ ID NO: 151202
  Payload ID: 9776
  Gene Symbol: HLA-DRA
  Gene Name: major histocompatibility complex, class II, DR alpha
  Uniprot ID: P01903
  ENST ID: ENST00000414698
  CDS Start-End: 110-874

SEQ ID NO: 151207 - DNA, 1123 bp, Homo sapiens
  Payload ID: 9776
  Gene Symbol: HLA-DRA
  Gene Name: major histocompatibility complex, class II, DR alpha
  ENST ID: ENST00000434866
  CDS Start-End: 28-717
actcccaacagagcgcccaagaagaaaatggccataagtggagtccctgtgctaggatttttcatcatagctgtgctgatgagcgctcaggaatcatgggctatcaaagaagaacatgtgatcatccaggccgagttctatctgaatcctgaccaatcaggcgagtttatgtttgactttgatggtgatgagattttccatgtggatatggcaaagaaggagacggtctggcggcttgaagaatttggacgatttgccagctttgaggctcaaggtgcattggccaacatagctgtggacaaagccaacctggaaatcatgacaaagcgctccaactatactccgatcaccaatgacaagttcaccccaccagtggtcaatgtcacgtggcttcgaaatggaaaacctgtcaccacaggagtgtcagagacagtcttcctgcccagggaagaccaccttttccgcaagttccactatctccccttcctgccctcaactgaggacgtttacgactgcagggtggagcactggggcttggatgagcctcttctcaagcactgggagtttgatgctccaagccctctcccagagactacagagaacgtggtgtgtgccctgggcctgactgtgggtctggtgggcatcattattgggaccatcttcatcatcaagggattgcgcaaaagcaatgcagcagaacgcagggggcctctgtaaggcacatggaggtgatggtgtttcttagagagaagatcactgaagaaacttctgctttaatggctttacaaagctggcaatattacaatccttgacctcagtgaaagcagtcatcttcagcattttccagccctatagccaccccaagagtggttatgcctcctcgattgctccatactctaacatctagctggcttccctgtctattgccttttcctgtatctattttcctctatttcctatcattttattatcaccatgcaatgcctctggaataaaacatacaggagtctgtctctgctatggaatgccccatggggcatctcttgtgtacttattgtttaaggtttcctcaaactgtgatttttctgaacacaataaactattttgaagatcttgggtggaa

SEQ ID NO: 151208 - DNA, 1280 bp, Homo sapiens
  Payload ID: 9776
  Gene Symbol: HLA-DRA
  Gene Name: major histocompatibility complex, class II, DR alpha
  Uniprot ID: P01903
  ENST ID: ENST00000442960
  CDS Start-End: 110-874
ttttaatggtcagactctattacaccccacattctcttttcttttattcttgtctgttctgcctcactcccgagctctactgactcccaacagagcgcccaagaagaaaatggccataagtggagtccctgtgctaggatttttcatcatagctgtgctgatgagcgctcaggaatcatgggctatcaaagaagaacatgtgatcatccaggccgagttctatctgaatcctgaccaatcaggcgagtttatgtttgactttgatggtgatgagattttccatgtggatatggcaaagaaggagacggtctggcggcttgaagaatttggacgatttgccagctttgaggctcaaggtgcattggccaacatagctgtggacaaagccaacctggaaatcatgacaaagcgctccaactatactccgatcaccaatgtacctccagaggtaactgtgctcacgaacagccctgtggaactgagagagcccaacgtcctcatctgtttcatcgacaagttcaccccaccagtggtcaatgtcacgtggcttcgaaatggaaaacctgtcaccacaggagtgtcagagacagtcttcctgcccagggaagaccaccttttccgcaagttccactatctccccttcctgccctcaactgaggacgtttacgactgcagggtggagcactggggcttggatgagcctcttctcaagcactgggagtttgatgctccaagccctctcccagagactacagagaacgtggtgtgtgccctgggcctgactgtgggtctggtgggcatcattattgggaccatcttcatcatcaagggagtgcgcaaaagcaatgcagcagaacgcagggggcctctgtaaggcacatggaggtgatggtgtttcttagagagaagatcactgaagaaacttctgctttaatgactttacaaagctggcaatattacaatccttgacctcagtgaaagcagtcatcttcagcgttttccagccctatagccaccccaagtgtggttatgcctcctcgattgctccgtactctaacatctagctggcttccctgtctattgccttttcctgtatctattttcctctatttcctatcattttattatcaccatgcaatgcctctggaataaaacatacaggagtctgtctctgctatggaatgccccatggggcatctcttgtgtacttattgtttaaggtttcctcaaactgtgatttttctgaacacaataaactattttgatgatcttgggtggaa

SEQ ID NO: 151209 - DNA, 1280 bp, Homo sapiens; identical to SEQ ID NO: 151202
  Payload ID: 9776
  Gene Symbol: HLA-DRA
  Gene Name: major histocompatibility complex, class II, DR alpha
  Uniprot ID: P01903
  ENST ID: ENST00000411524
  CDS Start-End: 110-874

SEQ ID NO: 151210 - DNA, 1280 bp, Homo sapiens
  Payload ID: 9776
  Gene Symbol: HLA-DRA
  Gene Name: major histocompatibility complex, class II, DR alpha
  Uniprot ID: P01903
  ENST ID: ENST00000416883
  CDS Start-End: 110-874
ttttaatggtcagactctattacaccccacattctcttttcttttattcttgtctgttctgcctcactcccgagctctactgactcccaacagagcgcccaagaagaaaatggccataagtggagtccctgtgctaggatttttcatcatagctgtgctgatgagcgctcaggaatcatgggctatcaaagaagaacatgtgatcatccaggccgagttctatctgaatcctgaccaatcaggcgagtttatgtttgactttgatggtgatgagattttccatgtggatatggcaaagaaggagacggtctggcggcttgaagaatttggacgatttgccagctttgaggctcaaggtgcattggccaacatagctgtggacaaagccaacctggaaatcatgacaaagcgctccaactatactccgatcaccaatgtacctccagaggtaactgtgctcacgaacagccctgtggaactgagagagcccaacgtcctcatctgtttcatagacaagttcaccccaccagtggtcaatgtcacgtggcttcgaaatggaaaacctgtcaccacaggagtgtcagagacagtcttcctgcccagggaagaccaccttttccgcaagttccactatctccccttcctgccctcaactgaggacgtttacgactgcagggtggagcactggggcttggatgagcctcttctcaagcactgggagtttgatgctccaagccctctcccagagactacagagaatgtggtgtgtgccctgggcctgactgtgggtctggtgggcatcattattgggaccatcttcatcatcaagggagtgcgcaaaagcaatgcagcagaacgcagggggcctctgtaaggcacatggaggtgatgatgtttcttagagagaagatcactgaagaaacttctgctttaatgactttacaaagctggcaatattacaatccttgacctcagtgaaagcagtcatcttcagcgttttccagccctatagccaccccaagtgtggttatgcctcctcgattgctccgtactctaacatctagctggcttccctgtctattgccttttcctgtatctattttcctctatttcctatcattttattatcaccatgcaatgcctctggaataaaacatacaggagtctgtctctgctatggaatgccccatggggcatctcttgtgtacttattgtttaaggtttcctcaaactgtgatttttctgaacacaataaactattttgatgatcttgggtggaa

SEQ ID NO: 151211 - DNA, 1123 bp, Homo sapiens
  Payload ID: 9776
  Gene Symbol: HLA-DRA
  Gene Name: major histocompatibility complex, class II, DR alpha
  ENST ID: ENST00000411505
  CDS Start-End: 28-717
actcccaacagagcgcccaagaagaaaatggccataagtggagtccctgtgctaggatttttcatcatagctgtgctgatgagcgctcaggaatcatgggctatcaaagaagaacatgtgatcatccaggccgagttctatctgaatcctgaccaatcaggcgagtttatgtttgactttgatggtgatgagattttccatgtggatatggcaaagaaggagacggtctggcggcttgaagaatttggacgatttgccagctttgaggctcaaggtgcattggccaacatagctgtggacaaagccaacctggaaatcatgacaaagcgctccaactatactccgatcaccaatgacaagttcaccccaccagtggtcaatgtcacgtggcttcgaaatggaaaacctgtcaccacaggagtgtcagagacagtcttcctgcccagggaagaccaccttttccgcaagttccactatctccccttcctgccctcaactgaggacgtttacgactgcagggtggagcactggggcttggatgagcctcttctcaagcactgggagtttgatgctccaagccctctcccagagactacagagaatgtggtgtgtgccctgggcctgactgtgggtctggtgggcatcattattgggaccatcttcatcatcaagggagtgcgcaaaagcaatgcagcagaacgcagggggcctctgtaaggcacatggaggtgatgatgtttcttagagagaagatcactgaagaaacttctgctttaatgactttacaaagctggcaatattacaatccttgacctcagtgaaagcagtcatcttcagcgttttccagccctatagccaccccaagtgtggttatgcctcctcgattgctccgtactctaacatctagctggcttccctgtctattgccttttcctgtatctattttcctctatttcctatcattttattatcaccatgcaatgcctctggaataaaacatacaggagtctgtctctgctatggaatgccccatggggcatctcttgtgtacttattgtttaaggtttcctcaaactgtgatttttctgaacacaataaactattttgatgatcttgggtggaa

SEQ ID NO: 151212 - DNA, 1123 bp, Homo sapiens; identical to SEQ ID NO: 151201
  Payload ID: 9776
  Gene Symbol: HLA-DRA
  Gene Name: major histocompatibility complex, class II, DR alpha
  ENST ID: ENST00000418111
  CDS Start-End: 28-717

SEQ ID NO: 151213 - DNA, 1278 bp, Homo sapiens
  Payload ID: 9776
  Gene Symbol: HLA-DRA
  Gene Name: major histocompatibility complex, class II, DR alpha
  ENST ID: ENST00000613328
  CDS Start-End: 110-874
ttttaatggtcagactctattacaccccacattctcttttcttttattcttgtctgttctgcctcactcccgagctctactgactcccaacagagcgcccaagaagaaaatggccataagtggagtccctgtgctaggatttttcatcatagctgtgctgatgagcgctcaggaatcatgggctatcaaagaagaacatgtgatcatccaggccgagttctatctgaatcctgaccaatcaggcgagtttatgtttgactttgatggtgatgagattttccatgtggatatggcaaagaaggagacggtctggcggcttgaagaatttggacgatttgccagctttgaggctcaaggtgcattggccaacatagctgtggacaaagccaacctggaaatcatgacaaagcgctccaactatactccgatcaccaatgtacctccagaggtaactgtgctcacaaacagccctgtggaactgagagagcccaacgtcctcatctgtttcatagacaagttcaccccaccagtggtcaatgtcacgtggcttcgaaatggaaaacctgtcaccacaggagtgtcagagacagtcttcctgcccagggaagaccaccttttccgcaagttccactatctccccttcctgccctcaactgaggacgtttacgactgcagggtggagcactggggcttggatgagcctcttctcaagcactgggagtttgatgctccaagccctctcccagagactacagagaacgtggtgtgtgccctgggcctgactgtgggtctggtgggcatcattattgggaccatcttcatcatcaagggattgcgcaaaagcaatgcagcagaacgcagggggcctctgtaaggcacatggaggtgatggtgtttcttagagagaagatcactgaagaaacttctgctttaatggctttacaaagctggcaatattacaatccttgacctcagtgaaagcagtcatcttcagcattttccagccctatagccaccccaagtgtggatatgcctcttcgattgctccgtactctaacatctagctggcttccctgtctattgccttttcctgtatctattttcctctatttcctatcattttattatcaccatgcaatgcctctggaataaaacatacaggagtctgtctctgctatggaatgccccatggggcatctcttgtgtacttattgtttaaggtttcctcaaactgtgatttttctgaacacaataaactattttgatgatcttgggtgg

SEQ ID NO: 151214 - DNA, 1230 bp, Homo sapiens
  Payload ID: 9777
  Gene Symbol: HLA-DRB1
  Gene Name: major histocompatibility complex, class II, DR beta 1
  Uniprot ID: P01912
  ENST ID: ENST00000328980
  CDS Start-End: 107-907
agtaacttactccctataacttggaatgtgggtggaggggttcatagttctccctgagtgagacttgcctgctgctctggcccctggtcctgtcctgttctccagcatggtgtgtctgaggctccctggaggctcctgcatggcagttctgacagtgacactgatggtgctgagctccccactggctttggctggggacaccagaccacgtttcttggagtactctacgtctgagtgtcatttcttcaatgggacggagcgggtgcggtacctggacagatacttccataaccaggaggagaacgtgcgcttcgacagcgacgtgggggagttccgggcggtgacggagctggggcggcctgatgccgagtactggaacagccagaaggacctcctggagcagaagcggggccgggtggacaactactgcagacacaactacggggttgtggagagcttcacagtgcagcggcgagtccatcctaaggtgactgtgtatccttcaaagacccagcccctgcagcaccataacctcctggtctgttctgtgagtggtttctatccaggcagcattgaagtcaggtggttccggaatggccaggaagagaagactggggtggtgtccacaggcctgatccacaatggagactggaccttccagaccctggtgatgctggaaacagttcctcggagtggagaggtttacacctgccaagtggagcacccaagcgtgacaagccctctcacagtggaatggagagcacggtctgaatctgcacagagcaagatgctgagtggagtcgggggctttgtgctgggcctgctcttccttggggccgggctgttcatctacttcaggaatcagaaaggacactctggacttcagccaagaggattcctgagctgaagtgcagatgacacattcaaagaagaactttctgccccagctttgcaggatgaaaagctttccctcctggctgttattcttccacaagagagggctttctcaggacctggttgctactggttcagcaactgcagaaaatgtcctcccttgtggcttcctcagctcctgttcttggcctgaagccccacagctttgatggcagtgcctcatcttcaacttttgtgctcccctttgcctaaaccctatggcctcctgtgcatctgtactcaccctgtaccacaaacacattacattattaaatgtttctcaaagatggagttaaa

SEQ ID NO: 151215 - DNA, 1229 bp, Homo sapiens
  Payload ID: 9777
  Gene Symbol: HLA-DRB1
  Gene Name: major histocompatibility complex, class II, DR beta 1
  Uniprot ID: P04229
  ENST ID: ENST00000360004
  CDS Start-End: 107-907
agtaacttcctccctataacttggaatgtgggtggaggggttcatagttctccctgagtgagacttgcctgcttctctggcccctggtcctgtcctgttctccagcatggtgtgtctgaagctccctggaggctcctgcatgacagcgctgacagtgacactgatggtgctgagctccccactggctttgtctggggacacccgaccacgtttcctgtggcagcctaagagggagtgtcatttcttcaatgggacggagcgggtgcggttcctggacagatacttctataaccaggaggagtccgtgcgcttcgacagcgacgtgggggagttccgggcggtgacggagctggggcggcctgacgctgagtactggaacagccagaaggacatcctggagcaggcgcgggccgcggtggacacctactgcagacacaactacggggttgtggagagcttcacagtgcagcggcgagtccaacctaaggtgactgtatatccttcaaagacccagcccctgcagcaccacaacctcctggtctgctctgtgagtggtttctatccaggcagcattgaagtcaggtggttcctgaacggccaggaagagaaggctgggatggtgtccacaggcctgatccagaatggagactggaccttccagaccctggtgatgctggaaacagttcctcgaagtggagaggtttacacctgccaagtggagcacccaagcgtgacaagccctctcacagtggaatggagagcacggtctgaatctgcacagagcaagatgctgagtggagtcgggggctttgtgctgggcctgctcttccttggggccgggctgttcatctacttcaggaatcagaaaggacactctggacttcagccaacaggattcctgagctgaaatgcagatgaccacattcaaggaagaactttctgccccggctttgcaggatgaaaagctttcctgcttggcagttattcttccacaagagagggctttctcaggacctggttgctactggttcggcaactgcagaaaatgtcctcccttgtggcttcctcagctcctgcccttggcctgaagtcccagcattgatggcagcgcctcatcttcaacttttgtgctcccctttgcctaaaccgtatggcctcccgtgcatctgtattcaccctgtatgacaaacacattacattattaaatgtttctcaaagatggagttaaa

SEQ ID NO: 151216 - DNA, 1230 bp, Homo sapiens; identical to SEQ ID NO: 151214
  Payload ID: 9777
  Gene Symbol: HLA-DRB1
  Gene Name: major histocompatibility complex, class II, DR beta 1
  Uniprot ID: P01912
  ENST ID: ENST00000399450
  CDS Start-End: 107-907

SEQ ID NO: 151217 - DNA, 753 bp, Homo sapiens
  Payload ID: 9777
  Gene Symbol: HLA-DRB1
  Gene Name: major histocompatibility complex, class II, DR beta 1
  Uniprot ID: Q95IE3
  ENST ID: ENST00000428566
  CDS Start-End: 1-753
cccttttaaaactcaccagggacttcccacagaggcatgaaaaatatcagtcctgggcagggactttccacctatgtctgaaaaagaacaagtatcctgattcacgctctacattcattaagcatgctggatcttacttgaaaaggggagagttcttggcaatccacacagctatcacctgtttctttcgacaaatttcagcacgtttcttggagtactctacgtctgagtgtcatttcttcaatgggacggagcgggtgcggtacctggacagatacttccataaccaggaggagaacgtgcgcttcgacagcgacgtgggggagttccgggcggtgacggagctggggcggcctgatgccgagtactggaacagccagaaggacctcctggagcagaagcggggccgggtggacaactactgcagacacaactacggggttgtggagagcttcacagtgcagcggcgagtccatcctaaggtgactgtgtatccttcaaagacccagcccctgcagcaccataacctcctggtctgttctgtgagtggtttctatccaggcagcattgaagtcaggtggttccggaatggccaggaagagaagactggggtggtgtccacaggcctgatccacaatggagactggaccttccagaccctggtgatgctggaaacagttcctcggagtggagaggtttacacctgccaagtggagcacccaagcgtgacaagccctctcacagtggaatgga

SEQ ID NO: 151218 - DNA, 749 bp, Homo sapiens
  Payload ID: 9777
  Gene Symbol: HLA-DRB1
  Gene Name: major histocompatibility complex, class II, DR beta 1
  ENST ID: ENST00000433975
  CDS Start-End: 1-749
ctcttttaaaactcaccagggacttcccacagaggcatgaaaaatatcagtcctgggcagggactttccacctatgtctgaaaaagaacaagtatcctgattcacgctctacattcattaagcatgctggatcttacttgaaaaggggagagttcttgtcaatccacacagctatcacctgtttctttctacaaatttcagcacgtttcctgtggcagggtaagtataagtgtcatttcttcaacgggacggagcgggtgcagttcctggaaagactcttctataaccaggaggagttcgtgcgcttcgacagcgacgtgggggagtaccgggcggtgacggagctagggcggcctgtcgccgagtcctggaacagccagaaggacatcctggaggacaggcggggccaggtggacaccgtgtgcagacacaactacggggttggtgagagcttcacagtgcagcggcgagtccatcctgaggtgactgtgtatcctgccaagactcagcccctgcagcaccacaacctcctggtctgctctgtgagtggtttctatccaggcagcattgaagtcaggtggttccggaacggccaggaagagaaggctggggtggtgtccacaggcctgatccagaatggagactggaccttccagaccctggtgatgctggaaacagttcctcggagtggagaagtttacacctgccaagtggagcacccaagtgtgatgagccctctcacagtggaa

SEQ ID NO: 151219 - DNA, 1191 bp, Homo sapiens
  Payload ID: 9777
  Gene Symbol: HLA-DRB1
  Gene Name: major histocompatibility complex, class II, DR beta 1
  Uniprot ID: P13760
  ENST ID: ENST00000419393
  CDS Start-End: 64-864
atagttctccctgagtgagactcacctgctcctctggcccctggtcctgtcctgttctccagcatggtgtgtctgaagttccctggaggctcctgcatggcagctctgacagtgacactgatggtgctgagctccccactggctttggctggggacacccgaccacgtttcttggagcaggttaaacatgagtgtcatttcttcaacgggacggagcgggtgcggttcctggacagatacttctatcaccaagaggagtacgtgcgcttcgacagcgacgtgggggagtaccgggcggtgacggagctggggcggcctgatgccgagtactggaacagccagaaggacctcctggagcagaggcgggccgaggtggacacctactgcagacacaactacggggttgtggagagcttcacagtgcagcggcgagtctatcctgaggtgactgtgtatcctgcaaagacccagcccctgcagcaccacaacctcctggtctgctctgtgaatggtttctatccaggcagcattgaagtcaggtggttccggaacggccaggaagagaagactggggtggtgtccacaggcctgatccagaatggagactggaccttccagaccctggtgatgctggaaacagttcctcggagtggagaggtttacacctgccaagtggagcacccaagcctgacgagccctctcacagtggaatggagagcacggtctgaatctgcacagagcaagatgctgagtggagtcgggggcttcgtgctgggcctgctcttccttggggccgggctgttcatctacttcaggaatcagaaaggacactctggacttcagccaacaggattcctgagctgaagtgaagatgaccacattcaaggaagaaccttctgccccagctttgcaggatgaaacacttccccgcttggctctcattcttccacaagagagacctttctccggacctggttgctactggttcagcagctctgcagaaaatgtcctcccttgtggctgcctcagctcgtacctttggcctgaagtcccagcattaatggcagcccctcatcttccaagttttgtgctcccctttacctaatgcttcctgcctcccatgcatctgtactcctgctgtgccacaaacacattacattattaaatgtttctcaaacatggagttaaaaa

SEQ ID NO: 151220 - DNA, 1235 bp, Homo sapiens
  Payload ID: 9777
  Gene Symbol: HLA-DRB1
  Gene Name: major histocompatibility complex, class II, DR beta 1
  Uniprot ID: P13761
  ENST ID: ENST00000437784
  CDS Start-End: 108-908
agtaacttcttccctataatttggaatgtgggtggagaggggtcatagttctccctgagtgagactcacctgctcctctggcccctggtcctgtcctgttctccagcatggtgtgtctgaagctccctggaggctcctgcatggcagctctgacagtgacactgatggtgctgagctccccactggctttggctggggacacccaaccacgtttcctgtggcagggtaagtataagtgtcatttcttcaacgggacggagcgggtgcagttcctggaaagactcttctataaccaggaggagttcgtgcgcttcgacagcgacgtgggggagtaccgggcggtgacggagctagggcggcctgtcgccgagtcctggaacagccagaaggacatcctggaggacaggcggggccaggtggacaccgtgtgcagacacaactacggggttggtgagagcttcacagtgcagcggcgagtccatcctgaggtgactgtgtatcctgccaagactcagcccctgcagcaccacaacctcctggtctgctctgtgagtggtttctatccaggcagcattgaagtcaggtggttccggaacggccaggaagagaaggctggggtggtgtccacaggcctgatccagaatggagactggaccttccagaccctggtgatgctggaaacagttcctcggagtggagaagtttacacctgccaagtggagcacccaagtgtgatgagccctctcacagtggaatggagagcacggtctgaatctgcacagagcaagatgctgagtggagtcgggggctttgtgctgggcctgctcttccttggggccgggttgttcatctacttcaggaatcagaaaggacactctggacttcagccaacaggattcctgagctgaagtgaagatgaccacattcaaggaaaaaccttctgccccagctttgcaggatgaaacacttccccgcttggctctcattcttccacaagagagacctttctccggacctggttgctactggttcagcaactctgcagaaaatgtcctcccctgtggctgcctcagctcatgcctttggcctgaagtcccagcattgatggcagcccctcatcttccaagttttgtgctcccctttacctaacgcttcctgcctcccatgcatctgtactcctcctgtgccacaaacacattacattattaaatgtttctcaaacatggagttaaaaa

SEQ ID NO: 151221 - DNA, 751 bp, Homo sapiens
  Payload ID: 9777
  Gene Symbol: HLA-DRB1
  Gene Name: major histocompatibility complex, class II, DR beta 1
  Uniprot ID: Q95IE3
  ENST ID: ENST00000412634
  CDS Start-End: 1-751
cttttaaaactcaccagggacttcccacagaggcatgaaaaatatcagtcctgggcagggactttccacctatgtctgaaaaagaacaagtatcctgattcacgctctacattcattaagcatgctggatcttacttgaaaaggggagagttcttgtcaatccacacagctatcacctgtttctttctacaaatttcagcacgtttcttggagcaggttaaacatgagtgtcatttcttcaacgggacggagcgggtgcggttcctggacagatacttctatcaccaagaggagtacgtgcgcttcgacagcgacgtgggggagtaccgggcggtgacggagctggggcggcctgatgccgagtactggaacagccagaaggacctcctggagcagaggcgggccgaggtggacacctactgcagacacaactacggggttgtggagagcttcacagtgcagcggcgagtctatcctgaggtgactgtgtatcctgcaaagacccagcccctgcagcaccacaacctcctggtctgctctgtgaatggtttctatccaggcagcattgaagtcaggtggttccggaacggccaggaagagaagactggggtggtgtccacaggcctgatccagaatggagactggaccttccagaccctggtgatgctggaaacagttcctcggagtggagaggtttacacctgccaagtggagcacccaagcctgacgagccctctcacagtggaatgga

SEQ ID NO: 151222 - DNA, 1180 bp, Homo sapiens
  Payload ID: 9777
  Gene Symbol: HLA-DRB1
  Gene Name: major histocompatibility complex, class II, DR beta 1
  Uniprot ID: P13761
  ENST ID: ENST00000444645
  CDS Start-End: 61-861
gttctccctgagtgagactcacctgctcctctggcccctggtcctgtcctgttctccagcatggtgtgtctgaagctccctggaggctcctgcatggcagctctgacagtgacactgatggtgctgagctccccactggctttggctggggacacccaaccacgtttcctgtggcagggtaagtataagtgtcatttcttcaacgggacggagcgggtgcagttcctggaaagactcttctataaccaggaggagttcgtgcgcttcgacagcgacgtgggggagtaccgggcggtgacggagctagggcggcctgtcgccgagtcctggaacagccagaaggacatcctggaggacaggcggggccaggtggacaccgtgtgcagacacaactacggggttggtgagagcttcacagtgcagcggcgagtccatcctgaggtgactgtgtatcctgccaagactcagcccctgcagcaccacaacctcctggtctgctctgtgagtggtttctatccaggcagcattgaagtcaggtggttccggaacggccaggaagagaaggctggggtggtgtccacaggcctgatccagaatggagactggaccttccagaccctggtgatgctggaaacagttcctcggagtggagaagtttacacctgccaagtggagcacccaagtgtgatgagccctctcacagtggaatggagagcacggtctgaatctgcacagagcaagatgctgagtggagtcgggggctttgtgctgggcctgctcttccttggggccgggttgttcatctacttcaggaatcagaaaggacactctggacttcagccaacaggattcctgagctgaagtgaagatgaccacattcaaggaaaaaccttctgccccagctttgcaggatgaaacacttccccgcttggctctcattcttccacaagagagacctttctccggacctggttgctactggttcagcaactctgcagaaaatgtcctcccctgtggctgcctcagctcatgcctttggcctgaagtcccagcattgatggcagcccctcatcttccaagttttgtgctcccctttacctaacgcttcctgcctcccatgcatctgtactcctcctgtgccacaaacacattacattattaaatgtttctcaaacatgga

SEQ ID NO: 151223 - DNA, 753 bp, Homo sapiens; identical to SEQ ID NO: 151217
  Payload ID: 9777
  Gene Symbol: HLA-DRB1
  Gene Name: major histocompatibility complex, class II, DR beta 1
  Uniprot ID: Q95IE3
  ENST ID: ENST00000415796
  CDS Start-End: 1-753

SEQ ID NO: 151224 - DNA, 998 bp, Homo sapiens
  Payload ID: 9777
  Gene Symbol: HLA-DRB1
  Gene Name: major histocompatibility complex, class II, DR beta 1
  ENST ID: ENST00000553034
  CDS Start-End: 27-827
cccctggtcctgtcctgttctccagcatggtgtgtctgaagttccctggaggctcctgcatggcagctctgacagtgacactgatggtgctgagctccccactggctttggctggggacacccgaccacgtttcttggagcaggttaaacatgagtgtcatttcttcaacgggacggagcgggtgcggttcctggacagatacttctatcaccaagaggagtacgtgcgcttcgacagcgacgtgggggagtaccgggcggtgacggagctggggcggcctgatgccgagtactggaacagccagaaggacctcctggagcagaggcgggccgaggtggacacctactgcagacacaactacggggttgtggagagcttcacagtgcagcggcgagtctatcctgaggtgactgtgtatcctgcaaagacccagcccctgcagcaccacaacctcctggtctgctctgtgaatggtttctatccaggcagcattgaagtcaggtggttccggaacggccaggaagagaagactggggtggtgtccacaggcctgatccagaatggagactggaccttccagaccctggtgatgctggaaacagttcctcggagtggagaggtttacacctgccaagtggagcacccaagcctgacgagccctctcacagtggaatggagagcacggtctgaatctgcacagagcaagatgctgagtggagtcgggggcttcgtgctgggcctgctcttccttggggccgggctgttcatctacttcaggaatcagaaaggacactctggacttcagccaacaggactcctgagctgaagtgaagatgaccacattcaaggaggaaccttcttccccagctttgcaggatgaaaagctttcccacctggctgttattcttccataagagagggctttctcaggatctggttgctactggttcagcaactctgcagaaaatgtcctcccttgtggcttcctcagcccctg

SEQ ID NO: 151225 - DNA, 878 bp, Homo sapiens
  Payload ID: 9777
  Gene Symbol: HLA-DRB1
  Gene Name: major histocompatibility complex, class II, DR beta 1
  ENST ID: ENST00000548953
  CDS Start-End: 24-833
ccacttttcccttcgtctcaattatgtcttggaaaaaggctttgcggatccccggaggccttcgggcagcaactgtgaccttgatgctgtcgatgctgagcaccccagtggctgagggcagagactctcccgaggatttcgtgtaccagtttaagggcatgtgctacttcaccaacgggacagagcgcgtgcgtcttgtgagcagaagcatctataaccgagaagagatcgtgcgcttcgacagcgacgtgggggagttccgggcggtgacgctgctggggctgcctgccgccgagtactggaacagccagaaggacatcctggagaggaaacgggcggcggtggacagggtgtgcagacacaactaccagttggagctccgcacgaccttgcagcggcgaggtgagcctaaggtgactgtgtatccttcaaagacccagcccctgcagcaccataacctcctggtctgttctgtgagtggtttctatccaggcagcattgaagtcaggtggttccggaatggccaggaagagaagactggggtggtgtccacaggcctgatccacaatggagactggaccttccagaccctggtgatgctggaaacagttcctcggagtggagaggtttacacctgccaagtggagcacccaagcgtgacaagccctctcacagtggaatggagagcacggtctgaatctgcacagagcaagatgctgagtggagtcgggggctttgtgctgggcctgctcttccttggggccgggctgttcatctacttcaggaatcagaaaggacactctggacttcagccaacaggattcctgagctgaagtgcagatgaccacattcaaggaagaaccttctgccccagcttt

SEQ ID NO: 151226 - DNA, 878 bp, Homo sapiens; identical to SEQ ID NO: 151225
  Payload ID: 9777
  Gene Symbol: HLA-DRB1
  Gene Name: major histocompatibility complex, class II, DR beta 1
  ENST ID: ENST00000551970
  CDS Start-End: 24-833

SEQ ID NO: 151227 - DNA, 878 bp, Homo sapiens
  Payload ID: 9777
  Gene Symbol: HLA-DRB1
  Gene Name: major histocompatibility complex, class II, DR beta 1
  ENST ID: ENST00000547498
  CDS Start-End: 24-833
ccacttttcccttcgtctcaattatgtcttggaaaaaggctttgcggatccccggaggccttcgggcagcaactgtgaccttgatgctgtcgatgctgagcaccccagtggctgagggcagagactctcccgaggatttcgtgtaccagtttaagggcatgtgctacttcaccaacgggacagagcgcgtgcgtcttgtgagcagaagcatctataaccgagaagagatcgtgcgcttcgacagcgacgtgggggagttccgggcggtgacgctgctggggctgcctgccgccgagtactggaacagccagaaggacatcctggagaggaaacgggcggcggtggacagggtgtgcagacacaactaccagttggagctccgcacgaccttgcagcggcgaggtgagcctgaggtgactgtgtatcctgccaagactcagcccctgcagcaccacaacctcctggtctgctctgtgagtggtttctatccaggcagcattgaagtcaggtggttccggaacggccaggaagagaaggctggggtggtgtccacaggcctgatccagaatggagactggaccttccagaccctggtgatgctggaaacagttcctcggagtggagaagtttacacctgccaagtggagcacccaagtgtgatgagccctctcacagtggaatggagagcacggtctgaatctgcacagagcaagatgctgagtggagtcgggggctttgtgctgggcctgctcttccttggggccgggttgttcatctacttcaggaatcagaaaggacactctggacttcagccaacaggattcctgagctgaagtgaagatgaccacattcaaggaaaaaccttctgccccagcttt

SEQ ID NO: 151228 - DNA, 878 bp, Homo sapiens
  Payload ID: 9777
  Gene Symbol: HLA-DRB1
  Gene Name: major histocompatibility complex, class II, DR beta 1
  ENST ID: ENST00000548083
  CDS Start-End: 24-833
ctacttttcccttcgtctcaattatgtcttggaagaaggctttgcggatccctggaggccttcgggtagcaactgtgaccttgatgctggcgatgctgagcaccccggtggctgagggcagagactctcccgaggatttcgtgtaccagtttaagggcatgtgctacttcaccaacgggaccgagcgcgtgcggggtgtgaccagatacatctataaccgagaggagtacgcgcgcttcgacagcgacgtgggggtgtatcgggcggtgacgccgctggggccgcctgccgccgagtactggaacagccagaaggaagtcctggagaggacccgggcggagttggacacggtgtgcagacacaactaccagttggagctccgcacgaccttgcagcggcgaggtgagcctgaggtgactgtgtatcctgcaaagacccagcccctgcagcaccacaacctcctggtctgctctgtgaatggtttctatccaggcagcattgaagtcaggtggttccggaacggccaggaagagaagactggggtggtgtccacaggcctgatccagaatggagactggaccttccagaccctggtgatgctggaaacagttcctcggagtggagaggtttacacctgccaagtggagcacccaagcctgacgagccctctcacagtggaatggagagcacggtctgaatctgcacagagcaagatgctgagtggagtcgggggcttcgtgctgggcctgctcttccttggggccgggctgttcatctacttcaggaatcagaaaggacactctggacttcagccaacaggattcctgagctgaagtgaagatgaccacattcaaggaagaaccttctgccccagcttt

SEQ ID NO: 151229 - DNA, 1138 bp, Homo sapiens
  Payload ID: 9777
  Gene Symbol: HLA-DRB1
  Gene Name: major histocompatibility complex, class II, DR beta 1
  Uniprot ID: P01912
  ENST ID: ENST00000612249
  CDS Start-End: 38-838
tgctgctctggcccctggtcctgtcctgttctccagcatggtgtgtctgaggctccctggaggctcctgcatggcagttctgacagtgacactgatggtgctgagctccccactggctttggctggggacaccagaccacgtttcttggagtactctacgtctgagtgtcatttcttcaatgggacggagcgggtgcggtacctggacagatacttccataaccaggaggagaacgtgcgcttcgacagcgacgtgggggagttccgggcggtgacggagctggggcggcctgatgccgagtactggaacagccagaaggacctcctggagcagaagcggggccgggtggacaactactgcagacacaactacggggttgtggagagcttcacagtgcagcggcgagtccatcctaaggtgactgtgtatccttcaaagacccagcccctgcagcaccataacctcctggtctgttctgtgagtggtttctatccaggcagcattgaagtcaggtggttccggaatggccaggaagagaagactggggtggtgtccacaggcctgatccacaatggagactggaccttccagaccctggtgatgctggaaacagttcctcggagtggagaggtttacacctgccaagtggagcacccaagcgtgacaagccctctcacagtggaatggagagcacggtctgaatctgcacagagcaagatgctgagtggagtcgggggctttgtgctgggcctgctcttccttggggccgggctgttcatctacttcaggaatcagaaaggacactctggacttcagccaagaggattcctgagctgaagtgcagatgacacattcaaagaagaactttctgccccagctttgcaggatgaaaagctttccctcctggctgttattcttccacaagagagggctttctcaggacctggttgctactggttcagcaactgcagaaaatgtcctcccttgtggcttcctcagttcctgcccttggcctgaagtcccagcattgatggcagcgcctcatcttcaacttttgtgctcccctttgcctaaaccctatggcctcctgtgcatctgtactcaccctgtaccacaaacacattacattattaaatg

SEQ ID NO: 151230 - DNA, 1118 bp, Homo sapiens
  Payload ID: 9777
  Gene Symbol: HLA-DRB1
  Gene Name: major histocompatibility complex, class II, DR beta 1
  ENST ID: ENST00000614039
  CDS Start-End: 36-836
ctcctctggcccctggtcctgtcctgttctccagcatggtgtgtctgaagttccctggaggctcctgcatggcagctctgacagtgacactgatggtgctgagctccccactggctttggctggggacacccgaccacgtttcttggagcaggttaaacatgagtgtcatttcttcaacgggacggagcgggtgcggttcctggacagatacttctatcaccaagaggagtacgtgcgcttcgacagcgacgtgggggagtaccgggcggtgacggagctggggcggcctgatgccgagtactggaacagccagaaggacctcctggagcagaggcgggccgaggtggacacctactgcagacacaactacggggttgtggagagcttcacagtgcagcggcgagtctatcctgaggtgactgtgtatcctgcaaagacccagcccctgcagcaccacaacctcctggtctgctctgtgaatggtttctatccaggcagcattgaagtcaggtggttccggaacggccaggaagagaagactggggtggtgtccacaggcctgatccagaatggagactggaccttccagaccctggtgatgctggaaacagttcctcggagtggagaggtttacacctgccaagtggagcacccaagcctgacgagccctctcacagtggaatggagagcacggtctgaatctgcacagagcaagatgctgagtggagtcgggggcttcgtgctgggcctgctcttccttggggccgggctgttcatctacttcaggaatcagaaaggacactctggacttcagccaacaggattcctgagctgaagtgaagatgaccacattcaaggaagaaccttctgccccagctttgcaggatgaaaagctttcccacctggctgttattcttccataagagagggctttctcaggatctggttgctactggttcagcaactctgcagaaaatgtcctcccttgtggcttcctcagctcctgttcttggcctgaagcctcacagctttgatggcagtgcctcatcttcaacttttgtgcttccctttacctaaactgtcctgcctcccgtgcatctgtactccccttgtgcca

SEQ ID NO: 151231 - DNA, 994 bp, Homo sapiens
  Payload ID: 9777
  Gene Symbol: HLA-DRB1
  Gene Name: major histocompatibility complex, class II, DR beta 1
  ENST ID: ENST00000612698
  CDS Start-End: 27-827
cccctggtcctgtcctgttctccagcatggtgtgtctgaggctccctggaggctcctgcatggcagttctgacagtgacactgatggtgctgagctccccactggctttggctggggacaccagaccacgtttcttggagtactctacgtctgagtgtcatttcttcaatgggacggagcgggtgcggtacctggacagatacttccataaccaggaggagaacgtgcgcttcgacagcgacgtgggggagttccgggcggtgacggagctggggcggcctgatgccgagtactggaacagccagaaggacctcctggagcagaagcggggccgggtggacaactactgcagacacaactacggggttgtggagagcttcacagtgcagcggcgagtccatcctaaggtgactgtgtatccttcaaagacccagcccctgcagcaccataacctcctggtctgttctgtgagtggtttctatccaggcagcattgaagtcaggtggttccggaatggccaggaagagaagactggggtggtgtccacaggcctgatccacaatggagactggaccttccagaccctggtgatgctggaaacagttcctcggagtggagaggtttacacctgccaagtggagcacccaagcgtgacaagccctctcacagtggaatggagagcacggtctgaatctgcacagagcaagatgctgagtggagtcgggggctttgtgctgggcctgctcttccttggggccgggctgttcatctacttcaggaatcagaaaggacactctggacttcagccaacaggattcctgagctgaagtgcagatgacaatttaaggaagaatcttcttccccagctttgcaggatgaaaagctttcccgcctggctgttattcttccacgagagagggctttctcaggacctagttgctactggttcagcaactgcagaaaatgtcctcccttgtggcttcctcagttcctg

SEQ ID NO: 151232 - DNA, 920 bp, Homo sapiens
  Payload ID: 9777
  Gene Symbol: HLA-DRB1
  Gene Name: major histocompatibility complex, class II, DR beta 1
  ENST ID: ENST00000611060
  CDS Start-End: 64-864
atagttctccctgagtgagacttgcctgcttctctggcccctggtcctgtcctgttctccagcatggtgtgtctgaagctccctggaggctcctgcatgacagcgctgacagtgacactgatggtgctgagctccccactggctttgtctggggacacccgaccacgtttcctgtggcagcctaagagggagtgtcatttcttcaatgggacggagcgggtgcggttcctggacagatacttctataaccaggaggagtccgtgcgcttcgacagcgacgtgggggagttccgggcggtgacggagctggggcggcctgacgctgagtactggaacagccagaaggacatcctggagcaggcgcgggccgcggtggacacctactgcagacacaactacggggttgtggagagcttcacagtgcagcggcgaggtgagcctaaggtgactgtatatccttcaaagacccagcccctgcagcaccacaacctcctggtctgctctgtgagtggtttctatccaggcagcattgaagtcaggtggttcctgaacggccaggaagagaaggctgggatggtgtccacaggcctgatccagaatggagactggaccttccagaccctggtgatgctggaaacagttcctcgaagtggagaggtttacacctgccaagtggagcacccaagcgtgacaagccctctcacagtggaatggagagcacggtctgaatctgcacagagcaagatgctgagtggagtcgggggctttgtgctgggcctgctcttccttggggccgggctgttcatctacttcaggaatcagaaaggacactctggacttcagccaacaggactcctgagctgaagtgcacatgaccacattcaaggaagaaccttctgccacagctttgcaggatgaaa

SEQ ID NO: 151233 - DNA, 1155 bp, Homo sapiens
  Payload ID: 9777
  Gene Symbol: HLA-DRB1
  Gene Name: major histocompatibility complex, class II, DR beta 1
  ENST ID: ENST00000621864
  CDS Start-End: 46-846
gacttgcctgctgctctggcccctggtcctgtcctgttctccagcatggtgtgtctgaggctccctggaggctcctgcatggcagttctgacagtgacactgatggtgctgagctccccactggctttggctggggacaccagaccacgtttcttggagtactctacgtctgagtgtcatttcttcaatgggacggagcgggtgcggtacctggacagatacttccataaccaggaggagaacgtgcgcttcgacagcgacgtgggggagttccgggcggtgacggagctggggcggcctgatgccgagtactggaacagccagaaggacctcctggagcagaagcggggccgggtggacaactactgcagacacaactacggggttgtggagagcttcacagtgcagcggcgagtccatcctaaggtgactgtgtatccttcaaagacccagcccctgcagcaccataacctcctggtctgttctgtgagtggtttctatccaggcagcattgaagtcaggtggttccggaatggccaggaagagaagactggggtggtgtccacaggcctgatccacaatggagactggaccttccagaccctggtgatgctggaaacagttcctcggagtggagaggtttacacctgccaagtggagcacccaagcgtgacaagccctctcacagtggaatggagtgcacggtctgaatctgcacagagcaagatgctgagtggagtcgggggctttgtgctgggcctgctcttccttggggccgggctgttcatctacttcaggaatcagaaaggacactctggacttcagccaacaggattcctgagctgaagtgcagatgacaatttaaggaagaatcttcttccccagctttgcaggatgaaaagctttcccgcctggctgttattcttccacgagagagggctttctcaggacctagttgctactggttcagcaactgcagaaaatgtcctcccttgtggcttcctcagttcctgcccttggcctgaagtcccagcattgatggcagcgcctcatcttcaacttttgtgctcccctttgcctaaaccctatggcctcctgtgcatctgtactcaccctgtaccacaaacacattacattattaaatgtttctcaaag

SEQ ID NO: 151234 - DNA, 1219 bp, Homo sapiens
  Payload ID: 9777
  Gene Symbol: HLA-DRB1
  Gene Name: major histocompatibility complex, class II, DR beta 1
  Uniprot ID: P13761
  ENST ID: ENST00000617823
  CDS Start-End: 96-896
cctataatttggaatgtgggtggagaggggtcatagttctccctgagtgagactcacctgctcctctggcccctggtcctgtcctgttctccagcatggtgtgtctgaagctccctggaggctcctgcatggcagctctgacagtgacactgatggtgctgagctccccactggctttggctggggacacccaaccacgtttcctgtggcagggtaagtataagtgtcatttcttcaacgggacggagcgggtgcagttcctggaaagactcttctataaccaggaggagttcgtgcgcttcgacagcgacgtgggggagtaccgggcggtgacggagctagggcggcctgtcgccgagtcctggaacagccagaaggacatcctggaggacaggcggggccaggtggacaccgtgtgcagacacaactacggggttggtgagagcttcacagtgcagcggcgagtccatcctgaggtgactgtgtatcctgccaagactcagcccctgcagcaccacaacctcctggtctgctctgtgagtggtttctatccaggcagcattgaagtcaggtggttccggaacggccaggaagagaaggctggggtggtgtccacaggcctgatccagaatggagactggaccttccagaccctggtgatgctggaaacagttcctcggagtggagaagtttacacctgccaagtggagcacccaagtgtgatgagccctctcacagtggaatggagagcacggtctgaatctgcacagagcaagatgctgagtggagtcgggggctttgtgctgggcctgctcttccttggggccgggttgttcatctacttcaggaatcagaaaggacactctggacttcagccaacaggattcctgagctgaagtgaagatgaccacattcaaggaaaaaccttctgccccagctttgcaggatgaaaagctttcccacctggctgttattcttccataagagagggctttctcaggatctggttgctactggttcagcaactctgcagaaaatgtcctcccttgtggcttcctcagcccctgcctttggcctgaagtcctggcattgatggcagcacctcatcttcaacttttgtgctcccctttacctaacccttcctgcctcccgtgcatctgtactccccccttgtgccacaaacacattacattattaaatgtttctcacacacggagat

SEQ ID NO: 151235 - DNA, 1219 bp, Homo sapiens; identical to SEQ ID NO: 151234
  Payload ID: 9777
  Gene Symbol: HLA-DRB1
  Gene Name: major histocompatibility complex, class II, DR beta 1
  Uniprot ID: P13761
  ENST ID: ENST00000620951
  CDS Start-End: 96-896

SEQ ID NO: 151236 - DNA, 998 bp, Homo sapiens
  Payload ID: 9777
  Gene Symbol: HLA-DRB1
  Gene Name: major histocompatibility complex, class II, DR beta 1
  ENST ID: ENST00000614473
  CDS Start-End: 27-827
cccctggtcctgtcctgttctccagcatggtgtgtctgaagctccctggaggctcctgcatggcagctctgacagtgacactgatggtgctgagctccccactggctttggctggggacacccaaccacgtttcctgtggcagggtaagtataagtgtcatttcttcaacgggacggagcgggtgcagttcctggaaagactcttctataaccaggaggagttcgtgcgcttcgacagcgacgtgggggagtaccgggcggtgacggagctagggcggcctgtcgccgagtcctggaacagccagaaggacatcctggaggacaggcggggccaggtggacaccgtgtgcagacacaactacggggttggtgagagcttcacagtgcagcggcgagtccatcctgaggtgactgtgtatcctgccaagactcagcccctgcagcaccacaacctcctggtctgctctgtgagtggtttctatccaggcagcattgaagtcaggtggttccggaacggccaggaagagaaggctggggtggtgtccacaggcctgatccagaatggagactggaccttccagaccctggtgatgctggaaacagttcctcggagtggagaagtttacacctgccaagtggagcacccaagtgtgatgagccctctcacagtggaatggagagcacggtctgaatctgcacagagcaagatgctgagtggagtcgggggctttgtgctgggcctgctcttccttggggccgggttgttcatctacttcaggaatcagaaaggacactctggacttcagccaacaggactcctgagctgaagtgaagatgaccacattcaaggaggaaccttcttccccagctttgcaggatgaaaagctttcccacctggctgttattcttccataagagagggctttctcaggatctggttgctactggttcagcaactctgcagaaaatgtcctcccttgtggcttcctcagcccctg

SEQ ID NO: 151237 - DNA, 998 bp, Homo sapiens; identical to SEQ ID NO: 151236
  Payload ID: 9777
  Gene Symbol: HLA-DRB1
  Gene Name: major histocompatibility complex, class II, DR beta 1
  ENST ID: ENST00000621579
  CDS Start-End: 27-827

SEQ ID NO: 151238 - DNA, 878 bp, Homo sapiens
  Payload ID: 9777
  Gene Symbol: HLA-DRB1
  Gene Name: major histocompatibility complex, class II, DR beta 1
  ENST ID: ENST00000615274
  CDS Start-End: 24-833
ctacttttcccttcgtctcaattatgtcttggaagaaggctttgcggatccctggaggccttcgggtagcaactgtgaccttgatgctggcgatgctgagcaccccggtggctgagggcagagactctcccgaggatttcgtgtaccagtttaagggcatgtgctacttcaccaacgggacggagcgcgtgcgtcttgtgaccagatacatctataaccgagaggagtacgcacgcttcgacagcgacgtgggggtgtatcgggcggtgacgccgctggggccgcctgacgccgagtactggaacagccagaaggaagtcctggagaggacccgggcggagttggacacggtgtgcagacacaactaccagttggagctccgcacgaccttgcagcggcgaggtgagcctgaggtgactgtgtatcctgccaagactcagcccctgcagcaccacaacctcctggtctgctctgtgagtggtttctatccaggcagcattgaagtcaggtggttccggaacggccaggaagagaaggctggggtggtgtccacaggcctgatccagaatggagactggaccttccagaccctggtgatgctggaaacagttcctcggagtggagaagtttacacctgccaagtggagcacccaagtgtgatgagccctctcacagtggaatggagagcacggtctgaatctgcacagagcaagatgctgagtggagtcgggggctttgtgctgggcctgctcttccttggggccgggttgttcatctacttcaggaatcagaaaggacactctggacttcagccaacaggattcctgagctgaagtgaagatgaccacattcaaggaaaaaccttctgccccagcttt

SEQ ID NO: 151239 - DNA, 1219 bp, Homo sapiens
  Payload ID: 9777
  Gene Symbol: HLA-DRB1
  Gene Name: major histocompatibility complex, class II, DR beta 1
  ENST ID: ENST00000613978
  CDS Start-End: 96-896
cctataatttggaatgtgggtggagaggggtcatagttctccctgagtgagactcacctgctcctctggcccctggtcctgtcctgttctccagcatggtgtgtctgaagttccctggaggctcctgcatggcagctctgacagtgacactgatggtgctgagctccccactggctttggctggggacacccgaccacgtttcttggagcaggttaaacatgagtgtcatttcttcaacgggacggagcgggtgcggttcctggacagatacttctatcaccaagaggagtacgtgcgcttcgacagcgacgtgggggagtaccgggcggtgacggagctggggcggcctgatgccgagtactggaacagccagaaggacctcctggagcagaggcgggccgaggtggacacctactgcagacacaactacggggttgtggagagcttcacagtgcagcggcgagtctatcctgaggtgactgtgtatcctgcaaagacccagcccctgcagcaccacaacctcctggtctgctctgtgaatggtttctatccaggcagcattgaagtcaggtggttccggaacggccaggaagagaagactggggtggtgtccacaggcctgatccagaatggagactggaccttccagaccctggtgatgctggaaacagttcctcggagtggagaggtttacacctgccaagtggagcacccaagcctgacgagccctctcacagtggaatggagagcacggtctgaatctgcacagagcaagatgctgagtggagtcgggggcttcgtgctgggcctgctcttccttggggccgggctgttcatctacttcaggaatcagaaaggacactctggacttcagccaacaggattcctgagctgaagtgaagatgaccacattcaaggaagaaccttctgccccagctttgcaggatgaaaagctttcccacctggctgttattcttccataagagagggctttctcaggatctggttgctactggttcagcaactctgcagaaaatgtcctcccttgtggcttcctcagcccctgcctttggcctgaagtcctggcattgatggcagcacctcatcttcaacttttgtgctcccctttacctaacccttcctgcctcccgtgcatctgtactccccccttgtgccacaaacacattacattattaaatgtttctcacacacggagat

SEQ ID NO: 151240 - DNA, 1138 bp, Homo sapiens; identical to SEQ ID NO: 151229
  Payload ID: 9777
  Gene Symbol: HLA-DRB1
  Gene Name: major histocompatibility complex, class II, DR beta 1
  Uniprot ID: P01912
  ENST ID: ENST00000621986
  CDS Start-End: 38-838

SEQ ID NO: 151241 - DNA, 1155 bp, Homo sapiens
  Payload ID: 9777
  Gene Symbol: HLA-DRB1
  Gene Name: major histocompatibility complex, class II, DR beta 1
  ENST ID: ENST00000617344
  CDS Start-End: 46-846
gacttgcctgctgctctggcccctggtcctgtcctgttctccagcatggtgtgtctgaggctccctggaggctcctgcatggcagttctgacagtgacactgatggtgctgagctccccactggctttggctggggacaccagaccacgtttcttggagtactctacgtctgagtgtcatttcttcaatgggacggagcgggtgcggtacctggacagatacttccataaccaggaggagaacgtgcgcttcgacagcgacgtgggggagttccgggcggtgacggagctggggcggcctgatgccgagtactggaacagccagaaggacctcctggagcagaagcggggccgggtggacaactactgcagacacaactacggggttgtggagagcttcacagtgcagcggcgagtccatcctaaggtgactgtgtatccttcaaagacccagcccctgcagcaccataacctcctggtctgttctgtgagtggtttctatccaggcagcattgaagtcaggtggttccggaatggccaggaagagaagactggggtggtgtccacaggcctgatccacaatggagactggaccttccagaccctggtgatgctggaaacagttcctcggagtggagaggtttacacctgccaagtggagcacccaagcgtgacaagccctctcacagtggaatggagtgcacggtctgaatctgcacagagcaagatgctgagtggagtcgggggctttgtgctgggcctgctcttccttggggccgggctgttcatctacttcaggaatcagaaaggacactctggacttcagccaacaggattcctgagctgaagtgcagatgacaatttaaggaagaatcttctgccccagctttgcaggatgaaaagctttcccgcctggctgttattcttccacgagagagggctttctcaggacctagttgctactggttcagcaactgcagaaaatgtcctcccttgtggcttcctcagttcctgcccttggcctgaagtcccagcattgatggcagcgcctcatcttcaacttttgtgctcccctttgcctaaaccctatggcctcctgtgcatctgtactcaccctgtaccacaaacacattacattattaaatgtttctcaaag

SEQ ID NO: 151242 - DNA, 920 bp, Homo sapiens
  Payload ID: 9777
  Gene Symbol: HLA-DRB1
  Gene Name: major histocompatibility complex, class II, DR beta 1
  ENST ID: ENST00000615998
  CDS Start-End: 64-864
atagttctccctgagtgagactcacctgctcctctggcccctggtcctgtcctgttctccagcatggtgtgtctgaagttccctggaggctcctgcatggcagctctgacagtgacactgatggtgctgagctccccactggctttggctggggacacccgaccacgtttcttggagcaggttaaacatgagtgtcatttcttcaacgggacggagcgggtgcggttcctggacagatacttctatcaccaagaggagtacgtgcgcttcgacagcgacgtgggggagtaccgggcggtgacggagctggggcggcctgatgccgagtactggaacagccagaaggacctcctggagcagaggcgggccgaggtggacacctactgcagacacaactacggggttgtggagagcttcacagtgcagcggcgaggtgagcctgaggtgactgtgtatcctgcaaagacccagcccctgcagcaccacaacctcctggtctgctctgtgaatggtttctatccaggcagcattgaagtcaggtggttccggaacggccaggaagagaagactggggtggtgtccacaggcctgatccagaatggagactggaccttccagaccctggtgatgctggaaacagttcctcggagtggagaggtttacacctgccaagtggagcacccaagcctgacgagccctctcacagtggaatggagagcacggtctgaatctgcacagagcaagatgctgagtggagtcgggggcttcgtgctgggcctgctcttccttggggccgggctgttcatctacttcaggaatcagaaaggacactctggacttcagccaacaggactcttgagctgaagtgcagatgaccacattcaaggaagaaccttctgccccagctttgcaagatgaaa

SEQ ID NO: 151243 - DNA, 1178 bp, Homo sapiens
  Payload ID: 9778
  Gene Symbol: HLA-DRB3
  Gene Name: major histocompatibility complex, class II, DR beta 3
  Uniprot ID: P79483
  ENST ID: ENST00000307137
  CDS Start-End: 64-864
atagttctccctgagtgagacttgcctgctcctctggcccctggtcctgtcctcttctccagcatggtgtgtctgaagctccctggaggctccagcttggcagcgttgacagtgacactgatggtgctgagctcccgactggctttcgctggggacacccgaccacgtttcttggagctgcttaagtctgagtgtcatttcttcaatgggacggagcgggtgcggttcctggagagacacttccataaccaggaggagtacgcgcgcttcgacagcgacgtgggggagtaccgggcggtgagggagctggggcggcctgatgccgagtactggaacagccagaaggacctcctggagcagaagcggggccaggtggacaattactgcagacacaactacggggttggtgagagcttcacagtgcagcggcgagtccatcctcaggtgactgtgtatcctgcaaagacccagcccctgcagcaccacaacctcctggtctgctctgtgagtggtttctatccaggcagcattgaagtcaggtggttccggaacggccaggaagagaaggctggggtggtgtccacgggcctgatccagaatggagactggaccttccagaccctggtgatgctagaaacagttcctcggagtggagaggtttacacctgccaagtggagcacccaagcgtaacgagccctctcacagtggaatggagtgcacggtctgaatctgcacagagcaagatgctgagtggagtcgggggctttgtgctgggcctgctcttccttggggccgggctgttcatctacttcaggaatcagaaaggacactctggacttcagccaacaggattcctgagctgaagtgcagatgacaatttaaggaagaatcttcttccccagctttgcaggatgaaaagctttcccgcctggctgttattcttccacgagagagggctttctcaggacctagttgctactggttcagcaactgcagaaaatgtcctcccttgtggcttcctcagttcctgcccttggcctgaagtcccagcattgatggcagcgcctcatcttcaacttttgtgctcccctttgcctaaaccctatggcctcctgtgcatctgtactcaccctgtaccacaaacacattacattattaaatgtttctcaaagatgga

SEQ ID NO: 151244 - DNA, 1207 bp, Homo sapiens
  Payload ID: 9778
  Gene Symbol: HLA-DRB3
  Gene Name: major histocompatibility complex, class II, DR beta 3
  ENST ID: ENST00000383126
  CDS Start-End: 78-878
ggtggaggggggtcatagttctccctgagtgagacttgcctgctcctctggcccctggtcctgtcctcttctccagcatggtgtgtctgaagctccctggaggctccagcttggcagcgttgacagtgacactgatggtgctgagctcccgactggctttcgctggggacacccgaccacgtttcttggagctgcgtaagtctgagtgtcatttcttcaatgggacggagcgggtgcggtacctggacagatacttccataaccaggaggagttcctgcgcttcgacagcgacgtgggggagtaccgggcggtgacggagctggggcggcctgtcgccgagtcctggaacagccagaaggacctcctggagcagaagcggggccgggtggacaattactgcagacacaactacggggttggtgagagcttcacagtgcagcggcgagtccatcctcaggtgactgtgtatcctgcaaagacccagcccctgcagcaccacaacctcctggtctgctctgtgagtggtttctatccaggcagcattgaagtcaggtggttccggaacggccaggaagagaaggctggggtggtgtccacgggcctgatccagaatggagactggaccttccagaccctggtgatgctagaaacagttcctcggagtggagaggtttacacttgccaagtggagcacccaagcgtaacgagcgctctcacagtggaatggagagcacggtctgaatctgcacagagcaagatgctgagtggagtcgggggctttgtgctgggcctgctcttccttggggccgggctgttcatctacttcaggaatcagaaaggacactctggacttcagccaacaggattcctgagctgaagtgcagatgacaatttaaggaagaatcttctgccccagctttgcaggatgaaaagctttcccgcctggctgttattcttccacgagagagggctttctcaggacctagttgctactggttcagcaactgcagaaaatgtcctcccttgtggcttcctcagttcctgcccttggcctgaagtcccagcattgatggcagcgcctcatcttcaacttttgtgctcccctttgcctaaaccctatggcctcctgtgcatctgtactcaccctgtaccacaaacacattacattattaaatgtttctcaaagatggagttaaatatcatctg

SEQ ID NO: 151245 - DNA, 1839 bp, Homo sapiens
  Payload ID: 9778
  Gene Symbol: HLA-DRB3
  Gene Name: major histocompatibility complex, class II, DR beta 3
  ENST ID: ENST00000426847
  CDS Start-End: 100-900
cctccctataatttggaatgtgggtggaggggggtcatagttctccctgagtgagacttgcctgctcctctggcccctggtcctgtcctcttctccagcatggtgtgtctgaagctccctggaggctccagcttggcagcgttgacagtgacactgatggtgctgagctcccgactggctttcgctggggacacccgaccacgtttcttggagctgcttaagtctgagtgtcatttcttcaatgggacggagcgggtgcggttcctggagagacacttccataaccaggaggagtacgcgcgcttcgacagcgacgtgggggagtaccgggcggtgagggagctggggcggcctgatgccgagtactggaacagccagaaggacctcctggagcagaagcggggccaggtggacaattactgcagacacaactacggggttggtgagagcttcacagtgcagcggcgagtccatcctcaggtgactgtgtatcctgcaaagacccagcccctgcagcaccacaacctcctggtctgctctgtgagtggtttctatccaggcagcattgaagtcaggtggttccggaacggccaggaagagaaggctggggtggtgtccacgggcctgatccagaatggagactggaccttccagaccctggtgatgctagaaacagttcctcggagtggagaggtttacacctgccaagtggagcacccaagcgtaacgagccctctcacagtggaatggagtgcacggtctgaatctgcacagagcaagatgctgagtggagtcgggggctttgtgctgggcctgctcttccttggggccgggctgttcatctacttcaggaatcagaaaggacactctggacttcagccaacaggattcctgagctgaagtgcagatgacaatttaaggaagaatcttcttccccagctttgcaggatgaaaagctttcccgcctggctgttattcttccacgagagagggctttctcaggacctagttgctactggttcagcaactgcagaaaatgtcctcccttgtggcttcctcagttcctgcccttggcctgaagtcccagcattgatggcagcgcctcatcttcaacttttgtgctcccctttgcctaaaccctatggcctcctgtgcatctgtactcaccctgtaccacaaacacattacattattaaatgtttctcaaagatggagttaaatatcatctggtccatttggctccaaagacaaaaaatgaaaagaaaagaaaagaaaaagggaagattatttcctaacagaataatgattttcacgtgtgtgtcatgagtatgtgaggtaatgtatatgttaaataccatgatttagtcattccacactataggcatataacaaaacttcatgcttccacataaatatgctatacaatttttacttgtcaattaaaaaagtaatgctaacatttaaaaaggcagtgcataaaaactgagaacagactataacaactgaaacaaacttggcaaaccgatgagaaaccagccagcaagtcaatcagaactcttcaccccatctacaatattttgtatttataactgtaaattagtgtatagtgtttcactccagagacttcaataatatagtgttatcaaaggacttgtacagatttcagagaaagacacatttagaagacggagaatggagtctccattatgttctacctgagagtcagtatgaaatgtcaaatataaaagtacataattcagaggtctatttcaaagtaataatcatttgagcataatttctccactgacagagacgactgttattttattttcaatcaaa

SEQ ID NO: 151246 - DNA, 827 bp, Homo sapiens
  Payload ID: 9778
  Gene Symbol: HLA-DRB3
  Gene Name: major histocompatibility complex, class II, DR beta 3
  ENST ID: ENST00000611013
  CDS Start-End: 15-815
tcctgttctccagcatggtgtgtctgaggctccctggaggctcctgcatggcagttctgacagtgacactgatggtgctgagctccccactggctttggctggggacaccagaccacgtttcttggagctgcttaagtctgagtgtcatttcttcaatgggacggagcgggtgcggttcctggagagacacttccataaccaggaggagtacgcgcgcttcgacagcgacgtgggggagtaccgggcggtgagggagctggggcggcctgatgccgagtactggaacagccagaaggacctcctggagcagaagcggggccaggtggacaattactgcagacacaactacggggttggtgagagcttcacagtgcagcggcgagtccatcctcaggtgactgtgtatcctgcaaagacccagcccctgcagcaccacaacctcctggtctgctctgtgagtggtttctatccaggcagcattgaagtcaggtggttccggaacggccaggaagagaaggctggggtggtgtccacgggcctgatccagaatggagactggaccttccagaccctggtgatgctagaaacagttcctcggagtggagaggtttacacctgccaagtggagcacccaagcgtaacgagccctctcacagtggaatggagtgcacggtctgaatctgcacagagcaagatgctgagtggagtcgggggctttgtgctgggcctgctcttccttggggccgggctgttcatctacttcaggaatcagaaaggacactctggacttcagccaacaggattcctgagctgaagtgcagatgac

SEQ ID NO: 151247 - DNA, 801 bp, Homo sapiens
  Payload ID: 9778
  Gene Symbol: HLA-DRB3
  Gene Name: major histocompatibility complex, class II, DR beta 3
  ENST ID: ENST00000614901
  CDS Start-End: 1-801
atggtgtgtctgaggctccctggaggctcctgcatggcagttctgacagtgacactgatggtgctgagctccccactggctttggctggggacaccagaccacgtttcttggagtactctacgtctgagtgtcatttcttcaatgggacggagcgggtgcggtacctggacagatacttccataaccaggaggagaacgtgcgcttcgacagcgacgtgggggagttccgggcggtgacggagctggggcggcctgatgccgagtactggaacagccagaaggacctcctggagcagaagcggggccgggtggacaactactgcagacacaactacggggttgtggagagcttcacagtgcagcggcgagtccatcctcaggtgactgtgtatcctgcaaagacccagcccctgcagcaccacaacctcctggtctgctctgtgagtggtttctatccaggcagcattgaagtcaggtggttccggaacggccaggaagagaaggctggggtggtgtccacgggcctgatccagaatggagactggaccttccagaccctggtgatgctagaaacagttcctcggagtggagaggtttacacctgccaagtggagcacccaagcgtaacgagccctctcacagtggaatggagtgcacggtctgaatctgcacagagcaagatgctgagtggagtcgggggctttgtgctgggcctgctcttccttggggccgggctgttcatctacttcaggaatcagaaaggacactctggacttcagccaacaggattcctgagctga

SEQ ID NO: 151248 - DNA, 801 bp, Homo sapiens
  Payload ID: 9778
  Gene Symbol: HLA-DRB3
  Gene Name: major histocompatibility complex, class II, DR beta 3
  ENST ID: ENST00000618225
  CDS Start-End: 1-801
atggtgtgtctgaggctccctggaggctcctgcatggcagttctgacagtgacactgatggtgctgagctccccactggctttggctggggacaccagaccacgtttcttggagtactctacgtctgagtgtcatttcttcaatgggacggagcgggtgcggtacctggacagatacttccataaccaggaggagaacgtgcgcttcgacagcgacgtgggggagttccgggcggtgacggagctggggcggcctgatgccgagtactggaacagccagaaggacctcctggagcagaagcggggccgggtggacaactactgcagacacaactacggggttgtggagagcttcacagtgcagcggcgagtccatcctcaggtgactgtgtatcctgcaaagacccagcccctgcagcaccacaacctcctggtctgctctgtgagtggtttctatccaggcagcattgaagtcaggtggttccggaacggccaggaagagaaggctggggtggtgtccacgggcctgatccagaatggagactggaccttccagaccctggtgatgctagaaacagttcctcggagtggagaggtttacacttgccaagtggagcacccaagcgtaacgagcgctctcacagtggaatggagagcacggtctgaatctgcacagagcaagatgctgagtggagtcgggggctttgtgctgggcctgctcttccttggggccgggctgttcatctacttcaggaatcagaaaggacactctggacttcagccaacaggattcctgagctga

SEQ ID NO: 151249 - DNA, 801 bp, Homo sapiens
  Payload ID: 9778
  Gene Symbol: HLA-DRB3
  Gene Name: major histocompatibility complex, class II, DR beta 3
  ENST ID: ENST00000613743
  CDS Start-End: 1-801
atggtgtgtctgaggctccctggaggctcctgcatggcagttctgacagtgacactgatggtgctgagctccccactggctttggctggggacaccagaccacgtttcttggagtactctacgtctgagtgtcatttcttcaatgggacggagcgggtgcggtacctggacagatacttccataaccaggaggagaacgtgcgcttcgacagcgacgtgggggagtaccgggcggtgagggagctggggcggcctgatgccgagtactggaacagccagaaggacctcctggagcagaagcggggccaggtggacaattactgcagacacaactacggggttggtgagagcttcacagtgcagcggcgagtccatcctcaggtgactgtgtatcctgcaaagacccagcccctgcagcaccacaacctcctggtctgctctgtgagtggtttctatccaggcagcattgaagtcaggtggttccggaacggccaggaagagaaggctggggtggtgtccacgggcctgatccagaatggagactggaccttccagaccctggtgatgctagaaacagttcctcggagtggagaggtttacacctgccaagtggagcacccaagcgtaacgagccctctcacagtggaatggagtgcacggtctgaatctgcacagagcaagatgctgagtggagtcgggggctttgtgctgggcctgctcttccttggggccgggctgttcatctacttcaggaatcagaaaggacactctggacttcagccaacaggattcctgagctga

SEQ ID NO: 151250 - DNA, 827 bp, Homo sapiens
  Payload ID: 9778
  Gene Symbol: HLA-DRB3
  Gene Name: major histocompatibility complex, class II, DR beta 3
  ENST ID: ENST00000616879
  CDS Start-End: 15-815
tcctgttctccagcatggtgtgtctgaggctccctggaggctcctgcatggcagttctgacagtgacactgatggtgctgagctccccactggctttggctggggacaccagaccacgtttcttggagctgcgtaagtctgagtgtcatttcttcaatgggacggagcgggtgcggtacctggacagatacttccataaccaggaggagttcctgcgcttcgacagcgacgtgggggagtaccgggcggtgacggagctggggcggcctgtcgccgagtcctggaacagccagaaggacctcctggagcagaagcggggccgggtggacaattactgcagacacaactacggggttggtgagagcttcacagtgcagcggcgagtccatcctcaggtgactgtgtatcctgcaaagacccagcccctgcagcaccacaacctcctggtctgctctgtgagtggtttctatccaggcagcattgaagtcaggtggttccggaacggccaggaagagaaggctggggtggtgtccacgggcctgatccagaatggagactggaccttccagaccctggtgatgctagaaacagttcctcggagtggagaggtttacacttgccaagtggagcacccaagcgtaacgagcgctctcacagtggaatggagagcacggtctgaatctgcacagagcaagatgctgagtggagtcgggggctttgtgctgggcctgctcttccttggggccgggctgttcatctacttcaggaatcagaaaggacactctggacttcagccaacaggattcctgagctgaagtgcagatgac

SEQ ID NO: 151251 - DNA, 1172 bp, Homo sapiens
  Payload ID: 9779
  Gene Symbol: HLA-DRB4
  Gene Name: major histocompatibility complex, class II, DR beta 4
  ENST ID: ENST00000411959
  CDS Start-End: 64-864
atagttctccctgagtgagacttgcctgctgctctgaccactggtcttgtcctcttctccagcatggtgtgtctgaagctccctggaggctcctgtatggcagcgctgacagtgacattgacggtgctgagctccccactggctttggctggggacacccaaccacgtttcttggagcaggctaagtgtgagtgtcatttcctcaatgggacggagcgagtgtggaacctgatcagatacatctataaccaagaggagtacgcgcgctacaacagtgacctgggggagtaccaggcggtgacggagctggggcggcctgacgctgagtactggaacagccagaaggacctcctggagcggaggcgggccgaggtggacacctactgcagatacaactacggggttgtggagagcttcacagtgcagcggcgagtccaacctaaggtgactgtgtatccttcaaagacccagcccctgcagcaccacaacctcctggtctgctctgtgaatggtttctatccaggcagcattgaagtcaggtggttccggaacagccaggaagagaaggctggggtggtgtccacaggcctgatccagaatggagactggaccttccagaccctggtgatgctggaaacagttcctcggagtggagaggtttacacctgccaagtggagcatccaagcatgatgagccctctcacggtgcaatggagtgcacggtctgaatctgcacagagcaagatgctgagtggagtcgggggctttgtgctgggcctgctcttccttgggacagggctgttcatctacttcaggaatcagaaaggacactctggacttcagccaacaggactcttgagctgaagtgcagatgaccacattcaaggaagaaccttctgccccagctttgcaagatgaaaagctttcccacttggctcttattcttccacaagagctttgtcaggaccaggttgttactggttcagcaactctgcagaaaatgtcctcccttgtggcttccttagctcctgttcttggcctgaagcctcacagctttgatggcagtgcctcatcttcaacttttgtgcttccctttacctaaactgtcctgcctcccatgcatctgtaccccccttgtgccacacattgcattattaaatgtttctcaaaca

SEQ ID NO: 151252 - DNA, 1184 bp, Homo sapiens; identical to SEQ ID NO: 141161
  Payload ID: 9779
  Gene Symbol: HLA-DRB4
  Gene Name: major histocompatibility complex, class II, DR beta 4
  Uniprot ID: P13762
  ENST ID: ENST00000411565
  CDS Start-End: 64-864

SEQ ID NO: 151253 - DNA, 1105 bp, Homo sapiens
  Payload ID: 9779
  Gene Symbol: HLA-DRB4
  Gene Name: major histocompatibility complex, class II, DR beta 4
  ENST ID: ENST00000618380
  CDS Start-End: 36-827
ctcctctggcccctggtcctgtcctgttctccagcatggtgtgtctgaagctccctggaggctcctgcatggcagctctgacagtgacactgatggtgctgagctccccactggctttggctggggacacccaaccacgtttcttggagcaggctaagtctgagtgtcatttcttcaatgggacggagcggtacctgagatatttctataaccaagaggagtacgtgcgcttcaacagcgacatgggggagttccgggcggtgacggagctggggcggcctgacgctgagtactggaacagccagaaggacctcctggagcggaggcgggccgaggtggacacctactgcagatacaactacggggttgtggagagcttcacagtgcagcggcgagtccaacctaaggtgactgtgtatccttcaaagacccagcccctgcagcaccacaacctcctggtctgctctgtgaatggtttctatccaggcagcattgaagtcaggtggttccggaacagccaggaagagaaggctggggtggtgtccacaggcctgatccagaatggagactggaccttccagaccctggtgatgctggaaacagttcctcggagtggagaggtttacacctgccaagtggagcatccaagcatgatgagccctctcacggtgcaatggagtgcacggtctgaatctgcacagagcaagatgctgagtggagtcgggggctttgtgctgggcctgctcttccttgggacagggctgttcatctacttcaggaatcagaaaggacactctggacttcagccaacaggactcttgagctgaagtgcagatgaccacattcaaggaagaaccttctgccccagctttgcaagatgaaaagctttcccacttggctcttattcttccacaagagctttgtcaggaccaggttgttactggttcagcaactctgcagaaaatgtcctcccttgtggcttccttagctcctgttcttggcctgaagcctcacagctttgatggcagtgcctcatcttcaacttttgtgcttccctttacctaaactgtcctgcctcccatgcatctgtaccccccttgtgcca

SEQ ID NO: 151254 - DNA, 920 bp, Homo sapiens
  Payload ID: 9779
  Gene Symbol: HLA-DRB4
  Gene Name: major histocompatibility complex, class II, DR beta 4
  ENST ID: ENST00000615644
  CDS Start-End: 64-864
atagttctccctgagtgagactcacctgctcctctggcccctggtcctgtcctgttctccagcatggtgtgtctgaagctccctggaggctcctgcatggcagctctgacagtgacactgatggtgctgagctccccactggctttggctggggacacccaaccacgtttcctgtggcagggtaagtataagtgtcatttcttcaacgggacggagcgggtgcagttcctggaaagactcttctataaccaggaggagttcgtgcgcttcgacagcgacgtgggggagtaccgggcggtgacggagctggggcggcctgacgctgagtactggaacagccagaaggacctcctggagcggaggcgggccgaggtggacacctactgcagatacaactacggggttgtggagagcttcacagtgcagcggcgaggtgagcctaaggtgactgtgtatccttcaaagacccagcccctgcagcaccacaacctcctggtctgctctgtgaatggtttctatccaggcagcattgaagtcaggtggttccggaacagccaggaagagaaggctggggtggtgtccacaggcctgatccagaatggagactggaccttccagaccctggtgatgctggaaacagttcctcggagtggagaggtttacacctgccaagtggagcatccaagcatgatgagccctctcacggtgcaatggagtgcacggtctgaatctgcacagagcaagatgctgagtggagtcgggggctttgtgctgggcctgctcttccttgggacagggctgttcatctacttcaggaatcagaaaggacactctggacttcagccaacaggactcttgagctgaagtgcagatgaccacattcaaggaagaaccttctgccccagctttgcaagatgaaa

SEQ ID NO: 151255 - DNA, 1260 bp, Homo sapiens
  Payload ID: 9780
  Gene Symbol: HLA-DRB5
  Gene Name: major histocompatibility complex, class II, DR beta 5
  Uniprot ID: Q30154
  ENST ID: ENST00000374975
  CDS Start-End: 64-864
atagttctccctgagtgagacttgcctgctcctctggcccctggtcctgtcctgttctccagcatggtgtgtctgaagctccctggaggttcctacatggcaaagctgacagtgacactgatggtgctgagctccccactggctttggctggggacacccgaccacgtttcttgcagcaggataagtatgagtgtcatttcttcaacgggacggagcgggtgcggttcctgcacagagacatctataaccaagaggaggacttgcgcttcgacagcgacgtgggggagtaccgggcggtgacggagctggggcggcctgacgctgagtactggaacagccagaaggacttcctggaagacaggcgcgccgcggtggacacctactgcagacacaactacggggttggtgagagcttcacagtgcagcggcgagttgagcctaaggtgactgtgtatcctgcaaggacccagaccctgcagcaccacaacctcctggtctgctctgtgaatggtttctatccaggcagcattgaagtcaggtggttccggaacagccaggaagagaaggctggggtggtgtccacaggcctgattcagaatggagactggaccttccagaccctggtgatgctggaaacagttcctcgaagtggagaggtttacacctgccaagtggagcacccaagcgtgacgagccctctcacagtggaatggagagcacagtctgaatctgcacagagcaagatgctgagtggagtcgggggctttgtgctgggcctgctcttccttggggccgggctattcatctacttcaagaatcagaaagggcactctggacttcacccaacaggactcgtgagctgaagtgcagatgaccacattcaagggggaaccttctgccccagctttgcatgatgaaaagctttcctgcttggctcttattcttccacaagagaggactttctcaggccctggttgctaccggttcagcaactctgcagaaaatgtccatccttgtggcttcctcagctcctgcccttggcctgaagtcccagcattgatggcagtgcctcatcttcaactttagtgctcccctttacctaaccctacggcctcccatgcatctgtactccccctgtgtgccacaaatgcactacgttattaaatttttctgaagcccagagttaaaaatcatctgtccacctggctccaaagacaaaaaataaaaagaaaagaaaaagggaagattatttcctaata

SEQ ID NO: 151256 - DNA, 2043 bp, Homo sapiens
  Payload ID: 9781
  Gene Symbol: MR1
  Gene Name: major histocompatibility complex, class I-related
  Uniprot ID: Q95460
  ENST ID: ENST00000282990
  CDS Start-End: 6-755
ggactatgggggaactgatggcgttcctgttacctctcatcattgtgttaatggtgaagcacagcgattcccggacgcactctctgagatattttcgcctgggcgtttcggatcccatccatggggtccctgaatttatttcggttgggtacgtggactcgcaccctatcaccacatatgacagtgtcactcggcagaaggagccacgggccccatggatggcagagaacctcgcgcctgatcactgggagaggtacactcagctgctgaggggctggcagcagatgttcaaggtggaactgaagcgcctacagaggcactacaatcactcagggtctcacacttaccagagaatgattggctgtgagctgctggaggatggaagcaccacaggatttctgcagtatgcatatgacgggcaggatttcctgatcttcaataaagacaccctctcctggctggctgtagataatgtggctcacaccatcaagcaggcatgggaggccaatcagcatgagttgctgtatcaaaagaattggctggaagaagaatgtattgcctggctaaagagattcctggagtatgggaaagacaccctacaaagaacagaatcagaaactatccctcttgtgatgaaagctgtctctgggtccattgtccttgtcattgtgctggctggagttggtgttctagtctggagaagaaggccccgagagcaaaatggagccatctaccttccaacaccagatcgatgattgcagatccctcttttccagttctccttcctctaggagccatgttatcctctgtcccccatagagtcaagcctagtgcttgaaggtcctgacgacacccacaacatacatgagagtaatgggattgagcatttatggcagcaacagaggagccacaaaatgttctttgttctttggctccaaaaagactgtcagctttcagtctcttttgatggactgttttatcagagttgactttaaatacagcttgtctcatgacacaacgcttccctacattctatttgtcaatgatgatttgcaactagttggagattctcagagcaggaaggaatcttttcaaccagagcaggaactgtcttctgcaatgccttggacttgagcctccagcctccacttgaacaccatgtgaagggaacctcagtacttcataaaatggcctttctcattcatctttcatgggaacatttattgtacaagcgctttgaatatcatgggcaccatgactgtgaccctacaggtaggattggatcactccatgagagtagccggcaggtttctacaatggcctgggaatggactgattatttttatacattttctggcctgagagaaagccaaagtcccctgctgttcacagcaaccctgcctgggagcttggaatcttggtaatctgcccggttggatctatggaggtagtctcaccctttttgtcttttgtgggaaattaagagaaataattatcagacatatcatcacctccagtggaactacagagacctggacccagctgcactattttaatgtaaaaataacagtatggccaggtgcagtggctcacgcctgtaatcccatcactttgagcagccaaggcgggcggatcacgaggtcaggagattaagaccatcctggccaatatggtgaaaccctgtctctactaaaatacaaaaaattagctgggcatggtgttgcgtgcctgtagtcccagctacttgggaggctgagacaggggaattgcttgaacccgggaggcagagattgcagtgagccgagatcacgccactgcactccagcctggcgacagagtgagactctatctcaaaataataataataataataataataataataataataataacagtatatttggtgtcaggagagggctcaattctcatttctgcctttcctgtgctggctcatggtagctgggcatgacttgccttcctacataggttgtcttcatacatatgcactgggaatcaataaaagcccatggtgagaatgaa

SEQ ID NO: 151257 - DNA, 1154 bp, Homo sapiens
  Payload ID: 9781
  Gene Symbol: MR1
  Gene Name: major histocompatibility complex, class I-related
  Uniprot ID: Q95460
  ENST ID: ENST00000367579
  CDS Start-End: 6-896
ggactatgggggaactgatggcgttcctgttacctctcatcattgtgttaatggtgaagcacagcgattcccggacgcactctctgagatattttcgcctgggcgtttcggatcccatccatggggtccctgaatttatttcggttgggtacgtggactcgcaccctatcaccacatatgacagtgtcactcggcagaaggagccacgggccccatggatggcagagaacctcgcgcctgatcactgggagaggtacactcagctgctgaggggctggcagcagatgttcaaggtggaactgaagcgcctacagaggcactacaatcactcagataatgtggctcacaccatcaagcaggcatgggaggccaatcagcatgagttgctgtatcaaaagaattggctggaagaagaatgtattgcctggctaaagagattcctggagtatgggaaagacaccctacaaagaacagagcccccactggtcagagtaaatcgcaaagaaacttttccaggggttacagctctcttctgcaaagctcatggcttttaccccccagaaatttacatgacatggatgaaaaacggggaagaaattgtccaagaaattgattatggagacattcttcccagtggggatggaacctatcaggcgtgggcatcaattgagcttgatcctcagagcagcaacctttactcctgtcatgtggagcactgcggtgtccacatggttcttcaggtcccccaggaatcagaaactatccctcttgtgatgaaagctgtctctgggtccattgtccttgtcattgtgctggctggagttggtgttctagtctggagaagaaggccccgagagcaaaatggagccatctaccttccaacaccagatcgatgattgcagatccctcttttccagttctccttcctctaggagccatgttatcctctgtcccccatagagtcaagcctagtgcttgaaggtcctgacgacacccacaacatacatgagagtaatgggattgagcatttatggcagcaacagaggagccacaaaatgttctttgttctttggctccaaaaagactgtcagctttcagtctcttttgatggactgttttatcagagttgactttaaatacagcttgtctcatga

SEQ ID NO: 151258 - DNA, 7704 bp, Homo sapiens
  Payload ID: 9781
  Gene Symbol: MR1
  Gene Name: major histocompatibility complex, class I-related
  Uniprot ID: Q95460
  ENST ID: ENST00000367580
  CDS Start-End: 6-1031
ggactatgggggaactgatggcgttcctgttacctctcatcattgtgttaatggtgaagcacagcgattcccggacgcactctctgagatattttcgcctgggcgtttcggatcccatccatggggtccctgaatttatttcggttgggtacgtggactcgcaccctatcaccacatatgacagtgtcactcggcagaaggagccacgggccccatggatggcagagaacctcgcgcctgatcactgggagaggtacactcagctgctgaggggctggcagcagatgttcaaggtggaactgaagcgcctacagaggcactacaatcactcagggtctcacacttaccagagaatgattggctgtgagctgctggaggatggaagcaccacaggatttctgcagtatgcatatgacgggcaggatttcctgatcttcaataaagacaccctctcctggctggctgtagataatgtggctcacaccatcaagcaggcatgggaggccaatcagcatgagttgctgtatcaaaagaattggctggaagaagaatgtattgcctggctaaagagattcctggagtatgggaaagacaccctacaaagaacagagcccccactggtcagagtaaatcgcaaagaaacttttccaggggttacagctctcttctgcaaagctcatggcttttaccccccagaaatttacatgacatggatgaaaaacggggaagaaattgtccaagaaattgattatggagacattcttcccagtggggatggaacctatcaggcgtgggcatcaattgagcttgatcctcagagcagcaacctttactcctgtcatgtggagcactgcggtgtccacatggttcttcaggtcccccaggaatcagaaactatccctcttgtgatgaaagctgtctctgggtccattgtccttgtcattgtgctggctggagttggtgttctagtctggagaagaaggccccgagagcaaaatggagccatctaccttccaacaccagatcgatgattgcagatccctcttttccagttctccttcctctaggagccatgttatcctctgtcccccatagagtcaagcctagtgcttgaaggtcctgacgacacccacaacatacatgagagtaatgggattgagcatttatggcagcaacagaggagccacaaaatgttctttgttctttggctccaaaaagactgtcagctttcagtctcttttgatggactgttttatcagagttgactttaaatacagcttgtctcatgacacaacgcttccctacattctatttgtcaatgatgatttgcaactagttggagattctcagagcaggaaggaatcttttcaaccagagcaggaactgtcttctgcaatgccttggacttgagcctccagcctccacttgaacaccatgtgaagggaacctcagtacttcataaaatggcctttctcattcatctttcatgggaacatttattgtacaagcgctttgaatatcatgggcaccatgactgtgaccctacaggtaggattggatcactccatgagagtagccggcaggtttctacaatggcctgggaatggactgattatttttatacattttctggcctgagagaaagccaaagtcccctgctgttcacagcaaccctgcctgggagcttggaatcttggtaatctgcccggttggatctatggaggtagtctcaccctttttgtcttttgtgggaaattaagagaaataattatcagacatatcatcacctccagtggaactacagagacctggacccagctgcactattttaatgtaaaaataacagtatggccaggtgcagtggctcacgcctgtaatcccatcactttgagcagccaaggcgggcggatcacgaggtcaggagattaagaccatcctggccaatatggtgaaaccctgtctctactaaaatacaaaaaattagctgggcatggtgttgcgtgcctgtagtcccagctacttgggaggctgagacaggggaattgcttgaacccgggaggcagagattgcagtgagccgagatcacgccactgcactccagcctggcgacagagtgagactctatctcaaaataataataataataataataataataataataataataacagtatatttggtgtcaggagagggctcaattctcatttctgcctttcctgtgctggctcatggtagctgggcatgacttgccttcctacataggttgtcttcatacatatgcactgggaatcaataaaagcccatggtgagaatgaacatccccttaatgttccttactatccccaacccctgaggcctcacctactgccctgccatgtggagctacttgccctggggctgccagtcacacattcctcggtcctacttctctgaccccgtttgactctgcacctgagccctaatgcttacttcagtgacctgaactttgacaagtggcttttgtcctgcacctcaggtttgacctctgctctcccttgaccttgactgtgacatttgacctttggctttaatcattacagcctcagataaaggtaccttcagcccgggcacagtggctcacgcctgtaatcctagcactttgggaggctgaggcaggcggattccctgagctcaggagttcaagaccagcctgggcaacacggtgaaaccctgtctctactaaaatacaaataattagctgggcatggtggcatgtgcctatagtcccagctacttgggaggctaaggcaggagaatcacttgaatctataaggcagaggtggcagtgagccgagatcacaccactgcactccagcctgggcaacggagcaagactctgtctccaaaaaaaaaaagaaagataccctcagtgtgccaggcctctaagagctcacctgccaggcttcctccttgctccactgtcccatgtaattccatatatgaagctaccactgtacatctctcttttccggtgcctgttgagttgcatagaagcacagttgtgtttattttgtttttagggttgccatgggcaatttccgtgccacttttaagcagtgttgcactgtgaagagaatgtaggcaagtttatttctggaatggtttcttcttacaatcagaatagttaggatgtaatatatttttgggtgggcatttaaagtgaaaaggtacatatttacatagacacaggtgataatgtatctatgtaaatgccttttgattctgcaactgcaggatactctcatcaaagacacagataaaaagcctctgtgtttccaaggccttgccctacacctaacacataatatgtccaaatggatgaagaggaggcaaggacaaggatgtgatgacaaaacattctgttatgcacttgtagcatttatgtttcttcctgggggattttataatactaaaagaatcataatataaagagatgattaaaaaaaaaatactgccgggcacggtggctcatgcctgtaatcccagcattttgggaggccgaggtgggcagatcacctgaggtcgggagttcgagaccagcctgaccaacatggagaaaccctgtctctaccaaacatacaaaattagccggggatggtggcgcatgcctataatcccagctactcgggagtctgaggcagaagaaccgcttgaacccgggaggcagaggttgtggtgagccgagatcgcgccatcgcactctagcctgggcaacaagagtgaaactccatctcaaaaaaataaaaataaaataagtaagtaatacctaaaattctgcaaccttcattttactatagatggttgaagattatattacttcttaattgttttagccttgttattgcttcattacttcatggttgttgagtacagatgctcagtaatcataacctatgaaatatttgacaccatgatctaaacattaaaaacaaataactgtgctattgccacagctatgttttggctttgaattttctttactgaatattttggatcaagaacactagatgagaaacctgttcaactctgttcttttttttttttttaactccactgtatttattacctgtttttgttttttttgtttgtttgtttttgatgtgcatatagaccaagatgtggtaaatttaaatggcagatgtttttgatgtggtacatttaagggagagaaagcagtttaaagagcagggtgaaaaatccaacaagactccatcgagagtttctgagctctcccatcaggggccagtcctcctttcctctctcctcttactcccatgatttccaagttgtgatcctttccttatttctgaggaatgacttggtttctcctcttctttttttggcctgagagaagatgtttttgcacttgtagctatgaggaacagattgtccactagggaggccagctgatcattttctgccagagtcacacagagcagtcacaccttattttgaaaaccactgtctggggtctttgtcctcacatatgcaggtctagtgtccccacaaagtgatcagatggatatataaagtggagtgccaatgtattaatttactgtgagaaacacaattgctaagtgggtcagatatctgtctcagctggtcagtacaccttccagcaggaaaatctacataagaacaactaaatcacaatctgtagagtgcttgatgaccccagaattggtgcaaggggacacattcttgcttgttagcacctgctctctggagtttgctattttctcacacacagtgtattagttcacagaatgttctccaaggaggacagggggctttgcccatagccatgtgctgtgggcagcagagctaggaagaagcacaggcatctcccagcccaggtgtttcccacttaactgcattgcccttttcatcttttttttttccccaatagcttcaggacattcagtacattgtgctttttagaggttgatgattccactgcctgagctgccttcacctctctttctttggaaattgccatctttgagcattgtatgtctctgtaacatctctgcatctccttttcactctggcctccctttctccattgtccttctagcttctggttgccccaaaccccacagactgtgtaacaaaacccaaaacctattggtttaaaacaatacccattttattttctttcatagtttctatgggtcaggaatttggatatggcttgggtaagcagttctggcttctcatggagttggaggcaagtggtggctggaacagaaatggggcagccaggggtggtggccaggcatcagctacatctcctccatgtagtctcaggaactctccatgtaatctctctgtgtgggttgggcttcctcacaacatggtggcctcagggcagtcactgcttacatggcagctagcttccctcagagtgagtatcccaagagatcacagtcaaagtgcatagcatttatataatctaatcttggaagtcacaaaatgtcattcttgtgatactctcattggtgaagaagtcataaaatcctgctcaggttcaaaaagagggtgtatagaacccaacactcaataggaagattgtcagagttacattgtaagaagagcatgtagttgggagatatcattgtggccattttgggaaagatgcaacatgtcacaatgtcatgttctccatcgtctccccgttccaccttgtactggtttccaagggtagtcgtttaaaagtaccacaaaaactgggtggcttggaacaacagaaatttattgtttcacagttctggaggccagaagttcaaaatgaagtgttggcagaaacatgctgcctctaaagggactgggaaaggatctgttccaggcttccctcctatcttctggttgttccttgccttctggctgcgtaactctagtcttcatttggtgttctccctgcatgcatggctttgtgtccaaatttccttttttcatgaggccatcagtcatactggattagggacccactctactactgcaggatgacctcaccttcccaaattacatctgcaacaaccctatttccaaagaaggccacattctgaggtactgggggttataacttcaacatgaattttttggaggaaacaattcaactcctaacacatctctacccaacctctgtaggttccctcaatccaccaaaattttttggctccactggattatctagcagttaggaaaccaagatcattaaatgaattcaccgcaactacagtgagactgactaccttagcttacctctgtgaaaggagttaagccaaaggaatctgtggaattttggagagtttgggagcatttgggggcaggaggcaaatgttcttcctttaaatcacaacacttagttctcttccatttataagactcacccctccatcccaacccctgcaccacaggacaaggaagtgttcttggtcttcaactttcatccctgatggtgaaagcagttgctcctgacctatttgcccaccagcttctcctctggagcctgaggcttctgatgcctgcctggctggttctcagtaagaaggtcaagttcaaccagaggggagatgctgatgcctttcagtacttaaatatgagttcagaccctggggcctggacataagatttggggtcccctggatataagatttctgaaaacactcagactgtggagacccctgctgagggagaagccccaaactgtggcttcaggggaatgcaccaaggctctcattgaggccaccttctccaacaagctcccctcctgcttccccatggctggcatggctgaggaaaaaggacactgagcacagcccgtgcatgagcggcttgccatgcaacaggataaaacccataatgccactcagcaagccttggttgtaaatctagtttgattacatttgtaatcaaatgatggccatttgttctgtttctggtttgtgaaccaactgaagacataagcagggcctcagctaacccacaaatagcacatgtgtgcaaactggaaaaatgaacccttcttctgggaggacgccagcccaggccaggtcacccggcttggccagcagaacacagagtagattttggtcccgtttgttccccagtggggtatctatccttgtgcagggcacaagcctacatggtggctctggtcatatcattagaaaatagacagaaatgggctgcacaccagaatgaatgaattgaattgaaagggaggagtgatggtggaaaaaaaaacaagtcaattcatttagactggtagaaccagaaccactgtgtagtacatccaaacggttaaaattccctggaagatgttacataatcctatcatggtgtttatttatggaaatctattttaaaaattttatgtaatactgcacagtctgtttgcatgatgccttgtacgtagtagcaactcagtaaatactttttgaatgaactagtatagtattttaattagctagtcttcatgtactggtacaaaagaacagtgtcatcttacagctgaagtcatagaggggaaatatcccactcaagatcatataacattccaggtactcaggatgaatggtttgaggactggtctgaattcttcaaaggtttcagctgtattaacattctccatctaataaactttatcttgtcattgca

SEQ ID NO: 151259 - DNA, 7479 bp, Homo sapiens
  Payload ID: 9781
  Gene Symbol: MR1
  Gene Name: major histocompatibility complex, class I-related
  Uniprot ID: Q95460
  ENST ID: ENST00000434571
  CDS Start-End: 162-806
agaatcttctgtaggcctttctcttgccttcttttattcacaactgatgacactgcatatcttcccctgttcttattgggagaaggccttgtgtgtcaccaagaggttctcagaagggacctgtcagtttttggttaaaagaacccggaaagagaaggactatgggggaactgatggcgttcctgttacctctcatcattgtgttaatggtgaagcacagcgattcccggacgcactctctgagatattttcgcctgggcgtttcggatcccatccatggggtccctgaatttatttcggttgggtacgtggactcgcaccctatcaccacatatgacagtgtcactcggcagaaggagccacgggccccatggatggcagagaacctcgcgcctgatcactgggagaggtacactcagctgctgaggggctggcagcagatgttcaaggtggaactgaagcgcctacagaggcactacaatcactcagggtctcacacttaccagagaatgattggctgtgagctgctggaggatggaagcaccacaggatttctgcagtatgcatatgacgggcaggatttcctgatcttcaataaagacaccctctcctggctggctgtagataatgtggctcacaccatcaagcaggcatgggaggccaatcagcatgagttgctgtatcaaaagaattggctggaagaagaatgtattgcctggctaaagagattcctggagtatgggaaagacaccctacaaagaacagagcaaaatggagccatctaccttccaacaccagatcgatgattgcagatccctcttttccagttctccttcctctaggagccatgttatcctctgtcccccatagagtcaagcctagtgcttgaaggtcctgacgacacccacaacatacatgagagtaatgggattgagcatttatggcagcaacagaggagccacaaaatgttctttgttctttggctccaaaaagactgtcagctttcagtctcttttgatggactgttttatcagagttgactttaaatacagcttgtctcatgacacaacgcttccctacattctatttgtcaatgatgatttgcaactagttggagattctcagagcaggaaggaatcttttcaaccagagcaggaactgtcttctgcaatgccttggacttgagcctccagcctccacttgaacaccatgtgaagggaacctcagtacttcataaaatggcctttctcattcatctttcatgggaacatttattgtacaagcgctttgaatatcatgggcaccatgactgtgaccctacaggtaggattggatcactccatgagagtagccggcaggtttctacaatggcctgggaatggactgattatttttatacattttctggcctgagagaaagccaaagtcccctgctgttcacagcaaccctgcctgggagcttggaatcttggtaatctgcccggttggatctatggaggtagtctcaccctttttgtcttttgtgggaaattaagagaaataattatcagacatatcatcacctccagtggaactacagagacctggacccagctgcactattttaatgtaaaaataacagtatggccaggtgcagtggctcacgcctgtaatcccatcactttgagcagccaaggcgggcggatcacgaggtcaggagattaagaccatcctggccaatatggtgaaaccctgtctctactaaaatacaaaaaattagctgggcatggtgttgcgtgcctgtagtcccagctacttgggaggctgagacaggggaattgcttgaacccgggaggcagagattgcagtgagccgagatcacgccactgcactccagcctggcgacagagtgagactctatctcaaaataataataataataataataataataataataataataacagtatatttggtgtcaggagagggctcaattctcatttctgcctttcctgtgctggctcatggtagctgggcatgacttgccttcctacataggttgtcttcatacatatgcactgggaatcaataaaagcccatggtgagaatgaacatccccttaatgttccttactatccccaacccctgaggcctcacctactgccctgccatgtggagctacttgccctggggctgccagtcacacattcctcggtcctacttctctgaccccgtttgactctgcacctgagccctaatgcttacttcagtgacctgaactttgacaagtggcttttgtcctgcacctcaggtttgacctctgctctcccttgaccttgactgtgacatttgacctttggctttaatcattacagcctcagataaaggtaccttcagcccgggcacagtggctcacgcctgtaatcctagcactttgggaggctgaggcaggcggattccctgagctcaggagttcaagaccagcctgggcaacacggtgaaaccctgtctctactaaaatacaaataattagctgggcatggtggcatgtgcctatagtcccagctacttgggaggctaaggcaggagaatcacttgaatctataaggcagaggtggcagtgagccgagatcacaccactgcactccagcctgggcaacggagcaagactctgtctccaaaaaaaaaaagaaagataccctcagtgtgccaggcctctaagagctcacctgccaggcttcctccttgctccactgtcccatgtaattccatatatgaagctaccactgtacatctctcttttccggtgcctgttgagttgcatagaagcacagttgtgtttattttgtttttagggttgccatgggcaatttccgtgccacttttaagcagtgttgcactgtgaagagaatgtaggcaagtttatttctggaatggtttcttcttacaatcagaatagttaggatgtaatatatttttgggtgggcatttaaagtgaaaaggtacatatttacatagacacaggtgataatgtatctatgtaaatgccttttgattctgcaactgcaggatactctcatcaaagacacagataaaaagcctctgtgtttccaaggccttgccctacacctaacacataatatgtccaaatggatgaagaggaggcaaggacaaggatgtgatgacaaaacattctgttatgcacttgtagcatttatgtttcttcctgggggattttataatactaaaagaatcataatataaagagatgattaaaaaaaaaatactgccgggcacggtggctcatgcctgtaatcccagcattttgggaggccgaggtgggcagatcacctgaggtcgggagttcgagaccagcctgaccaacatggagaaaccctgtctctaccaaacatacaaaattagccggggatggtggcgcatgcctataatcccagctactcgggagtctgaggcagaagaaccgcttgaacccgggaggcagaggttgtggtgagccgagatcgcgccatcgcactctagcctgggcaacaagagtgaaactccatctcaaaaaaataaaaataaaataagtaagtaatacctaaaattctgcaaccttcattttactatagatggttgaagattatattacttcttaattgttttagccttgttattgcttcattacttcatggttgttgagtacagatgctcagtaatcataacctatgaaatatttgacaccatgatctaaacattaaaaacaaataactgtgctattgccacagctatgttttggctttgaattttctttactgaatattttggatcaagaacactagatgagaaacctgttcaactctgttcttttttttttttttaactccactgtatttattacctgtttttgttttttttgtttgtttgtttttgatgtgcatatagaccaagatgtggtaaatttaaatggcagatgtttttgatgtggtacatttaagggagagaaagcagtttaaagagcagggtgaaaaatccaacaagactccatcgagagtttctgagctctcccatcaggggccagtcctcctttcctctctcctcttactcccatgatttccaagttgtgatcctttccttatttctgaggaatgacttggtttctcctcttctttttttggcctgagagaagatgtttttgcacttgtagctatgaggaacagattgtccactagggaggccagctgatcattttctgccagagtcacacagagcagtcacaccttattttgaaaaccactgtctggggtctttgtcctcacatatgcaggtctagtgtccccacaaagtgatcagatggatatataaagtggagtgccaatgtattaatttactgtgagaaacacaattgctaagtgggtcagatatctgtctcagctggtcagtacaccttccagcaggaaaatctacataagaacaactaaatcacaatctgtagagtgcttgatgaccccagaattggtgcaaggggacacattcttgcttgttagcacctgctctctggagtttgctattttctcacacacagtgtattagttcacagaatgttctccaaggaggacagggggctttgcccatagccatgtgctgtgggcagcagagctaggaagaagcacaggcatctcccagcccaggtgtttcccacttaactgcattgcccttttcatcttttttttttccccaatagcttcaggacattcagtacattgtgctttttagaggttgatgattccactgcctgagctgccttcacctctctttctttggaaattgccatctttgagcattgtatgtctctgtaacatctctgcatctccttttcactctggcctccctttctccattgtccttctagcttctggttgccccaaaccccacagactgtgtaacaaaacccaaaacctattggtttaaaacaatacccattttattttctttcatagtttctatgggtcaggaatttggatatggcttgggtaagcagttctggcttctcatggagttggaggcaagtggtggctggaacagaaatggggcagccaggggtggtggccaggcatcagctacatctcctccatgtagtctcaggaactctccatgtaatctctctgtgtgggttgggcttcctcacaacatggtggcctcagggcagtcactgcttacatggcagctagcttccctcagagtgagtatcccaagagatcacagtcaaagtgcatagcatttatataatctaatcttggaagtcacaaaatgtcattcttgtgatactctcattggtgaagaagtcataaaatcctgctcaggttcaaaaagagggtgtatagaacccaacactcaataggaagattgtcagagttacattgtaagaagagcatgtagttgggagatatcattgtggccattttgggaaagatgcaacatgtcacaatgtcatgttctccatcgtctccccgttccaccttgtactggtttccaagggtagtcgtttaaaagtaccacaaaaactgggtggcttggaacaacagaaatttattgtttcacagttctggaggccagaagttcaaaatgaagtgttggcagaaacatgctgcctctaaagggactgggaaaggatctgttccaggcttccctcctatcttctggttgttccttgccttctggctgcgtaactctagtcttcatttggtgttctccctgcatgcatggctttgtgtccaaatttccttttttcatgaggccatcagtcatactggattagggacccactctactactgcaggatgacctcaccttcccaaattacatctgcaacaaccctatttccaaagaaggccacattctgaggtactgggggttataacttcaacatgaattttttggaggaaacaattcaactcctaacacatctctacccaacctctgtaggttccctcaatccaccaaaattttttggctccactggattatctagcagttaggaaaccaagatcattaaatgaattcaccgcaactacagtgagactgactaccttagcttacctctgtgaaaggagttaagccaaaggaatctgtggaattttggagagtttgggagcatttgggggcaggaggcaaatgttcttcctttaaatcacaacacttagttctcttccatttataagactcacccctccatcccaacccctgcaccacaggacaaggaagtgttcttggtcttcaactttcatccctgatggtgaaagcagttgctcctgacctatttgcccaccagcttctcctctggagcctgaggcttctgatgcctgcctggctggttctcagtaagaaggtcaagttcaaccagaggggagatgctgatgcctttcagtacttaaatatgagttcagaccctggggcctggacataagatttggggtcccctggatataagatttctgaaaacactcagactgtggagacccctgctgagggagaagccccaaactgtggcttcaggggaatgcaccaaggctctcattgaggccaccttctccaacaagctcccctcctgcttccccatggctggcatggctgaggaaaaaggacactgagcacagcccgtgcatgagcggcttgccatgcaacaggataaaacccataatgccactcagcaagccttggttgtaaatctagtttgattacatttgtaatcaaatgatggccatttgttctgtttctggtttgtgaaccaactgaagacataagcagggcctcagctaacccacaaatagcacatgtgtgcaaactggaaaaatgaacccttcttctgggaggacgccagcccaggccaggtcacccggcttggccagcagaacacagagtagattttggtcccgtttgttccccagtggggtatctatccttgtgcagggcacaagcctacatggtggctctggtcatatcattagaaaatagacagaaatgggctgcacaccagaatgaatgaattgaattgaaagggaggagtgatggtggaaaaaaaaacaagtcaattcatttagactggtagaaccagaaccactgtgtagtacatccaaacggttaaaattccctggaagatgttacataatcctatcatggtgtttatttatggaaatctattttaaaaattttatgtaatactgcacagtctgtttgcatgatgccttgtacgtagtagcaactcagtaaatactttttgaatgaactagtatagtattttaattagctagtcttcatgtactggtacaaaagaacagtgtcatcttacagctgaagtcatagaggggaaatatcccactcaagatcatataacattccaggtactcaggatgaatggtttgaggactggtctgaattcttcaaaggtttcagctgtattaacattctccatctaataaactttatcttgtcattgca

SEQ ID NO: 151260 - DNA, 7860 bp, Homo sapiens
  Payload ID: 9781
  Gene Symbol: MR1
  Gene Name: major histocompatibility complex, class I-related
  Uniprot ID: Q95460
  ENST ID: ENST00000614012
  CDS Start-End: 162-1187
agaatcttctgtaggcctttctcttgccttcttttattcacaactgatgacactgcatatcttcccctgttcttattgggagaaggccttgtgtgtcaccaagaggttctcagaagggacctgtcagtttttggttaaaagaacccggaaagagaaggactatgggggaactgatggcgttcctgttacctctcatcattgtgttaatggtgaagcacagcgattcccggacgcactctctgagatattttcgcctgggcgtttcggatcccatccatggggtccctgaatttatttcggttgggtacgtggactcgcaccctatcaccacatatgacagtgtcactcggcagaaggagccacgggccccatggatggcagagaacctcgcgcctgatcactgggagaggtacactcagctgctgaggggctggcagcagatgttcaaggtggaactgaagcgcctacagaggcactacaatcactcagggtctcacacttaccagagaatgattggctgtgagctgctggaggatggaagcaccacaggatttctgcagtatgcatatgacgggcaggatttcctgatcttcaataaagacaccctctcctggctggctgtagataatgtggctcacaccatcaagcaggcatgggaggccaatcagcatgagttgctgtatcaaaagaattggctggaagaagaatgtattgcctggctaaagagattcctggagtatgggaaagacaccctacaaagaacagagcccccactggtcagagtaaatcgcaaagaaacttttccaggggttacagctctcttctgcaaagctcatggcttttaccccccagaaatttacatgacatggatgaaaaacggggaagaaattgtccaagaaattgattatggagacattcttcccagtggggatggaacctatcaggcgtgggcatcaattgagcttgatcctcagagcagcaacctttactcctgtcatgtggagcactgcggtgtccacatggttcttcaggtcccccaggaatcagaaactatccctcttgtgatgaaagctgtctctgggtccattgtccttgtcattgtgctggctggagttggtgttctagtctggagaagaaggccccgagagcaaaatggagccatctaccttccaacaccagatcgatgattgcagatccctcttttccagttctccttcctctaggagccatgttatcctctgtcccccatagagtcaagcctagtgcttgaaggtcctgacgacacccacaacatacatgagagtaatgggattgagcatttatggcagcaacagaggagccacaaaatgttctttgttctttggctccaaaaagactgtcagctttcagtctcttttgatggactgttttatcagagttgactttaaatacagcttgtctcatgacacaacgcttccctacattctatttgtcaatgatgatttgcaactagttggagattctcagagcaggaaggaatcttttcaaccagagcaggaactgtcttctgcaatgccttggacttgagcctccagcctccacttgaacaccatgtgaagggaacctcagtacttcataaaatggcctttctcattcatctttcatgggaacatttattgtacaagcgctttgaatatcatgggcaccatgactgtgaccctacaggtaggattggatcactccatgagagtagccggcaggtttctacaatggcctgggaatggactgattatttttatacattttctggcctgagagaaagccaaagtcccctgctgttcacagcaaccctgcctgggagcttggaatcttggtaatctgcccggttggatctatggaggtagtctcaccctttttgtcttttgtgggaaattaagagaaataattatcagacatatcatcacctccagtggaactacagagacctggacccagctgcactattttaatgtaaaaataacagtatggccaggtgcagtggctcacgcctgtaatcccatcactttgagcagccaaggcgggcggatcacgaggtcaggagattaagaccatcctggccaatatggtgaaaccctgtctctactaaaatacaaaaaattagctgggcatggtgttgcgtgcctgtagtcccagctacttgggaggctgagacaggggaattgcttgaacccgggaggcagagattgcagtgagccgagatcacgccactgcactccagcctggcgacagagtgagactctatctcaaaataataataataataataataataataataataataataacagtatatttggtgtcaggagagggctcaattctcatttctgcctttcctgtgctggctcatggtagctgggcatgacttgccttcctacataggttgtcttcatacatatgcactgggaatcaataaaagcccatggtgagaatgaacatccccttaatgttccttactatccccaacccctgaggcctcacctactgccctgccatgtggagctacttgccctggggctgccagtcacacattcctcggtcctacttctctgaccccgtttgactctgcacctgagccctaatgcttacttcagtgacctgaactttgacaagtggcttttgtcctgcacctcaggtttgacctctgctctcccttgaccttgactgtgacatttgacctttggctttaatcattacagcctcagataaaggtaccttcagcccgggcacagtggctcacgcctgtaatcctagcactttgggaggctgaggcaggcggattccctgagctcaggagttcaagaccagcctgggcaacacggtgaaaccctgtctctactaaaatacaaataattagctgggcatggtggcatgtgcctatagtcccagctacttgggaggctaaggcaggagaatcacttgaatctataaggcagaggtggcagtgagccgagatcacaccactgcactccagcctgggcaacggagcaagactctgtctccaaaaaaaaaaagaaagataccctcagtgtgccaggcctctaagagctcacctgccaggcttcctccttgctccactgtcccatgtaattccatatatgaagctaccactgtacatctctcttttccggtgcctgttgagttgcatagaagcacagttgtgtttattttgtttttagggttgccatgggcaatttccgtgccacttttaagcagtgttgcactgtgaagagaatgtaggcaagtttatttctggaatggtttcttcttacaatcagaatagttaggatgtaatatatttttgggtgggcatttaaagtgaaaaggtacatatttacatagacacaggtgataatgtatctatgtaaatgccttttgattctgcaactgcaggatactctcatcaaagacacagataaaaagcctctgtgtttccaaggccttgccctacacctaacacataatatgtccaaatggatgaagaggaggcaaggacaaggatgtgatgacaaaacattctgttatgcacttgtagcatttatgtttcttcctgggggattttataatactaaaagaatcataatataaagagatgattaaaaaaaaaatactgccgggcacggtggctcatgcctgtaatcccagcattttgggaggccgaggtgggcagatcacctgaggtcgggagttcgagaccagcctgaccaacatggagaaaccctgtctctaccaaacatacaaaattagccggggatggtggcgcatgcctataatcccagctactcgggagtctgaggcagaagaaccgcttgaacccgggaggcagaggttgtggtgagccgagatcgcgccatcgcactctagcctgggcaacaagagtgaaactccatctcaaaaaaataaaaataaaataagtaagtaatacctaaaattctgcaaccttcattttactatagatggttgaagattatattacttcttaattgttttagccttgttattgcttcattacttcatggttgttgagtacagatgctcagtaatcataacctatgaaatatttgacaccatgatctaaacattaaaaacaaataactgtgctattgccacagctatgttttggctttgaattttctttactgaatattttggatcaagaacactagatgagaaacctgttcaactctgttcttttttttttttttaactccactgtatttattacctgtttttgttttttttgtttgtttgtttttgatgtgcatatagaccaagatgtggtaaatttaaatggcagatgtttttgatgtggtacatttaagggagagaaagcagtttaaagagcagggtgaaaaatccaacaagactccatcgagagtttctgagctctcccatcaggggccagtcctcctttcctctctcctcttactcccatgatttccaagttgtgatcctttccttatttctgaggaatgacttggtttctcctcttctttttttggcctgagagaagatgtttttgcacttgtagctatgaggaacagattgtccactagggaggccagctgatcattttctgccagagtcacacagagcagtcacaccttattttgaaaaccactgtctggggtctttgtcctcacatatgcaggtctagtgtccccacaaagtgatcagatggatatataaagtggagtgccaatgtattaatttactgtgagaaacacaattgctaagtgggtcagatatctgtctcagctggtcagtacaccttccagcaggaaaatctacataagaacaactaaatcacaatctgtagagtgcttgatgaccccagaattggtgcaaggggacacattcttgcttgttagcacctgctctctggagtttgctattttctcacacacagtgtattagttcacagaatgttctccaaggaggacagggggctttgcccatagccatgtgctgtgggcagcagagctaggaagaagcacaggcatctcccagcccaggtgtttcccacttaactgcattgcccttttcatcttttttttttccccaatagcttcaggacattcagtacattgtgctttttagaggttgatgattccactgcctgagctgccttcacctctctttctttggaaattgccatctttgagcattgtatgtctctgtaacatctctgcatctccttttcactctggcctccctttctccattgtccttctagcttctggttgccccaaaccccacagactgtgtaacaaaacccaaaacctattggtttaaaacaatacccattttattttctttcatagtttctatgggtcaggaatttggatatggcttgggtaagcagttctggcttctcatggagttggaggcaagtggtggctggaacagaaatggggcagccaggggtggtggccaggcatcagctacatctcctccatgtagtctcaggaactctccatgtaatctctctgtgtgggttgggcttcctcacaacatggtggcctcagggcagtcactgcttacatggcagctagcttccctcagagtgagtatcccaagagatcacagtcaaagtgcatagcatttatataatctaatcttggaagtcacaaaatgtcattcttgtgatactctcattggtgaagaagtcataaaatcctgctcaggttcaaaaagagggtgtatagaacccaacactcaataggaagattgtcagagttacattgtaagaagagcatgtagttgggagatatcattgtggccattttgggaaagatgcaacatgtcacaatgtcatgttctccatcgtctccccgttccaccttgtactggtttccaagggtagtcgtttaaaagtaccacaaaaactgggtggcttggaacaacagaaatttattgtttcacagttctggaggccagaagttcaaaatgaagtgttggcagaaacatgctgcctctaaagggactgggaaaggatctgttccaggcttccctcctatcttctggttgttccttgccttctggctgcgtaactctagtcttcatttggtgttctccctgcatgcatggctttgtgtccaaatttccttttttcatgaggccatcagtcatactggattagggacccactctactactgcaggatgacctcaccttcccaaattacatctgcaacaaccctatttccaaagaaggccacattctgaggtactgggggttataacttcaacatgaattttttggaggaaacaattcaactcctaacacatctctacccaacctctgtaggttccctcaatccaccaaaattttttggctccactggattatctagcagttaggaaaccaagatcattaaatgaattcaccgcaactacagtgagactgactaccttagcttacctctgtgaaaggagttaagccaaaggaatctgtggaattttggagagtttgggagcatttgggggcaggaggcaaatgttcttcctttaaatcacaacacttagttctcttccatttataagactcacccctccatcccaacccctgcaccacaggacaaggaagtgttcttggtcttcaactttcatccctgatggtgaaagcagttgctcctgacctatttgcccaccagcttctcctctggagcctgaggcttctgatgcctgcctggctggttctcagtaagaaggtcaagttcaaccagaggggagatgctgatgcctttcagtacttaaatatgagttcagaccctggggcctggacataagatttggggtcccctggatataagatttctgaaaacactcagactgtggagacccctgctgagggagaagccccaaactgtggcttcaggggaatgcaccaaggctctcattgaggccaccttctccaacaagctcccctcctgcttccccatggctggcatggctgaggaaaaaggacactgagcacagcccgtgcatgagcggcttgccatgcaacaggataaaacccataatgccactcagcaagccttggttgtaaatctagtttgattacatttgtaatcaaatgatggccatttgttctgtttctggtttgtgaaccaactgaagacataagcagggcctcagctaacccacaaatagcacatgtgtgcaaactggaaaaatgaacccttcttctgggaggacgccagcccaggccaggtcacccggcttggccagcagaacacagagtagattttggtcccgtttgttccccagtggggtatctatccttgtgcagggcacaagcctacatggtggctctggtcatatcattagaaaatagacagaaatgggctgcacaccagaatgaatgaattgaattgaaagggaggagtgatggtggaaaaaaaaacaagtcaattcatttagactggtagaaccagaaccactgtgtagtacatccaaacggttaaaattccctggaagatgttacataatcctatcatggtgtttatttatggaaatctattttaaaaattttatgtaatactgcacagtctgtttgcatgatgccttgtacgtagtagcaactcagtaaatactttttgaatgaactagtatagtattttaattagctagtcttcatgtactggtacaaaagaacagtgtcatcttacagctgaagtcatagaggggaaatatcccactcaagatcatataacattccaggtactcaggatgaatggtttgaggactggtctgaattcttcaaaggtttcagctgtattaacattctccatctaataaactttatcttgtcattgca

SEQ ID NO: 151261 - DNA, 7584 bp, Homo sapiens
  Payload ID: 9781
  Gene Symbol: MR1
  Gene Name: major histocompatibility complex, class I-related
  Uniprot ID: Q95460
  ENST ID: ENST00000617803
  CDS Start-End: 162-911
agaatcttctgtaggcctttctcttgccttcttttattcacaactgatgacactgcatatcttcccctgttcttattgggagaaggccttgtgtgtcaccaagaggttctcagaagggacctgtcagtttttggttaaaagaacccggaaagagaaggactatgggggaactgatggcgttcctgttacctctcatcattgtgttaatggtgaagcacagcgattcccggacgcactctctgagatattttcgcctgggcgtttcggatcccatccatggggtccctgaatttatttcggttgggtacgtggactcgcaccctatcaccacatatgacagtgtcactcggcagaaggagccacgggccccatggatggcagagaacctcgcgcctgatcactgggagaggtacactcagctgctgaggggctggcagcagatgttcaaggtggaactgaagcgcctacagaggcactacaatcactcagggtctcacacttaccagagaatgattggctgtgagctgctggaggatggaagcaccacaggatttctgcagtatgcatatgacgggcaggatttcctgatcttcaataaagacaccctctcctggctggctgtagataatgtggctcacaccatcaagcaggcatgggaggccaatcagcatgagttgctgtatcaaaagaattggctggaagaagaatgtattgcctggctaaagagattcctggagtatgggaaagacaccctacaaagaacagaatcagaaactatccctcttgtgatgaaagctgtctctgggtccattgtccttgtcattgtgctggctggagttggtgttctagtctggagaagaaggccccgagagcaaaatggagccatctaccttccaacaccagatcgatgattgcagatccctcttttccagttctccttcctctaggagccatgttatcctctgtcccccatagagtcaagcctagtgcttgaaggtcctgacgacacccacaacatacatgagagtaatgggattgagcatttatggcagcaacagaggagccacaaaatgttctttgttctttggctccaaaaagactgtcagctttcagtctcttttgatggactgttttatcagagttgactttaaatacagcttgtctcatgacacaacgcttccctacattctatttgtcaatgatgatttgcaactagttggagattctcagagcaggaaggaatcttttcaaccagagcaggaactgtcttctgcaatgccttggacttgagcctccagcctccacttgaacaccatgtgaagggaacctcagtacttcataaaatggcctttctcattcatctttcatgggaacatttattgtacaagcgctttgaatatcatgggcaccatgactgtgaccctacaggtaggattggatcactccatgagagtagccggcaggtttctacaatggcctgggaatggactgattatttttatacattttctggcctgagagaaagccaaagtcccctgctgttcacagcaaccctgcctgggagcttggaatcttggtaatctgcccggttggatctatggaggtagtctcaccctttttgtcttttgtgggaaattaagagaaataattatcagacatatcatcacctccagtggaactacagagacctggacccagctgcactattttaatgtaaaaataacagtatggccaggtgcagtggctcacgcctgtaatcccatcactttgagcagccaaggcgggcggatcacgaggtcaggagattaagaccatcctggccaatatggtgaaaccctgtctctactaaaatacaaaaaattagctgggcatggtgttgcgtgcctgtagtcccagctacttgggaggctgagacaggggaattgcttgaacccgggaggcagagattgcagtgagccgagatcacgccactgcactccagcctggcgacagagtgagactctatctcaaaataataataataataataataataataataataataataacagtatatttggtgtcaggagagggctcaattctcatttctgcctttcctgtgctggctcatggtagctgggcatgacttgccttcctacataggttgtcttcatacatatgcactgggaatcaataaaagcccatggtgagaatgaacatccccttaatgttccttactatccccaacccctgaggcctcacctactgccctgccatgtggagctacttgccctggggctgccagtcacacattcctcggtcctacttctctgaccccgtttgactctgcacctgagccctaatgcttacttcagtgacctgaactttgacaagtggcttttgtcctgcacctcaggtttgacctctgctctcccttgaccttgactgtgacatttgacctttggctttaatcattacagcctcagataaaggtaccttcagcccgggcacagtggctcacgcctgtaatcctagcactttgggaggctgaggcaggcggattccctgagctcaggagttcaagaccagcctgggcaacacggtgaaaccctgtctctactaaaatacaaataattagctgggcatggtggcatgtgcctatagtcccagctacttgggaggctaaggcaggagaatcacttgaatctataaggcagaggtggcagtgagccgagatcacaccactgcactccagcctgggcaacggagcaagactctgtctccaaaaaaaaaaagaaagataccctcagtgtgccaggcctctaagagctcacctgccaggcttcctccttgctccactgtcccatgtaattccatatatgaagctaccactgtacatctctcttttccggtgcctgttgagttgcatagaagcacagttgtgtttattttgtttttagggttgccatgggcaatttccgtgccacttttaagcagtgttgcactgtgaagagaatgtaggcaagtttatttctggaatggtttcttcttacaatcagaatagttaggatgtaatatatttttgggtgggcatttaaagtgaaaaggtacatatttacatagacacaggtgataatgtatctatgtaaatgccttttgattctgcaactgcaggatactctcatcaaagacacagataaaaagcctctgtgtttccaaggccttgccctacacctaacacataatatgtccaaatggatgaagaggaggcaaggacaaggatgtgatgacaaaacattctgttatgcacttgtagcatttatgtttcttcctgggggattttataatactaaaagaatcataatataaagagatgattaaaaaaaaaatactgccgggcacggtggctcatgcctgtaatcccagcattttgggaggccgaggtgggcagatcacctgaggtcgggagttcgagaccagcctgaccaacatggagaaaccctgtctctaccaaacatacaaaattagccggggatggtggcgcatgcctataatcccagctactcgggagtctgaggcagaagaaccgcttgaacccgggaggcagaggttgtggtgagccgagatcgcgccatcgcactctagcctgggcaacaagagtgaaactccatctcaaaaaaataaaaataaaataagtaagtaatacctaaaattctgcaaccttcattttactatagatggttgaagattatattacttcttaattgttttagccttgttattgcttcattacttcatggttgttgagtacagatgctcagtaatcataacctatgaaatatttgacaccatgatctaaacattaaaaacaaataactgtgctattgccacagctatgttttggctttgaattttctttactgaatattttggatcaagaacactagatgagaaacctgttcaactctgttcttttttttttttttaactccactgtatttattacctgtttttgttttttttgtttgtttgtttttgatgtgcatatagaccaagatgtggtaaatttaaatggcagatgtttttgatgtggtacatttaagggagagaaagcagtttaaagagcagggtgaaaaatccaacaagactccatcgagagtttctgagctctcccatcaggggccagtcctcctttcctctctcctcttactcccatgatttccaagttgtgatcctttccttatttctgaggaatgacttggtttctcctcttctttttttggcctgagagaagatgtttttgcacttgtagctatgaggaacagattgtccactagggaggccagctgatcattttctgccagagtcacacagagcagtcacaccttattttgaaaaccactgtctggggtctttgtcctcacatatgcaggtctagtgtccccacaaagtgatcagatggatatataaagtggagtgccaatgtattaatttactgtgagaaacacaattgctaagtgggtcagatatctgtctcagctggtcagtacaccttccagcaggaaaatctacataagaacaactaaatcacaatctgtagagtgcttgatgaccccagaattggtgcaaggggacacattcttgcttgttagcacctgctctctggagtttgctattttctcacacacagtgtattagttcacagaatgttctccaaggaggacagggggctttgcccatagccatgtgctgtgggcagcagagctaggaagaagcacaggcatctcccagcccaggtgtttcccacttaactgcattgcccttttcatcttttttttttccccaatagcttcaggacattcagtacattgtgctttttagaggttgatgattccactgcctgagctgccttcacctctctttctttggaaattgccatctttgagcattgtatgtctctgtaacatctctgcatctccttttcactctggcctccctttctccattgtccttctagcttctggttgccccaaaccccacagactgtgtaacaaaacccaaaacctattggtttaaaacaatacccattttattttctttcatagtttctatgggtcaggaatttggatatggcttgggtaagcagttctggcttctcatggagttggaggcaagtggtggctggaacagaaatggggcagccaggggtggtggccaggcatcagctacatctcctccatgtagtctcaggaactctccatgtaatctctctgtgtgggttgggcttcctcacaacatggtggcctcagggcagtcactgcttacatggcagctagcttccctcagagtgagtatcccaagagatcacagtcaaagtgcatagcatttatataatctaatcttggaagtcacaaaatgtcattcttgtgatactctcattggtgaagaagtcataaaatcctgctcaggttcaaaaagagggtgtatagaacccaacactcaataggaagattgtcagagttacattgtaagaagagcatgtagttgggagatatcattgtggccattttgggaaagatgcaacatgtcacaatgtcatgttctccatcgtctccccgttccaccttgtactggtttccaagggtagtcgtttaaaagtaccacaaaaactgggtggcttggaacaacagaaatttattgtttcacagttctggaggccagaagttcaaaatgaagtgttggcagaaacatgctgcctctaaagggactgggaaaggatctgttccaggcttccctcctatcttctggttgttccttgccttctggctgcgtaactctagtcttcatttggtgttctccctgcatgcatggctttgtgtccaaatttccttttttcatgaggccatcagtcatactggattagggacccactctactactgcaggatgacctcaccttcccaaattacatctgcaacaaccctatttccaaagaaggccacattctgaggtactgggggttataacttcaacatgaattttttggaggaaacaattcaactcctaacacatctctacccaacctctgtaggttccctcaatccaccaaaattttttggctccactggattatctagcagttaggaaaccaagatcattaaatgaattcaccgcaactacagtgagactgactaccttagcttacctctgtgaaaggagttaagccaaaggaatctgtggaattttggagagtttgggagcatttgggggcaggaggcaaatgttcttcctttaaatcacaacacttagttctcttccatttataagactcacccctccatcccaacccctgcaccacaggacaaggaagtgttcttggtcttcaactttcatccctgatggtgaaagcagttgctcctgacctatttgcccaccagcttctcctctggagcctgaggcttctgatgcctgcctggctggttctcagtaagaaggtcaagttcaaccagaggggagatgctgatgcctttcagtacttaaatatgagttcagaccctggggcctggacataagatttggggtcccctggatataagatttctgaaaacactcagactgtggagacccctgctgagggagaagccccaaactgtggcttcaggggaatgcaccaaggctctcattgaggccaccttctccaacaagctcccctcctgcttccccatggctggcatggctgaggaaaaaggacactgagcacagcccgtgcatgagcggcttgccatgcaacaggataaaacccataatgccactcagcaagccttggttgtaaatctagtttgattacatttgtaatcaaatgatggccatttgttctgtttctggtttgtgaaccaactgaagacataagcagggcctcagctaacccacaaatagcacatgtgtgcaaactggaaaaatgaacccttcttctgggaggacgccagcccaggccaggtcacccggcttggccagcagaacacagagtagattttggtcccgtttgttccccagtggggtatctatccttgtgcagggcacaagcctacatggtggctctggtcatatcattagaaaatagacagaaatgggctgcacaccagaatgaatgaattgaattgaaagggaggagtgatggtggaaaaaaaaacaagtcaattcatttagactggtagaaccagaaccactgtgtagtacatccaaacggttaaaattccctggaagatgttacataatcctatcatggtgtttatttatggaaatctattttaaaaattttatgtaatactgcacagtctgtttgcatgatgccttgtacgtagtagcaactcagtaaatactttttgaatgaactagtatagtattttaattagctagtcttcatgtactggtacaaaagaacagtgtcatcttacagctgaagtcatagaggggaaatatcccactcaagatcatataacattccaggtactcaggatgaatggtttgaggactggtctgaattcttcaaaggtttcagctgtattaacattctccatctaataaactttatcttgtcattgca

SEQ ID NO: 151262 - DNA, 2599 bp, Homo sapiens
  Payload ID: 9782
  Gene Symbol: MIP
  Gene Name: major intrinsic protein of lens fiber
  Uniprot ID: P30301
  ENST ID: ENST00000257979
  CDS Start-End: 30-821
acccaggcactgtgaccatcccccctgccatgtgggaactgcgatcagcctccttttggagggccatattcgctgagttctttgccaccctcttctatgtcttctttgggctggggtcctcactgcgctgggctcctggacccctgcatgttctgcaggtggctatggcatttggcttggccctggctacactggtgcagtctgtgggccacatcagtggagcccacgtcaatcctgcagtcacttttgctttccttgtgggctcccagatgtccctgctccgtgccttctgctatatggcagcccagctcctgggagctgtggctggggccgctgtgctgtatagcgttaccccacctgctgtccgaggaaacctagcactcaacacgttgcaccctgcggtgagcgtgggccaggcaaccacagtggagatcttcctgacgctccagttcgtgctctgcatctttgccacatacgacgagaggcggaatggccaactgggctccgtggccctggccgttggcttctcccttgccctggggcacctctttgggatgtattatactggtgcaggcatgaatcctgcccgctcctttgctcctgccattctcactgggaacttcactaaccactgggtgtactgggtaggcccaatcattggagggggtctgggcagcctcctgtacgactttcttctcttcccccggctcaagagtatttctgagagactgtctgtcctcaagggtgccaaacccgatgtctccaatggacaaccagaggtcacaggggaacctgttgaactgaacacccaggccctgtagaagctccagctgaatagagggagtagaaagcttctgagtttacgtggaggggtttagccagcccctagatgaagaaagagactgtggggagggtcatgtacttctttattttttaacttatgtatgtggttgttttttttttttttttccttttgctgtgtgaaatctttcaagttgcattcatgagctggttggtgcaaacttcccttcctccccatcccaccacccttcgccgtgtgtgctgattgtgcatatgaatgtgagtgtggctgtgtctgagttttggggcatgagagctaaggaagcaaaaagaggtgccatcctatacctcccttcctcgacccagtatggtgagtactgggtaaccgacaccttaagtttctggcctttaccctgctgccagtcaagtgtgtggctcttgatttctgagggaacagagaagcagggagttactcctcacacgaggcagatggagagaagtggaggagacaaggcttccaagggttaggagaagggactcaagggaggtgggtggtgaaaacggagtattagccccagatcaggatgtaggtgtaccgaagaattggggggaagttaatgggaatatatagcctacttatcttagggatgcttgccccagggacttgggtggggaagtagctctgagaaaagtgaacactaggatttagctgttctgtaaagccacgtaaacctgtctacatccgctggctggttgtgttcattctgacataatggatctcttcagaggtcctgggccaaagagcttccaacctaaatagagcttgggcaagcctagaatctagaaaaattaagcagcttaactggtcagcctgacatccactgttgtggctgcctggcagatggtatttaagccccacaattgttccctaaggccaacacaggaaatctgattcctggagcaaataaatgaacgggtggtagtagggggcatgaggggagaggctttgactctgttctaatttatttagagcaaatcaaaacactcctcaaatggcatctttctgcttttatcactagttccgtgttttttttcttgttttgtgtctgtgtattttcatttctctgtcatccgtcctttcatcttgaagcaaatctcttctaactccctcataccccagaaattgattccttctattcaaatgcttaataattcaggagattattatttgtttgagccctatcttctttttttttttgagagggggtcttactatgttgaccaggttggagtgcaatggatattcacaggcacgatcatcgcacactacagtctagaaatcctgggctcaagcgatcttcctgcttcagcctccccagtagctgggattacagggggccagagcacagccctattttcttttccttttggcaagatcatctcagcagaggccagaagagaccctcaactgttcaatgaatatttacggttgctttcttccttttatgagcctcttgcatactttgaaagctttaaatttatacctataatacaacggacatcccctatcccagaagaccattcctccctgtacttcagctctttacttcctcccaaataaaacctaacttttctaactaactatttaagacttggaatagtccgcttgactagaagaaggggaagaatgtttgtaaattcacctctaatcggactttgattctactataattcagcagaaaattcatagcgctgtgatttttagatcgacctcacataaaacagtccctgcactcgc

SEQ ID NO: 151263 - DNA, 2870 bp, Homo sapiens
  Payload ID: 9783
  Gene Symbol: MVP
  Gene Name: major vault protein
  Uniprot ID: Q14764
  ENST ID: ENST00000357402
  CDS Start-End: 139-2820
acccctgggcttggcctgccttgccctgccgggaagtgatccccaaggcagggtgagagttccccatctgaggcgtttgttgcagctacctgcacttctagattcatcttcttgtgagccctgggcttaggagtcaccatggcaactgaagagttcatcatccgcatccccccataccactatatccatgtgctggaccagaacagcaacgtgtcccgtgtggaggtcgggccaaagacctacatccggcaggacaatgagagggtactgtttgcccccatgcgcatggtgaccgtccccccacgtcactactgcacagtggccaaccctgtgtctcgggatgcccagggcttggtgctgtttgatgtcacagggcaagttcggcttcgccacgctgacctcgagatccggctggcccaggaccccttccccctgtacccaggggaggtgctggaaaaggacatcacacccctgcaggtggttctgcccaacactgccctccatctaaaggcgctgcttgattttgaggataaagatggagacaaggtggtggcaggagatgagtggcttttcgagggacctggcacgtacatcccccggaaggaagtggaggtcgtggagatcattcaggccaccatcatcaggcagaaccaggctctgcggctcagggcccgcaaggagtgctgggaccgggacggcaaggagagggtgacaggggaagaatggctggtcaccacagtaggggcgtacctcccagcggtgtttgaggaggttctggatttggtggacgccgtcatccttacggaaaagacagccctgcacctccgggctcggcggaacttccgggacttcaggggagtgtcccgccgcactggggaggagtggctggtaacagtgcaggacacagaggcccacgtgccagatgtccacgaggaggtgctgggggttgtgcccatcaccaccctgggcccccacaactactgcgtgattctcgaccctgtcggaccggatggcaagaatcagctggggcagaagcgcgtggtcaagggagagaagtcttttttcctccagccaggagagcagctggaacaaggcatccaggatgtgtatgtgctgtcggagcagcaggggctgctgctgagggccctgcagcccctggaggagggggaggatgaggagaaggtctcacaccaggctggggaccactggctcatccgcggacccctggagtatgtgccatctgccaaagtggaggtggtggaggagcgccaggccatccctctagacgagaacgagggcatctatgtgcaggatgtcaagaccggaaaggtgcgcgctgtgattggaagcacctacatgctgacccaggacgaagtcctgtgggagaaagagctgcctcccggggtggaggagctgctgaacaaggggcaggaccctctggcagacaggggtgagaaggacacagctaagagcctccagcccttggcgccccggaacaagacccgtgtggtcagctaccgcgtgccccacaacgctgcggtgcaggtgtacgactaccgagagaagcgagcccgcgtggtcttcgggcctgagctggtgtcgctgggtcctgaggagcagttcacagtgttgtccctctcagctgggcggcccaagcgtccccatgcccgccgtgcgctctgcctgctgctggggcctgacttcttcacagacgtcatcaccatcgaaacggcggatcatgccaggctgcaactgcagctggcctacaactggcactttgaggtgaatgaccggaaggacccccaagagacggccaagctcttttcagtgccagactttgtaggtgatgcctgcaaagccatcgcatcccgggtgcggggggccgtggcctctgtcactttcgatgacttccataagaactcagcccgcatcattcgcactgctgtctttggctttgagacctcggaagcgaagggccccgatggcatggccctgcccaggccccgggaccaggctgtcttcccccaaaacgggctggtggtcagcagtgtggacgtgcagtcagtggagcctgtggatcagaggacccgggacgccctgcaacgcagcgtccagctggccatcgagatcaccaccaactcccaggaagcggcggccaagcatgaggctcagagactggagcaggaagcccgcggccggcttgagcggcagaagatcctggaccagtcagaagccgagaaagctcgcaaggaacttttggagctggaggctctgagcatggccgtggagagcaccgggactgccaaggcggaggccgagtcccgtgcggaggcagcccggattgagggagaagggtccgtgctgcaggccaagctaaaagcacaggccttggccattgaaacggaggctgagctccagagggtccagaaggtccgagagctggaactggtctatgcccgggcccagctggagctggaggtgagcaaggctcagcagctggctgaggtggaggtgaagaagttcaagcagatgacagaggccataggccccagcaccatcagggaccttgctgtggctgggcctgagatgcaggtaaaactgctccagtccctgggcctgaaatcaaccctcatcaccgatggctccactcccatcaacctcttcaacacagcctttgggctgctggggatggggcccgagggtcagcccctgggcagaagggtggccagtgggcccagccctggggaggggatatccccccagtctgctcaggcccctcaagctcctggagacaaccacgtggtgcctgtactgcgctaactcctgattaatacaatggaagtttctgggcatttacaatttcaacactt

SEQ ID NO: 151264 - DNA, 2925 bp, Homo sapiens
  Payload ID: 9783
  Gene Symbol: MVP
  Gene Name: major vault protein
  Uniprot ID: Q14764
  ENST ID: ENST00000395353
  CDS Start-End: 194-2875
aactcccaagccccacccctgggcttggcctgccttgccctgccgggaagtgatccccaaggcagggtgagagttccccatctgaggcgtttgttgcagctacctgcacttctagatgctccccaggttcatcctgtgtcgtctcccccacctaccagtcatcttcttgtgagccctgggcttaggagtcaccatggcaactgaagagttcatcatccgcatccccccataccactatatccatgtgctggaccagaacagcaacgtgtcccgtgtggaggtcgggccaaagacctacatccggcaggacaatgagagggtactgtttgcccccatgcgcatggtgaccgtccccccacgtcactactgcacagtggccaaccctgtgtctcgggatgcccagggcttggtgctgtttgatgtcacagggcaagttcggcttcgccacgctgacctcgagatccggctggcccaggaccccttccccctgtacccaggggaggtgctggaaaaggacatcacacccctgcaggtggttctgcccaacactgccctccatctaaaggcgctgcttgattttgaggataaagatggagacaaggtggtggcaggagatgagtggcttttcgagggacctggcacgtacatcccccggaaggaagtggaggtcgtggagatcattcaggccaccatcatcaggcagaaccaggctctgcggctcagggcccgcaaggagtgctgggaccgggacggcaaggagagggtgacaggggaagaatggctggtcaccacagtaggggcgtacctcccagcggtgtttgaggaggttctggatttggtggacgccgtcatccttacggaaaagacagccctgcacctccgggctcggcggaacttccgggacttcaggggagtgtcccgccgcactggggaggagtggctggtaacagtgcaggacacagaggcccacgtgccagatgtccacgaggaggtgctgggggttgtgcccatcaccaccctgggcccccacaactactgcgtgattctcgaccctgtcggaccggatggcaagaatcagctggggcagaagcgcgtggtcaagggagagaagtcttttttcctccagccaggagagcagctggaacaaggcatccaggatgtgtatgtgctgtcggagcagcaggggctgctgctgagggccctgcagcccctggaggagggggaggatgaggagaaggtctcacaccaggctggggaccactggctcatccgcggacccctggagtatgtgccatctgccaaagtggaggtggtggaggagcgccaggccatccctctagacgagaacgagggcatctatgtgcaggatgtcaagaccggaaaggtgcgcgctgtgattggaagcacctacatgctgacccaggacgaagtcctgtgggagaaagagctgcctcccggggtggaggagctgctgaacaaggggcaggaccctctggcagacaggggtgagaaggacacagctaagagcctccagcccttggcgccccggaacaagacccgtgtggtcagctaccgcgtgccccacaacgctgcggtgcaggtgtacgactaccgagagaagcgagcccgcgtggtcttcgggcctgagctggtgtcgctgggtcctgaggagcagttcacagtgttgtccctctcagctgggcggcccaagcgtccccatgcccgccgtgcgctctgcctgctgctggggcctgacttcttcacagacgtcatcaccatcgaaacggcggatcatgccaggctgcaactgcagctggcctacaactggcactttgaggtgaatgaccggaaggacccccaagagacggccaagctcttttcagtgccagactttgtaggtgatgcctgcaaagccatcgcatcccgggtgcggggggccgtggcctctgtcactttcgatgacttccataagaactcagcccgcatcattcgcactgctgtctttggctttgagacctcggaagcgaagggccccgatggcatggccctgcccaggccccgggaccaggctgtcttcccccaaaacgggctggtggtcagcagtgtggacgtgcagtcagtggagcctgtggatcagaggacccgggacgccctgcaacgcagcgtccagctggccatcgagatcaccaccaactcccaggaagcggcggccaagcatgaggctcagagactggagcaggaagcccgcggccggcttgagcggcagaagatcctggaccagtcagaagccgagaaagctcgcaaggaacttttggagctggaggctctgagcatggccgtggagagcaccgggactgccaaggcggaggccgagtcccgtgcggaggcagcccggattgagggagaagggtccgtgctgcaggccaagctaaaagcacaggccttggccattgaaacggaggctgagctccagagggtccagaaggtccgagagctggaactggtctatgcccgggcccagctggagctggaggtgagcaaggctcagcagctggctgaggtggaggtgaagaagttcaagcagatgacagaggccataggccccagcaccatcagggaccttgctgtggctgggcctgagatgcaggtaaaactgctccagtccctgggcctgaaatcaaccctcatcaccgatggctccactcccatcaacctcttcaacacagcctttgggctgctggggatggggcccgagggtcagcccctgggcagaagggtggccagtgggcccagccctggggaggggatatccccccagtctgctcaggcccctcaagctcctggagacaaccacgtggtgcctgtactgcgctaactcctgattaatacaatggaagtttctgggcatttacaatttcaacactt

SEQ ID NO: 151265 - DNA, 211 bp, Homo sapiens
  Payload ID: 9783
  Gene Symbol: MVP
  Gene Name: major vault protein
  ENST ID: ENST00000565164
  CDS Start-End: 86-211
gagcactgggtcggccctcgggtgtggctgtttgggcaggacagccctcttcatcttcttgtgagccctgggcttaggagtcaccatggcaactgaagagttcatcatccgcatccccccataccactatatccatgtgctggaccagaacagcaacgtgtcccgtgtggaggtcgggccaaagacctacatccggcaggacaatgagagg

SEQ ID NO: 151266 - DNA, 548 bp, Homo sapiens
  Payload ID: 9783
  Gene Symbol: MVP
  Gene Name: major vault protein
  ENST ID: ENST00000563558
  CDS Start-End: 115-548
atctgaggcgtttgttgcagctacctgcacttctagatgctccccaggttcatcctgtgtcgtctcccccacctaccagtcatcttcttgtgagccctgggcttaggagtcaccatggcaactgaagagttcatcatccgcatccccccataccactatatccatgtgctggaccagaacagcaacgtgtcccgtgtggaggtcgggccaaagacctacatccggcaggacaatgagagggtactgtttgcccccatgcgcatggtgaccgtccccccacgtcactactgcacagtggccaaccctgtgtctcgggatgcccagggcttggtgctgtttgatgtcacagggcaagttcggcttcgccacgctgacctcgagatccggctggcccaggaccccttccccctgtacccaggggaggtgctggaaaaggccatccctctagacgagaacgagggcatctatgtgcaggatgtcaagaccggaaaggtgcgcgctgtgattggaagcacctacatgctgacccaggacgaagtcctgtggga

SEQ ID NO: 151267 - DNA, 548 bp, Homo sapiens
  Payload ID: 9783
  Gene Symbol: MVP
  Gene Name: major vault protein
  ENST ID: ENST00000566066
  CDS Start-End: 266-548
atctgaggcgtttgttgcagctacctgcacttctagatgtttcggccctgcggagaaccctccaagggagcagtggaaaaagcttcacttggcagtaaagcccctacttgctgttccatccctgcagctggggtgaaataagccactgaccagtaaacaactgaggcttaaaccagcatgccagctcaggctccccaggttcatcctgtgtcgtctcccccacctaccagtcatcttcttgtgagccctgggcttaggagtcaccatggcaactgaagagttcatcatccgcatccccccataccactatatccatgtgctggaccagaacagcaacgtgtcccgtgtggaggtcgggccaaagacctacatccggcaggacaatgagagggtactgtttgcccccatgcgcatggtgaccgtccccccacgtcactactgcacagtggccaaccctgtgtctcgggatgcccagggcttggtgctgtttgatgtcacagggcaagttcggcttcgccacgctgacctcgagatccggctggcccagg

SEQ ID NO: 151268 - DNA, 549 bp, Homo sapiens
  Payload ID: 9783
  Gene Symbol: MVP
  Gene Name: major vault protein
  ENST ID: ENST00000569887
  CDS Start-End: 69-188
aggcgtttgttgcagctacctgcacttctagattcatcttcttgtgagccctgggcttaggagtcaccatggcaactgaagagttcatcatccgcatccccccataccactatatccatgtgctggaccagaacagcaacgtgtcccgtgtggagtgtcccgccgcactggggaggagtggctggtaacagtgcaggacacagaggcccacgtgccagatgtccacgaggaggtgctgggggttgtgcccatcaccaccctgggcccccacaactactgcgtgattctcgaccctgtcggaccggatggcaagaatcagctggggcagaagcgcgtggtcaagggagagaagtcttttttcctccagccaggagagcagctggaacaaggcatccaggatgtgtatgtgctgtcggagcagcaggggctgctgctgagggccctgcagcccctggaggagggggaggatgaggagaaggtctcacaccaggctggggaccactggctcatccgcggacccctggagtatgtgccatctgccaaagtgga

SEQ ID NO: 151269 - DNA, 589 bp, Homo sapiens
  Payload ID: 9783
  Gene Symbol: MVP
  Gene Name: major vault protein
  ENST ID: ENST00000566859
  CDS Start-End: 95-340
aaggcagggtgagagttccccatctgaggcgtttgttgcagctacctgcacttctagattcatcttcttgtgagccctgggcttaggagtcaccatggcaactgaagagttcatcatccgcatccccccataccactatatccatgtgctggaccagaacagcaacgtgtcccgtgtggaggtcgggccaaagacctacatccggcaggacaatgagaggttctggatttggtggacgccgtcatccttacggaaaagacagccctgcacctccgggctcggcggaacttccgggacttcaggggagtgtcccgccgcactggggaggagtggctggtaacagtgcaggacacagaggcccacgtgccagatgtccacgaggaggtgctgggggttgtgcccatcaccaccctgggcccccacaactactgcgtgattctcgaccctgtcggaccggatggcaagaatcagctggggcagaagcgcgtggtcaagggagagaagtcttttttcctccagccaggagagcagctggaacaaggcatccaggatgtgtatgtgctgtcggagcagcaggggctgctgctga

SEQ ID NO: 151270 - DNA, 854 bp, Homo sapiens
  Payload ID: 9783
  Gene Symbol: MVP
  Gene Name: major vault protein
  ENST ID: ENST00000563915
  CDS Start-End: 194-854
aactcccaagccccacccctgggcttggcctgccttgccctgccgggaagtgatccccaaggcagggtgagagttccccatctgaggcgtttgttgcagctacctgcacttctagatgctccccaggttcatcctgtgtcgtctcccccacctaccagtcatcttcttgtgagccctgggcttaggagtcaccatggcaactgaagagttcatcatccgcatccccccataccactatatccatgtgctggaccagaacagcaacgtgtcccgtgtggaggtcgggccaaagacctacatccggcaggacaatgagagggtactgtttgcccccatgcgcatggtgaccgtccccccacgtcactactgcacagtggccaaccctgtgtctcgggatgcccagggcttggtgctgtttgatgtcacagggcaagttcggcttcgccacgctgacctcgagatccggctggcccaggaccccttccccctgtacccaggggaggtgctggaaaaggacatcacacccctgcaggtggttctgcccaacactgccctccatctaaaggcgctgcttgattttgaggataaagatggagacaaggtggtggcaggagatgagtggcttttcgagggacctggcacgtacatcccccggaaggaagtggaggtcgtggagatcattcaggccaccatcatcaggcagaaccaggctctgcggctcagggcccgcaaggagtgctgggaccgggacggcaaggagagggtgacaggggaagaatggctggtcaccacagtaggggcgtacctcccagcggtgtttgaggaggttctggatttggtggacgccgtcatcc

SEQ ID NO: 151271 - DNA, 658 bp, Homo sapiens
  Payload ID: 9783
  Gene Symbol: MVP
  Gene Name: major vault protein
  ENST ID: ENST00000570234
  CDS Start-End: 213-658
agcactgggtcggccctcgggtgtggctgtttgggcaggacagccctctgtatgtagccttgagcagctgtgggaaggtctgggggcagggccgcatcaccgaccttacgtccaacctcaggactgcctggagcaagagccctggggttggggacaaaggaggctgcctggacctggtcatcttcttgtgagccctgggcttaggagtcaccatggcaactgaagagttcatcatccgcatccccccataccactatatccatgtgctggaccagaacagcaacgtgtcccgtgtggaggtcgggccaaagacctacatccggcaggacaatgagagggtactgtttgcccccatgcgcatggtgaccgtccccccacgtcactactgcacagtggccaaccctgtgtctcgggatgcccagggcttggtgctgtttgatgtcacagggcaagttcggcttcgccacgctgacctcgagatccggctggcccaggaccccttccccctgtacccaggggaggtgctggaaaaggacatcacacccctgcaggtggttctgcccaacactgccctccatctaaaggcgctgcttgattttgaggataaagatggagacaaggtggtggcaggagatgagtggcttttcgagggacctgg

SEQ ID NO: 151272 - DNA, 408 bp, Homo sapiens
  Payload ID: 9783
  Gene Symbol: MVP
  Gene Name: major vault protein
  ENST ID: ENST00000566252
  CDS Start-End: 87-408
attcctgaacaggccaagcactgggtgaaactactcaggattcagaagcagtcatcttcttgtgagccctgggcttaggagtcaccatggcaactgaagagttcatcatccgcatccccccataccactatatccatgtgctggaccagaacagcaacgtgtcccgtgtggaggtcgggccaaagacctacatccggcaggacaatgagagggtactgtttgcccccatgcgcatggtgaccgtccccccacgtcactactgcacagtggccaaccctgtgtctcgggatgcccagggcttggtgctgtttgatgtcacagggcaagttcggcttcgccacgctgacctcgagatccggctggcccaggaccccttccccctgtacccaggggaggtgctggaaaagg

SEQ ID NO: 151273 - DNA, 525 bp, Homo sapiens
  Payload ID: 9783
  Gene Symbol: MVP
  Gene Name: major vault protein
  ENST ID: ENST00000562463
  CDS Start-End: 74-247
atctgaggcgtttgttgcagctacctgcacttctagattcatcttcttgtgagccctgggcttaggagtcaccatggcaactgaagagttcatcatccgcatccccccataccactatatccatgtgctggaccagaacagcaacgtgtcccgtgtggaggtcgggccaaagacctacatccggcaggacaatgagaggacatcacacccctgcaggtggttctgcccaacactgccctccatctaaaggcgctgcttgattttgaggataaagatggagacaaggtggtggcaggagatgagtggcttttcgagggacctggcacgtacatcccccggaaggaagtggaggtcgtggagatcattcaggccaccatcatcaggcagaaccaggctctgcggctcagggcccgcaaggagtgctgggaccgggacggcaaggagagggtgacaggtggggtcaccaaggggcgatgatggtgggtgggcaggaggggtccccactgcaggggaagcaggggaagg

SEQ ID NO: 151274 - DNA, 575 bp, Homo sapiens
  Payload ID: 9783
  Gene Symbol: MVP
  Gene Name: major vault protein
  ENST ID: ENST00000563123
  CDS Start-End: 1-185
caggagatgagtggcttttcgagggacctggcacgtacatcccccggaaggaagtggaggtcgtggagatcattcaggccaccatcatcaggcagaaccaggctctgcggctcagggcccgcaaggagtgctgggaccgggacggcaaggagagggtgacaggtggggtcaccaaggggcgatgatggtgggtgggcaggaggggtccccactgcaggggaagcaggggaaggttgaggaaagcctcctgtagccccagagaggcgctttcctggtatcttttgaaagctgttgagggccacccactgctcttccttccccacccccgcttcatgctgtttccacttgggctggaaaatgtgaccatgaccatgcggatgtggcttttccttccctcaccttcaccatgagctgtgggcagtggccatgacttacctgattctggatcaacaaagaagatgttcaaatacaattgacaaatgtaggccaataggggaagaatggctggtcaccacagtaggggcgtacctcccagcggtgtttgaggaggttctggatttggtggacgccgtcat

SEQ ID NO: 151275 - DNA, 120 bp, Homo sapiens
  Payload ID: 9783
  Gene Symbol: MVP
  Gene Name: major vault protein
  ENST ID: ENST00000629059
  CDS Start-End: 1-120
atggcaactgaagagttcatcatccgcatccccccataccactatatccatgtgctggaccagaacagcaacgtgtcccgtgtggagtgtcccgccgcactggggaggagtggctggtaa

SEQ ID NO: 151276 - DNA, 3991 bp, Homo sapiens
  Payload ID: 9784
  Gene Symbol: MAK16
  Gene Name: MAK16 homolog
  Uniprot ID: Q9BXY0
  ENST ID: ENST00000360128
  CDS Start-End: 458-1360
ggagcggggacccagccccgccgcgccgcctgcagctttccccagcctcctcccagcagaggggaggcccgacagggaggggtcccatcctcatgaacggtcacaaacagggcgctagggaagcacgcccgacccccgcggtccccgcgctccaggattcggcagactgcgcgcgtcctgcctcccgcggatcgcactgggtcccaacagggttcccagctccaggctgcgcccatgaacaagcccagcattgcggacgggcgcgcgcagacgccagcgtggtgaagacgcgggggcgcgcgcgcggcgacgagactgccaggggacgcttcgcaacaccgagagtctcagcgtttctcgagataggtgaggctgcgcgttccggaactggtttcccggaaggagcatgtctgcgcccgcgatccgaccggaagttgcacgctgagccgcggacaccatgcagtcggatgatgttatctgggatacactaggaaacaagcaattttgttccttcaaaataagaaccaagactcagagcttctgccgaaatgaatatagcctgactggactgtgtaatcggtcatcctgtcccctggcaaatagtcagtatgccactattaaagaagagaaaggacagtgctacttgtatatgaaggttatagaacgagcggcttttcctcggcgtctctgggaacgggtccggcttagtaaaaactatgagaaagcactggagcaaatagatgaaaatctgatttactggccccgtttcattcgacacaaatgtaagcagagattcaccaagatcacccaatacctaattcgaattagaaaacttacactaaagcgacagaggaaacttgttcctttgagtaagaaggtggagcgtagggagaaaagaagagaggaaaaggcattaatagctgctcagctggacaatgccattgagaaggaattactggagagactgaaacaagatacgtatggcgacatctacaacttccccattcatgccttcgacaaagccctggaacaacaggaggcagagagtgactcttcagatactgaggaaaaagatgatgatgatgatgatgaggaagatgtggggaaaagagaatttgtcgaagatggtgaggtagatgagagtgacataagtgattttgaggatatggataaactggatgccagcagtgatgaagatcaggatggtaaatcctccagtgaggaggaggaagaaaaggcccttagtgcgaaacacaaaggcaaaatgcccttgagaggaccactgcagagaaaacgagcctatgtggaaatagaatacgagcaggagacagagcccgtggccaaagccaaaaccacgtgatttccctttcagcatttatacccaggactgaacatgcagaactgttttttttttttttttatcttaaacacatacacacctccagtttttgctcttttgtgttgtactgaacacaatatttgtgtttttattatttatgccacgtcagtggggcaagaaatctggagtgagtgaagaaagctaagttgtgaacaagagtgtttttatagcatatgtgttgaagtaacagcttgtgcccgagaaacttaacagatgagttcttgaatctgggatgagatgacggatgtaaatatttctaaattttaaatgctacattacttggtgtccttttttctcccaaactttatttagaaatggaaggagttcaattttttcttgttctactttccctattcttatggaggtaaaaggaaaggaaggaaggaaaaagcagctttcacttacaaagtttcgtgtaaaaatatctttttttcttaaataactccattcatacaaattgggatgggaagaaaatcctttcctcttgggaaagtaatacaagtcttaagttccattgtagggtgcgccttcagaaacctgctgcacttttctgatatagttcaccacttttctgtcttcacagctttggggaattttggccaggagaccctgaaacatgaaaccaaacaggctttgatatttttttttttttaattactttccccttttgcttgattcttcttccttggtatcatattcaaaggaggaaagaatggatgacacttagggacaggtcactaagcagaataggtattagttggttttttattatttttaaatttatatagctctcatgtattgaaggtgctactttaaaaactgtgttaatgtacttgcaaatctcctgctggctcatgaaacagcagaattccagccaaggcaaattcagttggatctagggcttgaaaactgcccaagattaaagagctaagatgaaatagtttgaataaactggtaaaataacaattcatactatctctacatatttttaggatatgaatttttttttcctgctgggtagattgtccagtgacttatggcatgaatttcttttcatgctaccttcaatcttcaactaaagatttctaaaaggggtaagaaatgaggcagtagtttattaaatacatagaagtacacagctattatatgctgtggctttgagaagttaacttttgtggaatatgaaaccaaaggaagaatttccatgtagataaattaagaatagggaaaaacatctacctaaaagatggttgtccctaaaaaactggaaacatctgaaatgctctatttatgttattattcctgggagcttatagcccattatttttactttttttttttaattcagaagactagaacagaacttaaattttacaaacttttgatcataatgcttttgcccatactgtctcgtccttagccccagtgacatgtgctgatcctcctgcctttagttctaaatggttctgaatagctttaaaagatgaataagaaaaaagatcaagctcttttgaggctagagggctcatatggagatctaaaaccctccatgttcatttccagacttggtcaggcacatacatagtaaattataatcaatcatgggaattacataaggataatgaggcccaactgaaaccaagtttcagtctgccttacctttacccgtccttgagaacagcggtccaggagaatcaggcagtctgtggcctcctgtagcagggcgctcttaacagactcaggtgtaaggtttggatcccttgctacatcacaaatcagtttcaagagggccttcagtaagaccacaagtctgcaggaaactctggaatcaggaagaaaagctatgttcatactctaaatctggatattaaaattggaagagacttcaaagactgtcaagtggaaagctatcatttcctaaattaaggaacttaggtcaaagttaaatgaaaaagacctaaaaacagaaccaaagacagcctctagatttcttaccctcaagtctcctgttagcatactgcctatacacacagacacaccctctgccacactgctctcttccttccagaagcttggttctactgtaagcaacagctccttcatgggctgagaaggggaaaccaggatctccccaaccaagggcctatacttttatttttcaactctattaactgaactatgcttggagagagccctgaatcctttaactttaatgccatcttaggcctggaagttagagtgagggaaatgagcttggcttctgggactgtgtcaagttgaattttctgtcatttaatttcagatcctagctcatcatcagtgaagtccagcctacttacttgtaactattaacctttctaaaagttttcatcgccttggtaaagctccagaaatggacaatgctagtgactgcacaatattgtgactgtacttaatgccactgaactgtacactttaaaatggaaaatttatatgtatttttaccacaataaacaaaaaaccctaaaaaaactttaatgaaaggtggaaaataatttaacttacaatgtgaaaatacaatgtgaaatgtacaataaatcatatttatggaca

SEQ ID NO: 151277 - DNA, 872 bp, Homo sapiens
  Payload ID: 9784
  Gene Symbol: MAK16
  Gene Name: MAK16 homolog
  ENST ID: ENST00000518389
  CDS Start-End: 1-412
ggacaccatgcagtcggatgatgttatctgggatacactaggaaacaagcaattttgttccttcaaaataagaaccaagactcagagcttctgccgaaatgaatatagcctgactggactgtgtaatcggtcatcctgtcccctggcaaatagtcagtatgccactattaaagaagagaaaggacagtgctacttgtatatgaaggttatagaacgagcggcttttcctcggcgtctctgggaacgggtccggcttagtaaaaactatgagaaagcactggagcaaatagatgaaaatctgatttactggccccgtttcattcgacacaaatgtaagcagagattcaccaagatcacccaatacctaattcgaattagaaaacttacactaaagcgacagaaaaggcattaatagctgctcagctggacaatgccattgagaaggaattactggagagactgaaacaagatacgtatggcgacatctacaacttccccattcatgccttcgacaaagccctggaacaacaggaggcagagagtgactcttcagatactgaggaaaaagatgatgatgatgatgatgaggaagatgtggggaaaagagaatttgtcgaagatggtgaggtagatgagagtgacataagtgattttgaggatatggataaactggatgccagcagtgatgaagatcaggatggtaaatcctccagtgaggaggaggaagaaaaggcccttagtgcgaaacacaaaggcaaaatgcccttgagaggaccactgcagagaaaacgagcctatgtggaaatagaatacgagcaggagacagagcccgtggccaaagccaaaaccacgtgatttccctttcagcattt

SEQ ID NO: 151278 - DNA, 3151 bp, Homo sapiens
  Payload ID: 9785
  Gene Symbol: MKRN1
  Gene Name: makorin ring finger protein 1
  Uniprot ID: Q9UHC7
  ENST ID: ENST00000255977
  CDS Start-End: 226-1674
accaatgagcggcgccgtgggcgggccgcgggcgcgcatgctctgggcccgcagttgaagtggcgagagcgctcagatacgcgacgcgtagcaggcggggaccgaacgggtgcctcagtgtccttcccctcccctcgcctggcctcgccgtcctctccccgcagccggaccggaactatgtgatcccggaagttccggggcctttgctgtgtgggataaacagtaatggcggaggctgcaactcccggaacaacagccacaacatcaggagcaggagcggcagcggcgacggcggcagcagcctcccccaccccgatccccacagtcaccgccccgtccctgggggcgggcggagggggcggcggcagcgacggcagcggcggcggctggactaaacaggtcacctgcaggtattttatgcatggggtttgtaaggaaggagacaactgtcgctactcgcatgacctctctgacagtccgtatagtgtagtgtgcaagtattttcagcgagggtactgtatttatggagaccgctgcagatatgaacatagcaaaccattgaaacaggaagaagcaactgctacagagctaactacaaagtcatcccttgctgcttcctcaagtctctcatcgatagttggaccacttgttgaaatgaatacaggcgaagctgagtcaagaaattcaaactttgcaactgtaggagcaggttcagaggactgggtgaatgctattgagtttgttcctgggcaaccctactgtggccgtactgcgccttcctgcactgaagcacccctgcagggctcagtgaccaaggaagaatcagagaaagagcaaaccgccgtggagacaaagaagcagctgtgcccctatgctgcagtgggagagtgccgatacggggagaactgtgtgtatctccacggagattcttgtgacatgtgtgggctgcaggtcctgcatccaatggatgctgcccagagatcgcagcatatcaaatcgtgcattgaggcccatgagaaggacatggagctctcatttgccgtgcagcgcagcaaggacatggtgtgtgggatctgcatggaggtggtctatgagaaagccaaccccagtgagcgccgcttcgggatcctctccaactgcaaccacacctactgtctcaagtgcattcgcaagtggaggagtgctaagcaatttgagagcaagatcataaagtcctgcccagaatgccggatcacatctaactttgtcattccaagtgagtactgggtggaggagaaagaagagaagcagaaactcattctgaaatacaaggaggcaatgagcaacaaggcgtgcaggtattttgatgaaggacgtgggagctgcccatttggagggaactgtttttacaagcatgcgtaccctgatggccgtagagaggagccacagagacagaaagtgggaacatcaagcagataccgggcccaacgaaggaaccacttctgggaactcattgaggaaagagagaacagcaacccctttgacaacgatgaagaagaggttgtcacctttgagctgggcgagatgttgcttatgcttttggctgcaggtggggacgacgaactaacagactctgaagatgagtgggacttgtttcatgatgagctggaagatttttatgacttggatctatagcaaccttgcgtggcgtgtgaactggtctgctgacctcagacagcagctgtcccctgtggtggtgtggcagtgcctgtgttctctcctaggcaggcctctcaactccaggtgctgtcctaagaatttttacccagggcctgtcttctcaacccctcacctttccctgaggagtgtgttgttttccctgttgaaaaaagttacaaaaataaatcttaaagttagttttttgtaacacgaatttaactgtcagacagttagtgtaggtgtgttgcgtcatctgttttcaaccagattgcatttatggacttttcacacactcattttgaggaccccaggttcaaaagtaaaagcagtggccctgctttggggtccaagaataggagtgatgggtgaagggacctaagctggccaatagccctctgccccagacatgggatgtggatccttgaggtttctggtgaaatctgcacatctgtgtttttatatctgttccctaccctgtaatccctaccacgtgcacttgttctgtggttttggtctcttgtttaattgcacacaagtaatactactgggtaaccagaatcaggtgtgaatgtgttgagattttttactgttttgcatgataggaaaattgagaaagaatacgtataaaagatagagaggcataacatcaatgcagagttggaagttggctcccaagggctgacatggtgtgagtgtgtgggtgtgtgataagcttctcatccctgcatagatgcagtattcttagccttagtagaaaaacctggtttagtggtttaagccttgtgtggcagatagatcttaaagggcaaagcagtatattggtagttgtcaatatagcagtgctagctctgtctatataaatagagaaatggggttagccatagaggttaaaactacctggttatcccatataataacacaaactgggtcttggatacacagttgtatttaatgttttacgatctagcctttccagtacaggcactttctgagaaacctttgtcctcacttgaggcattttgttgtcgggtttttgtgtttgtttttgtgggtatttgcctcattccacccctgagctttcaggtagacagacgtgattcaaaactctgttctaaggtgtttattgtagtggagtaatgggtttgcagtgataagtcatacttttccaccgaaagggagggcttgggaatccctgagattagctaaagttaagttgttggaagaattccttgattggaaattgtacctttgtgttttgttgctctgtttcctgaaaataactcggggatgctcctggtttgtccatctactgctttgattccttggatcccacccattctttcactttaagaaaaaacaaataattgttgcagaggtctctgtattttgcagctgcccttttgtaagaagcacttttcccaaataaaacaattaaaaaaaaagttggctgttc

SEQ ID NO: 151279 - DNA, 1601 bp, Homo sapiens
  Payload ID: 9785
  Gene Symbol: MKRN1
  Gene Name: makorin ring finger protein 1
  Uniprot ID: Q9UHC7
  ENST ID: ENST00000443720
  CDS Start-End: 156-1145
gctcagatacgcgacgcgtagcaggcggggaccgaacgggtgcctcagtgtccttcccctcccctcgcctggcctcgccgtcctctccccgcagccggaccggaactatgtgatcccggaagttccggggcctttgctgtgtgggataaacagtaatggcggaggctgcaactcccggaacaacagccacaacatcaggagcaggagcggcagcggcgacggcggcagcagcctcccccaccccgatccccacagtcaccgccccgtccctgggggcgggcggagggggcggcggcagcgacggcagcggcggcggctggactaaacaggtcacctgcaggtattttatgcatggggtttgtaaggaaggagacaactgtcgctactcgcatgacctctctgacagtccgtatagtgtagtgtgcaagtattttcagcgagggtactgtatttatggagaccgctgcagatatgaacatagcaaaccattgaaacaggaagaagcaactgctacagagctaactacaaagtcatcccttgctgcttcctcaagtctctcatcgatagttggaccacttgttgaaatgaatacaggcgaagctgagtcaagaaattcaaactttgcaactgtaggagcaggttcagaggactgggtgaatgctattgagtttgttcctgggcaaccctactgtggccgtactgcgccttcctgcactgaagcacccctgcagggctcagtgaccaaggaagaatcagagaaagagcaaaccgccgtggagacaaagaagcagctgtgcccctatgctgcagtgggagagtgccgatacggggagaactgtgtgtatctccacggagattcttgtgacatgtgtgggctgcaggtcctgcatccaatggatgctgcccagagatcgcagcatatcaaatcgtgcattgaggcccatgagaaggacatggagctctcatttgccgtgcagcgcagcaaggacatggtgtgtgggatctgcatggaggtggtctatgagaaagccaaccccagtgagcgccgcttcgggatcctctccaactgcaaccacacctactgtctcaagtgcattcgcaagtggaggagtgctaagcaatttgagagcaagatcataaagtgagactcctccccagtcttcatttgtgctttctcttttggggaagaatttagtaacttgtgccaactttcaaccagatggaccgcatttaaatgcatgcattttatcttgaaactgggatattctaatggggatttcttctttgtatttcagctagcttctaggttagttggtctatctacttttatttgaatgaggaaaccctgtgtatcagttagaatcttcgtgctttttctgaggagattgtgtttaatggattattagccagtttaggctcagtgaacaaactgatctagctctgaatgtatgtttcctgacgttttacatttccactttcctattccattcattaagctagccaacaatccaccatcctttaaagattgttctcataactgaacaaaaaccacataatctaaacagagcaaagctacaagaaataaatttatttaaacgaaa

SEQ ID NO: 151280 - DNA, 460 bp, Homo sapiens
  Payload ID: 9785
  Gene Symbol: MKRN1
  Gene Name: makorin ring finger protein 1
  ENST ID: ENST00000463142
  CDS Start-End: 1-339
ttgtttcccaggtcctgcccagaatgccggatcacatctaactttgtcattccaacaacaaggcgtgcaggtattttgatgaaggacgtgggagctgcccatttggagggaactgtttttacaagcatgcgtaccctgatggccgtagagaggagccacagagacagaaagtgggaacatcaagcagataccgggcccaacgaaggaaccacttctgggaactcattgaggaaagagagaacagcaacccctttgacaacgatgaagaagaggttgtcacctttgagctgggcgagatgttgcttatgcttttggctgcaggtggggacgacgaactaacagactctgaagatgagtgggacttgtttcatgatgagctggaagatttttatgacttggatctatagcaaccttgcgtggcgtgtgaactggtctgctgacctcagacagcagctgtccc

SEQ ID NO: 151281 - DNA, 1390 bp, Homo sapiens
  Payload ID: 9785
  Gene Symbol: MKRN1
  Gene Name: makorin ring finger protein 1
  ENST ID: ENST00000495305
  CDS Start-End: 25-552
ctttgctgtgtgggataaacagtaatggcggaggctgcaactcccggaacaacagccacaacatcaggagcaggagcggcagcggcgacggcggcagcagcctcccccaccccgatccccacagtcaccgccccgtccctgggggcgggcggagggggcggcggcagcgacggcagcggcggcggctggactaaacaggtcacctgcaggtattttatgcatggggtttgtaaggaaggagacaactgtcgctactcgcatgacctctctgacagtccgtatagtgtagtgtgcaagtattttcagcgagggtactgtatttatggagaccgctgcagtcgtgcattgaggcccatgagaaggacatggagctctcatttgccgtgcagcgcagcaaggacatggtgtgtgggatctgcatggaggtggtctatgagaaagccaaccccagtgagcgccgcttcgggatcctctccaactgcaaccacacctactgtctcaagtgcattcgcaagtggaggagtgctaagcaatttgagagcaagatcataaagtcctgcccagaatgccggatcacatctaactttgtcattccaagtgagtactgggtggaggagaaagaagagaagcagaaactcattctgaaatacaaggaggcaatgagcaacaaggcgtgcaggtattttgatgaaggacgtgggagctgcccatttggagggaactgtttttacaagcatgcgtaccctgatggccgtagagaggagccacagagacagaaagtgggaacatcaagcagataccgggcccaacgaaggaaccacttctgggaactcattgaggaaagagagaacagcaacccctttgacaacgatgaagaagaggttgtcacctttgagctgggcgagatgttgcttatgcttttggctgcaggtggggacgacgaactaacagactctgaagatgagtgggacttgtttcatgatgagctggaagatttttatgacttggatctatagcaaccttgcgtggcgtgtgaactggtctgctgacctcagacagcagctgtcccctgtggtggtgtggcagtgcctgtgttctctcctaggcaggcctctcaactccaggtgctgtcctaagaatttttacccagggcctgtcttctcaacccctcacctttccctgaggagtgtgttgttttccctgttgaaaaaagttacaaaaataaatcttaaagttagttttttgtaacacgaatttaactgtcagacagttagtgtaggtgtgttgcgtcatctgttttcaaccagattgcatttatggacttttcacacactcattttgaggaccccaggttcaaaagtaaaagcagtggccctgctttggggtccaa

SEQ ID NO: 151282 - DNA, 1661 bp, Homo sapiens
  Payload ID: 9785
  Gene Symbol: MKRN1
  Gene Name: makorin ring finger protein 1
  Uniprot ID: Q9UHC7
  ENST ID: ENST00000474576
  CDS Start-End: 156-1412
actgcgtcaacccccgctgggccgcggagccctcagcgctgtccgcggaggcctggcggtgcgcgattactgcggagccgcggggctgcaccgccgcttacacttccctgagcgctgcctgagctggctgcgagcgcatcggggagaggtattttatgcatggggtttgtaaggaaggagacaactgtcgctactcgcatgacctctctgacagtccgtatagtgtagtgtgcaagtattttcagcgagggtactgtatttatggagaccgctgcagatatgaacatagcaaaccattgaaacaggaagaagcaactgctacagagctaactacaaagtcatcccttgctgcttcctcaagtctctcatcgatagttggaccacttgttgaaatgaatacaggcgaagctgagtcaagaaattcaaactttgcaactgtaggagcaggttcagaggactgggtgaatgctattgagtttgttcctgggcaaccctactgtggccgtactgcgccttcctgcactgaagcacccctgcagggctcagtgaccaaggaagaatcagagaaagagcaaaccgccgtggagacaaagaagcagctgtgcccctatgctgcagtgggagagtgccgatacggggagaactgtgtgtatctccacggagattcttgtgacatgtgtgggctgcaggtcctgcatccaatggatgctgcccagagatcgcagcatatcaaatcgtgcattgaggcccatgagaaggacatggagctctcatttgccgtgcagcgcagcaaggacatggtgtgtgggatctgcatggaggtggtctatgagaaagccaaccccagtgagcgccgcttcgggatcctctccaactgcaaccacacctactgtctcaagtgcattcgcaagtggaggagtgctaagcaatttgagagcaagatcataaagtcctgcccagaatgccggatcacatctaactttgtcattccaagtgagtactgggtggaggagaaagaagagaagcagaaactcattctgaaatacaaggaggcaatgagcaacaaggcgtgcaggtattttgatgaaggacgtgggagctgcccatttggagggaactgtttttacaagcatgcgtaccctgatggccgtagagaggagccacagagacagaaagtgggaacatcaagcagataccgggcccaacgaaggaaccacttctgggaactcattgaggaaagagagaacagcaacccctttgacaacgatgaagaagaggttgtcacctttgagctgggcgagatgttgcttatgcttttggctgcaggtggggacgacgaactaacagactctgaagatgagtgggacttgtttcatgatgagctggaagatttttatgacttggatctatagcaaccttgcgtggcgtgtgaactggtctgctgacctcagacagcagctgtcccctgtggtggtgtggcagtgcctgtgttctctcctaggcaggcctctcaactccaggtgctgtcctaagaatttttacccagggcctgtcttctcaacccctcacctttccctgaggagtgtgttgttttccctgttgaaaaaagttacaaaaataaatcttaaagttagttttttgtaacacgaatttaactgtca

SEQ ID NO: 151283 - DNA, 1625 bp, Homo sapiens
  Payload ID: 9785
  Gene Symbol: MKRN1
  Gene Name: makorin ring finger protein 1
  ENST ID: ENST00000496169
  CDS Start-End: 12-293
gataaacagtaatggcggaggctgcaactcccggaacaacagccacaacatcaggagcaggagcggcagcggcgacggcggcagcagcctcccccaccccgatccccacagtcaccgccccgtccctgggggcgggcggagggggcggcggcagcgacggcagcggcggcggctggactaaacaggtcacctgcagacggagtctcagtggcgtgatcctggttcactgcaacctctgggccccccccaacccactgcgagttcaagcaattctgcctcagcctcccaagtagctgggactacagtaggtaccgctttcaccatgttggtcaggctggtctcaaactcccaacctcaggtattttatgcatggggtttgtaaggaaggagacaactgtcgctactcgcatgacctctctgacagtccgtatagtgtagtgtgcaagtattttcagcgagggtactgtatttatggagaccgctgcagatatgaacatagcaaaccattgaaacaggaagaagcaactgctacagagctaactacaaagtcatcccttgctgcttcctcaagtctctcatcgatagttggaccacttgttgaaatgaatacaggcgaagctgagtcaagaaattcaaactttgcaactgtaggagcaggttcagaggactgggtgaatgctattgagtttgttcctgggcaaccctactgtggccgtactgcgccttcctgcactgaagcacccctgcagggctcagtgaccaaggaagaatcagagaaagagcaaaccgccgtggagacaaagaagcagctgtgcccctatgctgcagtgggagagtgccgatacggggagaactgtgtgtatctccacggagattcttgtgacatgtgtgggctgcaggtcctgcatccaatggatgctgcccagagatcgcagcatatcaaatcgtgcattgaggcccatgagaaggacatggagctctcatttgccgtgcagcgcagcaaggacatggtgtgtgggatctgcatggaggtggtctatgagaaagccaaccccagtgagcgccgcttcgggatcctctccaactgcaaccacacctactgtctcaagtgcattcgcaagtggaggagtgctaagcaatttgagagcaagatcataaagtgagactcctccccagtcttcatttgtgctttctcttttggggaagaatttagtaacttgtgccaactttcaaccagatggaccgcatttaaatgcatgcattttatcttgaaactgggatattctaatggggatttcttctttgtatttcagctagcttctaggttagttggtctatctacttttatttgaatgaggaaaccctgtgtatcagttagaatcttcgtgctttttctgaggagattgtgtttaatggattattagccagtttaggctcagtgaacaaactgatctagctctgaatgtatgtttcctgacgttttacatttccactttcctattccattcattaagctagccaacaatccaccatcctttaaagattgttctcataactgaacaaaaaccacataatctaaacagagcaaagctacaagaaataaatttatttaaacgaaagaaaaa

SEQ ID NO: 151284 - DNA, 1133 bp, Homo sapiens
  Payload ID: 9785
  Gene Symbol: MKRN1
  Gene Name: makorin ring finger protein 1
  ENST ID: ENST00000467513
  CDS Start-End: 639-1133
gtttgtaacgtcttttcacgtccctccgtccctccgccccccatcctccgcccaactgtgagaagaagcttttgtatttcttctttgtatgtttgtcgaggttggcggtgctgagctttgtcttagaagcaggcgttcgggggccggggtcgtcttctccacccgcggtttttttgagctgcagattattaccctcccccagcgctatgttcctcttttgaaatttacgcatcttccgaagggagtgaaagggctcttcgctcccggaagagagagaggtttggttttggtttgatatgcgagacgaaaatattagaaaaattaagggatggcggttgtatggatgtgtatggttgtaaaaaactacctagctctacgcagaagagggcatttaattgtacgttttttattttccggtttttaaatagtgatcagtagcgactgtaagcttttctttttctatcagttgaataaatcaactgaaatgccggttttcacctgggtggtataatttatatgcaaacggagtctcagtggcgtgatcctggttcactgcaacctctgggccccccccaacccactgcgagttcaagcaattctgcctcagcctcccaagtagctgggactacaggtattttatgcatggggtttgtaaggaaggagacaactgtcgctactcgcatgacctctctgacagtccgtatagtgtagtgtgcaagtattttcagcgagggtactgtatttatggagaccgctgcagatatgaacatagcaaaccattgaaacaggaagaagcaactgctacagagctaactacaaagtcatcccttgctgcttcctcaagtctctcatcgatagttggaccacttgttgaaatgaatacaggcgaagctgagtcaagaaattcaaactttgcaactgtaggagcaggttcagaggactgggtgaatgctattgagtttgttcctgggcaaccctactgtggccgtactgcgccttcctgcactgaagcacccctgcagggctcagtgaccaaggaagaatcagagaaagagcaaaccgccgtggagacaaagaagcagctgtgcccctatgctgcagtgggagagtgccgatacggggagaactgtgtg

SEQ ID NO: 151285 - DNA, 720 bp, Homo sapiens
  Payload ID: 9785
  Gene Symbol: MKRN1
  Gene Name: makorin ring finger protein 1
  ENST ID: ENST00000473444
  CDS Start-End: 415-720
gtctcgatctctgcagccctcgcggcccccgctgccgccgcgttcccccagtcactgcgtcaacccccgctgggccgcggagccctcagcgctgtccgcggaggcctggcggtgcgcgattactgcggagccgcggggctgcaccgccgcttacacttccctgagcgctgcctgagctggctgcgagcgcatcggggagagacggagtctcagtggcgtgatcctggttcactgcaacctctgggccccccccaacccactgcgagttcaagcaattctgcctcagcctcccaagtagctgggactacagtaggtaccgctttcaccatgttggtcaggctggtctcaaactcccaacctcagtgtctcatggagacagagtctgcacagtggaaggaacttcagaaataatatatggcccaggttttcaccgaaggcaaactcaacttggggtattttatgcatggggtttgtaaggaaggagacaactgtcgctactcgcatgacctctctgacagtccgtatagtgtagtgtgcaagtattttcagcgagggtactgtatttatggagaccgctgcagatatgaacatagcaaaccattgaaacaggaagaagcaactgctacagagctaactacaaagtcatcccttgctgcttcctcaagtctctcatcgatagttggaccacttgttgaaatgaatacaggcgaagctgagtca

SEQ ID NO: 151286 - DNA, 1053 bp, Homo sapiens
  Payload ID: 9785
  Gene Symbol: MKRN1
  Gene Name: makorin ring finger protein 1
  ENST ID: ENST00000471104
  CDS Start-End: 475-1053
agaggcgcgggagggcggggaccggcgttgtctcgatctctgcagccctcgcggcccccgctgccgccgcgttcccccagtcactgcgtcaacccccgctgggccgcggagccctcagcgctgtccgcggaggcctggcggtgcgcgattactgcggagccgcggggctgcaccgccgcttacacttccctgagcgctgcctgagctggctgcgagcgcatcggggagaggtgggctggctcctcccctgccgctggaaggatgcccccgccgctgcctccggctcccggggctcgggaggtggtcacttgaggccggtctcccagcgatcctctccgggcctagacaccccgccgagggccccagcgagcttgcctggctcccggccctctcctctctccgtgccatccgtttgtaacgtcttttcacgtccctccgtccctccgccccccatcctccgcccaactgtattttatgcatggggtttgtaaggaaggagacaactgtcgctactcgcatgacctctctgacagtccgtatagtgtagtgtgcaagtattttcagcgagggtactgtatttatggagaccgctgcagatatgaacatagcaaaccattgaaacaggaagaagcaactgctacagagctaactacaaagtcatcccttgctgcttcctcaagtctctcatcgatagttggaccacttgttgaaatgaatacaggcgaagctgagtcaagaaattcaaactttgcaactgtaggagcaggttcagaggactgggtgaatgctattgagtttgttcctgggcaaccctactgtggccgtactgcgccttcctgcactgaagcacccctgcagggctcagtgaccaaggaagaatcagagaaagagcaaaccgccgtggagacaaagaagcagctgtgcccctatgctgcagtgggagagtgccgatacggggagaactgtgtgtatctccacggagattcttgtgacatgtgtgggctgcaggtcctgcatccaatggatgctgcccagagatcgcagcatatcaaa

SEQ ID NO: 151287 - DNA, 560 bp, Homo sapiens
  Payload ID: 9785
  Gene Symbol: MKRN1
  Gene Name: makorin ring finger protein 1
  ENST ID: ENST00000475180
  CDS Start-End: 1-120
tggactaaacaggtcacctgcagacggagtctcagtggcgtgatcctggttcactgcaacctctgggccccccccaacccactgcgagttcaagcaattctgcctcagcctcccaagtagctgggactacaggctggagtgcaatggcgcgatctcggctcattgaaacctcagcctcccacgtgtaagcagttctcctgcctcagcctcctgagtagctgggattaacatgtgtgccaccacaccagccaatttttgtatttttagtagagacggggtttcaccatgttgcccaggctggtctcgaaccgctggtcttagacccctgacctcaggtattttatgcatggggtttgtaaggaaggagacaactgtcgctactcgcatgacctctctgacagtccgtatagtgtagtgtgcaagtattttcagcgagggtactgtatttatggagaccgctgcagatatgaacatagcaaaccattgaaacaggaagaagcaactgctacagagctaactacaaagtcatcccttgctgcttcctcaagtctctcatcgat

SEQ ID NO: 151288 - DNA, 607 bp, Homo sapiens
  Payload ID: 9785
  Gene Symbol: MKRN1
  Gene Name: makorin ring finger protein 1
  ENST ID: ENST00000498535
  CDS Start-End: 11-337
ataaacagtaatggcggaggctgcaactcccggaacaacagccacaacatcaggagcaggagcggcagcggcgacggcggcagcagcctcccccaccccgatccccacagtcaccgccccgtccctgggggcgggcggagggggcggcggcagcgacggcagcggcggcggctggactaaacaggtcacctgcagatggagtctgtgtcgcccaagctggagtgcagtggcacgatctcggctcactacaacctctgcctcctgggttcaaggaattctggtgcctcagccttccgagaagctgggattacaggtattttatgcatggggtttgtaaggaaggagacaactgtcgctactcgcatgacctctctgacagtccgtatagtgtagtgtgcaagtattttcagcgagggtactgtatttatggagaccgctgcagatatgaacatagcaaaccattgaaacaggaagaagcaactgctacagagctaactacaaagtcatcccttgctgcttcctcaagtctctcatcgatagttggaccacttgttgaaatgaatacaggcgaagctgagtcaagaaattcaaactttgcaactgtagg

SEQ ID NO: 151289 - DNA, 784 bp, Homo sapiens
  Payload ID: 9785
  Gene Symbol: MKRN1
  Gene Name: makorin ring finger protein 1
  ENST ID: ENST00000494939
  CDS Start-End: 377-784
cttctccacccgcggtttttttgagctgcagattattaccctcccccagcgctatgttcctcttttgaaatttacgcatcttccgaagggagtgaaagggctcttcgctcccggaagagagagaggtttggttttggtttgatatgcgagacgaaaatattagaaaaattaagggatggcggttgtatggatgtgtatggttgtaaaaaactacctagctctacgcagaagagggcatttaattgtacgttttttattttccggtttttaaatagtgatcagtagcgactgtaagcttttctttttctatcagttgaataaatcaactgaaatgccggttttcacctgggtggtataatttatatgcaagtattttatgcatggggtttgtaaggaaggagacaactgtcgctactcgcatgacctctctgacagtccgtatagtgtagtgtgcaagtattttcagcgagggtactgtatttatggagaccgctgcagatatgaacatagcaaaccattgaaacaggaagaagcaactgctacagagctaactacaaagtcatcccttgctgcttcctcaagtctctcatcgatagttggaccacttgttgaaatgaatacaggcgaagctgagtcaagaaattcaaactttgcaactgtaggagcaggttcagaggactgggtgaatgctattgagtttgttcctgggcaaccctactgtggccgtactgcgccttcctgcactgaagcacccctgcagggctcagtgaccaaggaagaatca

SEQ ID NO: 151290 - DNA, 906 bp, Homo sapiens
  Payload ID: 9785
  Gene Symbol: MKRN1
  Gene Name: makorin ring finger protein 1
  ENST ID: ENST00000480552
  CDS Start-End: 98-433
gtgcgcgattactgcggagccgcggggctgcaccgccgcttacacttccctgagcgctgcctgagctggctgcgagcgcatcggggagaggtattttatgcatggggtttgtaaggaaggagacaactgtcgctactcgcatgacctctctgacagtccgtatagtgtagtgtgcaagtattttcagcgagggtactgtatttatggagaccgctgcagtcgtgcattgaggcccatgagaaggacatggagctctcatttgccgtgcagcgcagcaaggacatggtgtgtgggatctgcatggaggtggtctatgagaaagccaaccccagtgagcgccgcttcgggatcctctccaactgcaaccacacctactgtctcaagtgcattcgcaagtggaggagtgctaagcaatttgagagcaagatcataaagtgagactcctccccagtcttcatttgtgctttctcttttggggaagaatttagtaacttgtgccaactttcaaccagatggaccgcatttaaatgcatgcattttatcttgaaactgggatattctaatggggatttcttctttgtatttcagctagcttctaggttagttggtctatctacttttatttgaatgaggaaaccctgtgtatcagttagaatcttcgtgctttttctgaggagattgtgtttaatggattattagccagtttaggctcagtgaacaaactgatctagctctgaatgtatgtttcctgacgttttacatttccactttcctattccattcattaagctagccaacaatccaccatcctttaaagattgttctcataactgaacaaaaaccacataatctaaacagagcaaagctacaagaaataaatttatttaaacgaaagaaaaaggagtc

SEQ ID NO: 151291 - DNA, 2848 bp, Homo sapiens
  Payload ID: 9786
  Gene Symbol: MKRN2
  Gene Name: makorin ring finger protein 2
  Uniprot ID: Q9H000
  ENST ID: ENST00000170447
  CDS Start-End: 138-1388
cacaccggaggggcggcgtgcgccggcgtgcgccggcgtgacgcggctacgcgggatgggccgggccagggccaaggccgaggcggcagcggctgcgagaggcggcggcacgacgacggtccctcagcccagccaccatgagcaccaagcagatcacttgcaggtattttatgcatggtgtgtgtcgggaaggaagtcagtgcctattctcacatgacttggcaaacagcaaaccgtccaccatctgcaagtactaccagaagggctactgtgcctatggaactcggtgcagatatgaccacacgaggccctctgctgcagctggaggtgctgtgggcaccatggcccacagtgtgccctccccagctttccacagtcctcaccctccttccgaggtcactgcatccattgtgaaaactaactcacatgaacccggaaagcgtgaaaagagaacattggttcttagagaccgaaatctctctggcatggctgaaaggaagacccagccgagcatggtgagtaatccaggcagctgcagcgacccccagcccagccccgagatgaagccgcattcctacctggatgccatcaggagtggccttgatgacgtggaggccagcagctcctacagcaacgagcagcagctgtgcccctacgcagctgctggggagtgccggtttggggatgcctgtgtctacctgcacggggaggtgtgtgaaatctgtaggctgcaagtcttgcacccattcgacccagagcagaggaaggctcatgaaaagatctgcatgttgacgttcgaacacgagatggaaaaggcctttgccttccaggcaagccaggacaaagtgtgcagtatctgcatggaagtgatcctggagaaggcctctgcttctgagaggagatttgggattctctccaattgcaatcacacgtactgtttgtcctgcatccggcagtggcggtgtgccaaacagtttgaaaacccaatcattaagtcttgtccagaatgccgtgtgatatcagagtttgtaattccaagtgtgtattgggtggaagatcagaataaaaagaacgagttgattgaagctttcaaacaggggatggggaaaaaagcctgtaaatactttgagcaaggcaaggggacctgcccatttggaagcaaatgtctttatcgccatgcttaccccgatgggcggctagcagagcctgagaaacctcggaaacagctcagttctcaaggcactgtgaggttctttaattcagtgcggctctgggatttcatcgagaaccgagaaagccggcatgtccccaacaatgaagatgtcgacatgacagagctcggggacctcttcatgcacctttctggagtggaatcatcagaaccctaaagagtagatggttgccctgcatcttgggctccatcggccgaaactttcccaagccagggtgtgcggagcttccctgtactgcagccaaggtgacgtgtgacttggatttgagtggagttgggcttagccttagtctcattcaatctccattattacagccatggggaagagtgaaagatataaagtaacctaattaaatgtatggaattgctatttttatagctgatatagttacacctcaagcccctcaggggtaacaactaacaaacacccaaactgtttggattgattgctttaaaaaacaaacctggctcttacctttgatcttttcttccccagaaatagtaaacttgcagctgcccctaatgcagcatatttttcttaccaaaggagtcttcagccctataaaaggattcctctatagtgtatttctctagtgtatttagtgtgtcgtcaaaattttgatttatacagagctttcaagaacacacaatgcaaagtgagcgcagcatagctgttaacaaacatacaacttttttctagggctttaagggtggtcatttttttcaagttctctcaagtgtcccaaatcagggtagcaatcttgttgccacatgtgcagcaaacaaagtggaagtatagatcttcttctcccttagggaggctcttgaaggagcaggaggtacagtactgggtagcagtctggccctcctgtcgtctggttggtgttggggcctccagccagggccctctaggggaaccaagcctctgctctcacctgtgggttcttgcccatcagggtaattgtattgagaactcaaatatacgtgcacttacatgtgtggttcgtactcaagtgatctattatctagctgcaaagcctggctttgatttgaaattttgtaaaaatttcatggcacccaaggtttctgattctgacccagcagtggtcctgaagagagctgatggcaagtcttgtagtcattttgattttaattgaagggtgagcataaccttgtgaaccagcactagcttgttccaagctggaatttatctaatctatttttgtgtttaaaaaagctgtacctaccaaataaataaatagtttataaaatgtattacttaaggtattagctgagtttagagtactttctgcttaattaatttttatacttaactcttcagtagaggtttacaaagagtacaaaggttaaattacaaattcattcccagcctaggctctgggcacatttcctgttcttgaattctgctcctgaagagggtgaacaaatggggcattcaagttgtgagctcagaattactttaaaaggaggtaacagccagccattacacctaaatttaatttattttattaaaataacataattgagggaccatcagataactgtattttgtcaggtgcaataaaaacaaaattaaaacccaaatcatcaagaaaa

SEQ ID NO: 151292 - DNA, 1436 bp, Homo sapiens
  Payload ID: 9786
  Gene Symbol: MKRN2
  Gene Name: makorin ring finger protein 2
  Uniprot ID: Q9H000
  ENST ID: ENST00000411987
  CDS Start-End: 65-1186
aaggccgaggcggcagcggctgcgagaggcggcggcacgacgacggtccctcagcccagccaccatgagcaccaagcagatcacttgcagatatgaccacacgaggccctctgctgcagctggaggtgctgtgggcaccatggcccacagtgtgccctccccagctttccacagtcctcaccctccttccgaggtcactgcatccattgtgaaaactaactcacatgaacccggaaagcgtgaaaagagaacattggttcttagagaccgaaatctctctggcatggctgaaaggaagacccagccgagcatggtgagtaatccaggcagctgcagcgacccccagcccagccccgagatgaagccgcattcctacctggatgccatcaggagtggccttgatgacgtggaggccagcagctcctacagcaacgagcagcagctgtgcccctacgcagctgctggggagtgccggtttggggatgcctgtgtctacctgcacggggaggtgtgtgaaatctgtaggctgcaagtcttgcacccattcgacccagagcagaggaaggctcatgaaaagatctgcatgttgacgttcgaacacgagatggaaaaggcctttgccttccaggcaagccaggacaaagtgtgcagtatctgcatggaagtgatcctggagaaggcctctgcttctgagaggagatttgggattctctccaattgcaatcacacgtactgtttgtcctgcatccggcagtggcggtgtgccaaacagtttgaaaacccaatcattaagtcttgtccagaatgccgtgtgatatcagagtttgtaattccaagtgtgtattgggtggaagatcagaataaaaagaacgagttgattgaagctttcaaacaggggatggggaaaaaagcctgtaaatactttgagcaaggcaaggggacctgcccatttggaagcaaatgtctttatcgccatgcttaccccgatgggcggctagcagagcctgagaaacctcggaaacagctcagttctcaaggcactgtgaggttctttaattcagtgcggctctgggatttcatcgagaaccgagaaagccggcatgtccccaacaatgaagatgtcgacatgacagagctcggggacctcttcatgcacctttctggagtggaatcatcagaaccctaaagagtagatggttgccctgcatcttgggctccatcggccgaaactttcccaagccagggtgtgcggagcttccctgtactgcagccaaggtgacgtgtgacttggatttgagtggagttgggcttagccttagtctcattcaatctccattattacagccatggggaagagtgaaagatataaagtaacctaattaaatgtatggaattgctatttttatagctgatatagttacacctcaagcccctca

SEQ ID NO: 151293 - DNA, 1679 bp, Homo sapiens
  Payload ID: 9786
  Gene Symbol: MKRN2
  Gene Name: makorin ring finger protein 2
  ENST ID: ENST00000448482
  CDS Start-End: 62-1306
gccgaggcggcagcggctgcgagaggcggcggcacgacgacggtccctcagcccagccaccatgagcaccaagcagatcacttgcaggtattttatgcatggtgtgtgtcgggaaggaagtcagtgcctattctcacatgacttggcaaacagcaaaccgtccaccatctgcaagtactaccagaagggctactgtgcctatggaactcgatatgaccacacgaggccctctgctgcagctggaggtgctgtgggcaccatggcccacagtgtgccctccccagctttccacagtcctcaccctccttccgaggtcactgcatccattgtgaaaactaactcacatgaacccggaaagcgtgaaaagagaacattggttcttagagaccgaaatctctctggcatggctgaaaggaagacccagccgagcatggtgagtaatccaggcagctgcagcgacccccagcccagccccgagatgaagccgcattcctacctggatgccatcaggagtggccttgatgacgtggaggccagcagctcctacagcaacgagcagcagctgtgcccctacgcagctgctggggagtgccggtttggggatgcctgtgtctacctgcacggggaggtgtgtgaaatctgtaggctgcaagtcttgcacccattcgacccagagcagaggaaggctcatgaaaagatctgcatgttgacgttcgaacacgagatggaaaaggcctttgccttccaggcaagccaggacaaagtgtgcagtatctgcatggaagtgatcctggagaaggcctctgcttctgagaggagatttgggattctctccaattgcaatcacacgtactgtttgtcctgcatccggcagtggcggtgtgccaaacagtttgaaaacccaatcattaagtcttgtccagaatgccgtgtgatatcagagtttgtaattccaagtgtgtattgggtggaagatcagaataaaaagaacgagttgattgaagctttcaaacaggggatggggaaaaaagcctgtaaatactttgagcaaggcaaggggacctgcccatttggaagcaaatgtctttatcgccatgcttaccccgatgggcggctagcagagcctgagaaacctcggaaacagctcagttctcaaggcactgtgaggttctttaattcagtgcggctctgggatttcatcgagaaccgagaaagccggcatgtccccaacaatgaagatgtcgacatgacagagctcggggacctcttcatgcacctttctggagtggaatcatcagaaccctaaagagtagatggttgccctgcatcttgggctccatcggccgaaactttcccaagccagggtgtgcggagcttccctgtactgcagccaaggtgacgtgtgacttggatttgagtggagttgggcttagccttagtctcattcaatctccattattacagccatggggaagagtgaaagatataaagtaacctaattaaatgtatggaattgctatttttatagctgatatagttacacctcaagcccctcaggggtaacaactaacaaacacccaaactgtttggattgattgctttaaaaaacaaacctggctcttacctttgatcttttcttccccagaaatagtaaacttgcagctgcccctaatgcagca

SEQ ID NO: 151294 - DNA, 2337 bp, Homo sapiens
  Payload ID: 9787
  Gene Symbol: MKRN3
  Gene Name: makorin ring finger protein 3
  Uniprot ID: Q13064
  ENST ID: ENST00000314520
  CDS Start-End: 100-1623
cagagaagcctccgagcgcggccgccattccgggcctcaagcccataaagaaaaaataccggagaggttctggcaccatttcggggtgccaaagcagccatggaagagcctgcagctccctcagaagcccacgaggcagccggggcccaggcaggtgctgaggcagcaagggagggtgtgtctgggccggaccttcccgtctgtgagccctccggggaatctgctgctccagattcagccctgccacatgcggcaaggggctgggcccccttccctgtagctccagtccctgcccacctccgcagaggaggcctgaggcctgccccagcctcaggaggaggagcctggcccagtccgttgccaagccgaagcagcggcatttggacaaagcagatcatctgcaggtattatatacatgggcagtgcaaggagggggagaactgtcgctattcgcacgacctttctggtcggaagatggccactgagggtggcgtttcgccgcctggggcctctgcaggtggaggccctagcacggctgcgcacatcgagcccccgactcaggaagtggcggaagcccccccggctgcatcctccctttccttgcctgtgattggctcggctgctgaaaggggtttctttgaagccgagagagacaatgcagaccgtggagctgctggaggagcaggtgtagaaagctgggcggatgccattgagtttgttccagggcagccctaccggggccgctgggttgcatctgcccccgaggctcctctacagagctcagagactgagaggaagcagatggctgtgggcagtgggttgcggttttgctattatgcttccaggggagtttgctttcgtggggagagctgtatgtacctccatggagacatatgcgacatgtgtgggctgcagaccttgcaccccatggatgctgcccagagggaagaacatatgagggcctgcattgaagcacacgagaaagatatggaactctcgtttgctgtgcagcgtggtatggacaaggtgtgtggcatctgcatggaggttgtctatgagaaggccaaccccaatgaccgccgctttggcattctttccaattgcaaccattccttctgtattaggtgtatccgcaggtggagaagtgccagacagtttgagaacaggatcgtcaagtcttgcccacagtgcagggtcacctctgaattggtcattcccagtgagttctgggtggaggaggaggaagagaagcagaaacttattcagcaatacaaggaggcaatgagcaacaaggcctgcaggtattttgcggaaggcaggggtaactgcccatttggagacacatgcttttacaagcatgaataccctgagggctggggagatgagcctcctgggccaggtggtgggtcattcagcgcatactggcatcaacttgtggagcctgtgcgaatgggagagggcaacatgctctataaaagcattaagaaggagcttgtcgtgcttcggctggccagtctgttgtttaagcggtttctttcactgagagatgagttacccttctctgaggaccagtgggacttgcttcattatgagctggaagaatatttcaatttgattctgtagcatcgtgctgtggcatgtggtctagtctgctgaggttctgtcgtctgctattgcctgttttccctgtgttgacactcttactgctttcaggggctgttgaggcagtgcttctgttttcttgtctattctgcatatctttccccctaggattatggtgattatctgtgttaaaaaataagtccttaaagttactgttttggtgaaattaatattaatgtcagcttatggcttttttttgtcatctctgttgtcaacaggattaactcagttctagtgtagtgtttactgaatttccacacttattttgaagaccctcaagagtaaatgtggcagagtgaaaggagaagttttaattgaactagtagctttgtgctataatagccttaacaaatggacccttgcagggctttgcagctgctcatctgtttgtttacagtttgttctttccctccttccccttcaagtgcacttgttaaactgtgatgaacttgtgattttgtgttttacttgaccaaaaccaagtgtatatgtttacatgtttttatcctgtttagcttgacatgaaataatttatatttggaaatatatatttaagaattatatatataaaaatatatatgtataagagttatgtatttgaaaaaaatatataaaagaatatacatcacaatataatatttatgtttatgtaataaagtaaatacagagctgaaa

SEQ ID NO: 151295 - DNA, 629 bp, Homo sapiens
  Payload ID: 9787
  Gene Symbol: MKRN3
  Gene Name: makorin ring finger protein 3
  ENST ID: ENST00000564592
  CDS Start-End: 11-559
caaagcagccatggaagagcctgcagctccctcagaagcccacgaggcagccggggcccaggcaggtgctgaggcagcaagggagggtgtgtctgggccggaccttcccgtctgtgagccctccggggaatctgctgctccagattcagccctgccacatgcggcaaggggctgggcccccttccctgtagctccagtccctgcccacctccgcagaggaggcctgaggcctgccccagcctcaggaggaggagcctggcccagtccgttgccaagccgaagcagcggcatttggacaaagcagatcatctgcaggtgtatccgcaggtggagaagtgccagacagtttgagaacaggatcgtcaagtcttgcccacagtgcagggtcacctctgaattggtcattcccagtgagttctgggtggaggaggaggaagagaagcagaaacttattcagcaatacaaggaggcaatgagcaacaaggcctgcaggttcacagctgtaaagaacttgcctggagtctcagatgagactttggactttggacttttgagttgatgctggaccaagttaagactttgttgataggatgattttatctggcaatgtgagaagaacctgagtttta

SEQ ID NO: 151296 - DNA, 1312 bp, Homo sapiens
  Payload ID: 9787
  Gene Symbol: MKRN3
  Gene Name: makorin ring finger protein 3
  ENST ID: ENST00000568252
  CDS Start-End: 67-384
gcctcaagcccataaagaaaaaataccggagaggttctggcaccatttcggggtgccaaagcagccatggaagagcctgcagctccctcagaagcccacgaggcagccggggcccaggcaggtgctgaggcagcaagggagggtgtgtctgggccggaccttcccgtctgtgagccctccggggaatctgctgctccagattcagccctgccacatgcggcaaggggctgggcccccttccctgtagctccagtccctgcccacctccgcagaggaggcctgaggcctgccccagcctcaggaggaggagcctggcccagtccgttgccaagccgaagcagcggcatttggacaaagcagatcatctgcagagatatttgttgagtgatgtttcaggctggaagcggtgagccactgacagggatcagagaattccccacagaatttggcagtcacatgcatggatttagaaagacaaagttggaaatgaattgttgcagctaatttctccctcaagacattgtctacattctgaagctagatctggtggcagaggagactaaggagctcagtatttccacatagtaacaacaaacattctaaaaagaaacaagagaacaatcttacttacaacagcttcaaaaaataaaatatttagaaataagtttaaccaagaaggtgaaagacctgtacactgaaaaatgttaataacaaaaattatagaagacacaaataaattggaagatattctgtgttcatagattggaagaataatgttgctaaaatgtccatactaccccaaatgacttatagactcaaagcaatttctaacaaaattgtaatgtaattattcatagtaacagaaaaaaatataaaattaatgtggaaccacaacaaactctgaatagccaaaggaatcatgagtaagaagatgaaagctggaggcaccaaccacatgcatgatttaaaactacactacaaagcaatagtaattaaaacagtgtgatactggcatgaaaatagactcgttggctgggtgcagtggctcacgcctgtaatcccagcacgttgggagtctgaggcaggaagatcatgaggttaggagtttgagaccagcctgaccaacatggtgaaagcccgtctctacaaaaaatacaaaaattagccaggcatggtggcacatgccggtaatcccagctactcaggcaactgaggcaggagaattgcttgaacccgggaggcagaggctgcagtgagcctagattacaccactgcactcccgcctgggtgacagagcaagactctatctcaa

SEQ ID NO: 151297 - DNA, 470 bp, Homo sapiens
  Payload ID: 9787
  Gene Symbol: MKRN3
  Gene Name: makorin ring finger protein 3
  ENST ID: ENST00000570112
  CDS Start-End: 106-192
ttcccccagagaagcctccgagcgcggccgccattccgggcctcaagcccataaagaaaaaataccggagaggttctggcaccatttcggggtgccaaagcagccatggaagagcctgcagctccctcagaagcccacgaggcagccggggcccaggtgtatccgcaggtggagaagtgccagacagtttgagaacaggatcgtcaagtcttgcccacagtgcagggtcacctctgaattggtcattcccagtgagttctgggtggaggaggaggaagagaagcagaaacttattcagcaatacaaggaggcaatgagcaacaaggcctgcaggttcacagctgtaaagaacttgcctggagtctcagatgagactttggactttggacttttgagttgatgctggaccaagttaagactttgttgataggatgattttatctggcaatgtgagaagaacctgagtttta

SEQ ID NO: 151298 - DNA, 831 bp, Homo sapiens
  Payload ID: 9788
  Gene Symbol: MAL
  Gene Name: mal, T-cell differentiation protein
  Uniprot ID: P21145
  ENST ID: ENST00000354078
  CDS Start-End: 1-294
atggcccccgcagcggcgacggggggcagcaccctgcccagtggcttctcggtcttcaccaccttgcccgacttgctcttcatctttgagtttgacgcagcctaccactgcaccgctgccctcttttacctcagcgcctcagtcctggaggccctggccaccatcacgatgcaagacggcttcacctacaggcactaccatgaaaacattgctgccgtggtgttctcctacatagccactctgctctacgtggtccatgcggtgttctctttaatcagatggaagtcttcataaagccgcagtagaacttgagctgaaaacccagatggtgttaactggccgccccactttccggcataactttttagaaaacagaaatgcccttgatggtggaaaaaagaaaacaaccacccccccactgcccaaaaaaaaaagccctgccctgttgctcgtgggtgctgtgtttactctcccgtgtgccttcgcgtccgggttgggagcttgctgtgtctaacctccaactgctgtgctgtctgctagggtcacctcctgtttgtgaaaggggaccttcttgttcgggggtgggaagtggcgaccgtgacctgagaaggaaagaaagatcctctgctgacccctggagcagctctcgagaactacctgttggtattgtccacaagctctcccgagcgccccatcttgtgccatgttttaagtcttcatggatgttctgcatgtcatggggactaaaactcacccaacagatctttccagaggtccatggtggaagacgataaccctgtgaaatactttataaaatgtcttaatgttcaa

SEQ ID NO: 151299 - DNA, 873 bp, Homo sapiens
  Payload ID: 9788
  Gene Symbol: MAL
  Gene Name: mal, T-cell differentiation protein
  Uniprot ID: P21145
  ENST ID: ENST00000353004
  CDS Start-End: 1-336
atggcccccgcagcggcgacggggggcagcaccctgcccagtggcttctcggtcttcaccaccttgcccgacttgctcttcatctttgagtttatcttcgggggcctggtgtggatcctggtggcctcctccctggtgccctggcccctggtccagggctgggtgatgttcgtgtctgtgttctgcttcgtggccaccaccaccttgatcatcctgtacataattggagcccacggtggagagacttcctgggtcaccttggtgttctcctacatagccactctgctctacgtggtccatgcggtgttctctttaatcagatggaagtcttcataaagccgcagtagaacttgagctgaaaacccagatggtgttaactggccgccccactttccggcataactttttagaaaacagaaatgcccttgatggtggaaaaaagaaaacaaccacccccccactgcccaaaaaaaaaagccctgccctgttgctcgtgggtgctgtgtttactctcccgtgtgccttcgcgtccgggttgggagcttgctgtgtctaacctccaactgctgtgctgtctgctagggtcacctcctgtttgtgaaaggggaccttcttgttcgggggtgggaagtggcgaccgtgacctgagaaggaaagaaagatcctctgctgacccctggagcagctctcgagaactacctgttggtattgtccacaagctctcccgagcgccccatcttgtgccatgttttaagtcttcatggatgttctgcatgtcatggggactaaaactcacccaacagatctttccagaggtccatggtggaagacgataaccctgtgaaatactttataaaatgtcttaatgttcaa

SEQ ID NO: 151300 - DNA, 1112 bp, Homo sapiens
  Payload ID: 9788
  Gene Symbol: MAL
  Gene Name: mal, T-cell differentiation protein
  Uniprot ID: P21145
  ENST ID: ENST00000309988
  CDS Start-End: 110-571
cccgcgcgcgggggcgcccaggccactgggctccgcggagccagcgagaggtctgcgcggagtctgagcggcgctcgtcccgtcccaaggccgacgccagcacgccgtcatggcccccgcagcggcgacggggggcagcaccctgcccagtggcttctcggtcttcaccaccttgcccgacttgctcttcatctttgagtttatcttcgggggcctggtgtggatcctggtggcctcctccctggtgccctggcccctggtccagggctgggtgatgttcgtgtctgtgttctgcttcgtggccaccaccaccttgatcatcctgtacataattggagcccacggtggagagacttcctgggtcaccttggacgcagcctaccactgcaccgctgccctcttttacctcagcgcctcagtcctggaggccctggccaccatcacgatgcaagacggcttcacctacaggcactaccatgaaaacattgctgccgtggtgttctcctacatagccactctgctctacgtggtccatgcggtgttctctttaatcagatggaagtcttcataaagccgcagtagaacttgagctgaaaacccagatggtgttaactggccgccccactttccggcataactttttagaaaacagaaatgcccttgatggtggaaaaaagaaaacaaccacccccccactgcccaaaaaaaaaagccctgccctgttgctcgtgggtgctgtgtttactctcccgtgtgccttcgcgtccgggttgggagcttgctgtgtctaacctccaactgctgtgctgtctgctagggtcacctcctgtttgtgaaaggggaccttcttgttcgggggtgggaagtggcgaccgtgacctgagaaggaaagaaagatcctctgctgacccctggagcagctctcgagaactacctgttggtattgtccacaagctctcccgagcgccccatcttgtgccatgttttaagtcttcatggatgttctgcatgtcatggggactaaaactcacccaacagatctttccagaggtccatggtggaagacgataaccctgtgaaatactttataaaatgtcttaatgttcaataca

SEQ ID NO: 151301 - DNA, 705 bp, Homo sapiens
  Payload ID: 9788
  Gene Symbol: MAL
  Gene Name: mal, T-cell differentiation protein
  Uniprot ID: P21145
  ENST ID: ENST00000349807
  CDS Start-End: 1-168
atggcccccgcagcggcgacggggggcagcaccctgcccagtggcttctcggtcttcaccaccttgcccgacttgctcttcatctttgagtttgtgttctcctacatagccactctgctctacgtggtccatgcggtgttctctttaatcagatggaagtcttcataaagccgcagtagaacttgagctgaaaacccagatggtgttaactggccgccccactttccggcataactttttagaaaacagaaatgcccttgatggtggaaaaaagaaaacaaccacccccccactgcccaaaaaaaaaagccctgccctgttgctcgtgggtgctgtgtttactctcccgtgtgccttcgcgtccgggttgggagcttgctgtgtctaacctccaactgctgtgctgtctgctagggtcacctcctgtttgtgaaaggggaccttcttgttcgggggtgggaagtggcgaccgtgacctgagaaggaaagaaagatcctctgctgacccctggagcagctctcgagaactacctgttggtattgtccacaagctctcccgagcgccccatcttgtgccatgttttaagtcttcatggatgttctgcatgtcatggggactaaaactcacccaacagatctttccagaggtccatggtggaagacgataaccctgtgaaatactttataaaatgtcttaatgttcaa

SEQ ID NO: 151302 - DNA, 2818 bp, Homo sapiens
  Payload ID: 9789
  Gene Symbol: MAL2
  Gene Name: mal, T-cell differentiation protein 2 (gene/pseudogene)
  Uniprot ID: Q969L2
  ENST ID: ENST00000614891
  CDS Start-End: 103-633
agcccgcggagctgagcggcggcggcggcggcggcaggagcccgggaggcggaggcgggaggcggcggcggcgcgcggagacgcagcagcggcagcggcagcatgtcggccggcggagcgtcagtcccgccgcccccgaaccccgccgtgtccttcccgccgccccgggtcaccctgcccgccggccccgacatcctgcggacctactcgggcgccttcgtctgcctggagattctgttcgggggtcttgtctggattttggttgcctcctccaatgttcctctacctctactacaaggatgggtcatgtttgtgtccgtgacagcgtttttcttttcgctcctctttctgggcatgttcctctctggcatggtggctcaaattgatgctaactggaacttcctggattttgcctaccattttacagtatttgtcttctattttggagcctttttattggaagcagcagccacatccctgcatgatttgcattgcaatacaaccataaccgggcagccactcctgagtgataaccagtataacataaacgtagcagcctcaatttttgcctttatgacgacagcttgttatggttgcagtttgggtctggctttacgaagatggcgaccgtaacactccttagaaactggcagtcgtatgttagtttcacttgtctactttatatgtctgatcaatttggataccattttgtccagatgcaaaaacattccaaaagtaatgtgtttagtagagagagactctaagctcaagttctggtttatttcatggatggaatgttaattttattatgatattaaagaaatggccttttattttacatctctcccctttttccctttccccctttattttcctccttttctttctgaaagtttccttttatgtccataaaatacaaatatattgttcataaaaaattagtatcccttttgtttggttgctgagtcacctgaaccttaattttaattggtaattacagcccctaaaaaaaacacatttcaaataggcttcccactaaactctatattttagtgtaaaccaggaattggcacactttttttagaatgggccagatggtaaatatttatgcttcacggtccatacagtctctgtcacaactattcagttctgctagtatagcgtgaaagcagctatacacaatacagaaatgaatgagtgtggttatgttctaataaaacttatttataaaaacaaggggaggctgggtttagcctgtgggccatagtttgtcaaccactggtgtaaaaccttagttatatatgatctgcattttcttgaactgatcattgaaaacttataaacctaacagaaaagccacataatatttagtgtcattatgcaataatcacattgcctttgtgttaatagtcaaatacttacctttggagaatacttacctttggaggaatgtataaaatttctcaggcagagtcctggatataggaaaaagtaatttatgaagtaaacttcagttgcttaatcaaactaatgatagtctaacaactgagcaagatcctcatctgagagtgcttaaaatgggatccccagagaccattaaccaatactggaactggtatctagctactgatgtcttactttgagtttatttatgcttcagaatacagttgtttgccctgtgcatgaatatacccatatttgtgtgtggatatgtgaagcttttccaaatagagctctcagaagaattaagtttttacttctaattattttgcattactttgagttaaatttgaatagagtattaaatataaagttgtagattcttatgtgtttttgtattagcccagacatctgtaatgtttttgcactggtgacagacaaaatctgttttaaaatcatatccagcacaaaaactatttctggctgaatagcacagaaaagtattttaacctacctgtagagatcctcgtcatggaaaggtgccaaactgttttgaatggaaggacaagtaagagtgaggccacagttcccaccacacgagggcttttgtattgttctactttttcagccctttactttctggctgaagcatccccttggagtgccatgtataagttgggctattagagttcatggaacatagaacaaccatgaatgagtggcatgatccgtgcttaatgatcaagtgttacttatctaataatcctctagaaagaaccctgttagatcttggtttgtgataaaaatataaagacagaagacatgaggaaaaacaaaaggtttgaggaaatcaggcatatgactttatacttaacatcagatcttttctataatatcctactactttggttttcctagctccataccacacacctaaacctgtattatgaattacatattacaaagtcataaatgtgccatatggatatacagtacattctagttggaatcgtttactctgctagaatttaggtgtgagattttttgtttcccaggtatagcaggcttatgtttggtggcattaaattggtttctttaaaatgctttggtggcacttttgtaaacagattgcttctagattgttacaaaccaagcctaagacacatctgtgaatacttagatttgtagcttaatcacattctagacttgtgagttgaatgacaaagcagttgaacaaaaattatggcatttaagaatttaacatgtcttagctgtaaaaatgagaaagtgttggttggttttaaaatctggtaactccatgatgaaaagaaatttattttatacgtgttatgtctctaataaagtattcatttgataa

SEQ ID NO: 151303 - DNA, 578 bp, Homo sapiens
  Payload ID: 9789
  Gene Symbol: MAL2
  Gene Name: mal, T-cell differentiation protein 2 (gene/pseudogene)
  ENST ID: ENST00000534619
  CDS Start-End: 218-544
ataagcaccccactttttaagtgtgactggtgacctcgattttaccttctgagtcacagcaccaagacctgtgtatctgtcaaactgagcacagtgggcgagggcgcgctgtgagagctggggagaagacaggtggagagcacagctgttcgggggtcttgtctggattttggttgcctcctccaatgttcctctacctctactacaaggatgggtcatgtttgtgtccgtgacagcgtttttcttttcgctcctctttctgggcatgttcctctctggcatggtggctcaaattgatgctaactggaacttcctggattttgcctaccattttacagtatttgtcttctattttggagcctttttattggaagcagcagccacatccctgcatgatttgcattgcaatacaaccataaccgggcagccactcctgagtgataaccagtataacataaacgtagcagcctcaatttttgcctttatgacgacagcttgttatggttgcagtttgggtctggctttacgaagatggcgaccgtaacactccttagaaactggcagtcgtatgttagttt

SEQ ID NO: 151304 - DNA, 573 bp, Homo sapiens
  Payload ID: 9789
  Gene Symbol: MAL2
  Gene Name: mal, T-cell differentiation protein 2 (gene/pseudogene)
  ENST ID: ENST00000522112
  CDS Start-End: 207-533
agattccatgggcgtaggaccctccgagccagggcaagaagttgcaggaaaaatggcttctagcagtggaacttcctcatacacgtgatctgtttctgattagagaactgcaggaggtgaaaattgggttcaagctgttcgggggtcttgtctggattttggttgcctcctccaatgttcctctacctctactacaaggatgggtcatgtttgtgtccgtgacagcgtttttcttttcgctcctctttctgggcatgttcctctctggcatggtggctcaaattgatgctaactggaacttcctggattttgcctaccattttacagtatttgtcttctattttggagcctttttattggaagcagcagccacatccctgcatgatttgcattgcaatacaaccataaccgggcagccactcctgagtgataaccagtataacataaacgtagcagcctcaatttttgcctttatgacgacagcttgttatggttgcagtttgggtctggctttacgaagatggcgaccgtaacactccttagaaactggcagtcgtatgttagtttcacttg

SEQ ID NO: 151305 - DNA, 892 bp, Homo sapiens
  Payload ID: 9789
  Gene Symbol: MAL2
  Gene Name: mal, T-cell differentiation protein 2 (gene/pseudogene)
  ENST ID: ENST00000531508
  CDS Start-End: 406-732
gaacattggggacgtggaggaaagaaaggtgttggggctcagaggcgcctttagaaacccagggcatggccaggggccgcgcttggccggagcgagctcctggctctcggcctcgcctgttgctaacctgccattttgttgggtggtgcaaaggtgtagccgatgactgggtgacctggtggctgccacgctgtggaaagtgggggcgggaggcaacaggaagaggaagagggctgaggacttgaacatgctttttccccactcacccttgccatcattagtggcctttggattggaaagaggagctgggcaggaggcagggcaaggagaaagctgttcgggggtcttgtctggattttggttgcctcctccaatgttcctctacctctactacaaggatgggtcatgtttgtgtccgtgacagcgtttttcttttcgctcctctttctgggcatgttcctctctggcatggtggctcaaattgatgctaactggaacttcctggattttgcctaccattttacagtatttgtcttctattttggagcctttttattggaagcagcagccacatccctgcatgatttgcattgcaatacaaccataaccgggcagccactcctgagtgataaccagtataacataaacgtagcagcctcaatttttgcctttatgacgacagcttgttatggttgcagtttgggtctggctttacgaagatggcgaccgtaacactccttagaaactggcagtcgtatgttagtttcacttgtctactttatatgtctgatcaatttggataccattttgtccagatgcaaaaacattccaaaagtaatgtgtttagtagagagagactctaagctcaagttctggtttatttcatggatgg

SEQ ID NO: 151306 - DNA, 3061 bp, Homo sapiens
  Payload ID: 9790
  Gene Symbol: MALL
  Gene Name: mal, T-cell differentiation protein-like
  Uniprot ID: Q13021
  ENST ID: ENST00000272462
  CDS Start-End: 775-1236
actagaggcagcagccagccagcccagcccttctctggtgcctgccggtgtggtcctctcccagagactggggggccttcatctgccccatgaggaaaagaggagtggaggaccatggaaagggatccagaaaaagaaggaaacaccaagtcccaggggcatgagctggaagggagggctgctcctcccaggggaggctggggactgagagctgtccccaagagtggaaaaggagggagctgggcaagacccagcattgttagtaaccagctctgtggtcttgacttgacctcactgattctcagtctcctcacttggaaaagggcaaaacagccacgtgcaggccgtggtgggcacccgggctgtctgcagatagcttggctcattgttggtcctcagtacgcagccctcgtagccaagcagcttgggcctacactctgggcccaggggagtggctgtcgctggcatcccctggaataacatgctccgggggtcaaagattccttagctggaaaggtctaggaggagactcccgctctgctccctcctgcaccagcgctgtgccccccgccggccaggcagagccatccgatgccgctgggccgcccactgaggatctgctggctgcagcgagtggaaggacctgctcggctggaacgttttttttttttttccctcccaggcgacgtccgatgggtgtgtcgggcaggaggtgatatttgacaggctgcgcgcgggcgagctgccgcggagcacccggcaggggctgacagcatggcctcgcccgacccgcccgccaccagctacgccccgtccgacgtgccctcgggggtcgcgctgttcctcaccatccctttcgccttcttcctgcccgagctgatatttgggttcttggtctggaccatggtagccgccacccacatagtataccccttgctgcaaggatgggtgatgtatgtctcgctcacctcgtttctcatctccttgatgttcctgttgtcttacttgtttggattttacaaaagatttgaatcctggagagttctggacagcctgtaccacgggaccactggcatcctgtacatgagcgctgccgtcctacaagtacatgccacgattgtttctgagaaactgctggacccaagaatttactacattaattcggcagcctcgttcttcgccttcatcgccacgctgctctacattctccatgccttcagcatctattaccactgatgcacaggcgccaggccaagggggaaatgctctttgaaagctccaattattggtccccaaaagcagcttccaacgtttgccatctggatgacaaacggaagatccactaaaacgtccacgggattaacagaacgtccttgcagactgagcgatgacaccacactttgtttggacatttaaattcactctgctgaataggaggaagcttttctttttcctgggaaaacaactgtctcttggaattatctgaccatgaacttgctcttctagacaactcacatcaaagccctcactccactaatggagaatcctagccccactaatgccaagtctgtttggggattttgcctcagctatgggcttccctagagtaggtctaggggaatactcagtctgatcttttttttgtttgttttattttgttttttttgagacggagtctcgctcttcctccaaggctggagtgcagtgacgcgatctccactcactgcaggctccgcctcccgggttcccgccattctcctgcctcagcctcccgagtagccgggactacaggcgcccaccaccgtgcccggctaatttagttgtatttttagtagagatggggtttcaccgtattagccaggatggtctcgatctcctgacctcgtgatccgcccgcctcggcctcccaaagtgctgggattacaggcgtgagccaccgcgcccggcctgattctcttaaaattgaagaggtgctgccaaggccttcagatctaacgcagatgcatagaccttgttcctggtacttgttcagcctgtgctggggagccgtggtcccgagttccctgggaggctgacagggtcaagccaccctgcccaccaccctcccacttcccctcccctttcctctccagcattaggattcaagggaaatttgcatgaagccaattttgagggtagacgtgtggggaaaataaatcattatacagtaagacctggggcttgaggggtggggaatggggagggaagggcatagcctgctcctccatgagtctgacatctcggaaactgagcagctgccggacgcctgggtcaggaatccaagaccccacctcttaaggactggttcctcagaaagcaccctcagggaaaaaggtgaaaacattacatccgtggattctcctgccacaaccgcattggaagaaaaggctgccgcaacatctcagcgaggagtgaaggacccatgtcccaggaaccgcgctgcgccacctgcactcacccccctcacattctcttaagcacccggtggccctccgaggcctggcggaatggtggtgcccacggggttgggcaagggctcaccaggacctcaacgggcaaagttgtgcacactaaaatatcaaatcaaggtgcttggttttaaagtaaatgtttttctaaagaaagctgtgctcttctgttgacccagacgaatagggcacagccctgtaactgcacgtgccttctgtcattgggaatgaaataaattattacgagaaagggacttgtcctaactggtttgaggccttacagttttgtatctacatttttcccctcctggggtttgcggggacagggacagaactacaggagtcatgggaaagaaaattctggcttcactactgctcactgctcactttctgatcactctgatacttttttttttttttttttttttgcaacctgataccttgaaaagcttctatgtgtctctccttttgttgcctggcagctgtctaggatgatcactgattactatttactaagtagccacatgcaaataaaagttgtttggtaaaaagga

SEQ ID NO: 151307 - DNA, 580 bp, Homo sapiens
  Payload ID: 9790
  Gene Symbol: MALL
  Gene Name: mal, T-cell differentiation protein-like
  ENST ID: ENST00000424988
  CDS Start-End: 30-392
ccgcggagcacccggcaggggctgacagcatggcctcgcccgacccgcccgccaccagctacgccccgtccgacgtgccctcgggggtcgcgctgttcctcaccatccctttcgccttcttcctgcccgagctgggcatcattactcaggcagcgtctgtctcagaacctcagtgtgtgatcccggcccctgcagcagcccctctcccacccatgaggggcttccagctgctctgtgcagatatttgggttcttggtctggaccatggtagccgccacccacatagtataccccttgctgcaaggatgggtgatgtatgtctcgctcacctcgtttctcatctccttgatgttcctgttgtcttacttgtttggattttacaaaagatttgaatcctggagagttctggacagcctgtaccacgggaccactggcatcctgtacatgagcgctgccgtcctacaagtacatgccacgattgtttctgagaaactgctggacccaagaatttactacattaattcggcagcctcgttcttcgccttcatcgccacgctgctctacattctccatgccttca

SEQ ID NO: 151308 - DNA, 1070 bp, Homo sapiens
  Payload ID: 9790
  Gene Symbol: MALL
  Gene Name: mal, T-cell differentiation protein-like
  ENST ID: ENST00000427178
  CDS Start-End: 231-398
ctcctgcaccagcgctgtgccccccgccggccaggcagagccatccgatgccgctgggccgcccactgaggatctgctggctgcagcgagtggaaggacctgctcggctggaacgttttttttttttttccctcccaggcgacgtccgatgggtgtgtcgggcaggaggtgatatttgacaggctgcgcgcgggcgagctgccgcggagcacccggcaggggctgacagcatggcctcgcccgacccgcccgccaccagctacgccccgtccgacgtgccctcgggggtcgcgctgttcctcaccatccctttcgccttcttcctgcccgagctgttcttcgccttcatcgccacgctgctctacattctccatgccttcagcatctattaccactgatgcacaggcgccaggccaagggggaaatgctctttgaaagctccaattattggtccccaaaagcagcttccaacgtttgccatctggatgacaaacggaagatccactaaaacgtccacgggattaacagaacgtccttgcagactgagcgatgacaccacactttgtttggacatttaaattcactctgctgaataggaggaagcttttctttttcctgggaaaacaactgtctcttggaattatctgaccatgaacttgctcttctagacaactcacatcaaagccctcactccactaatggagaatcctagccccactaatgccaagtctgtttggggattttgcctcagctatgggcttccctagagtaggtctaggggaatactcagtctgatcttttttttgtttgttttattttgttttttttgagacggagtctcgctcttcctccaaggctggagtgcagtgacgcgatctccactcactgcaggctccgcctcccgggttcccgccattctcctgcctcagcctcccgagtagccgggactacaggcgcccaccaccgtgcccggctaatttagttgtatttttagtagagatggggtttcaccgtattagccaggatggtctcgatctcctgacctcgtgatccgcccgcctcggcctccc

SEQ ID NO: 151309 - DNA, 1650 bp, Homo sapiens
  Payload ID: 9791
  Gene Symbol: MDH1
  Gene Name: malate dehydrogenase 1, NAD (soluble)
  Uniprot ID: P40925
  ENST ID: ENST00000233114
  CDS Start-End: 436-1440
gcgcgtgggggtgatgtcgctaaggggtgattctcccctccctagagttacacacgctatctctcccgccaattgccgggctccatcaggcaggtcctttcctcctgagcccaaaccatccgtttgttgtcgtcctccaatcacaggggctcatcctcagggactactttgcaatcggcgcagagcgcagtgagaagagcttgaaaaaaacctctggtatcgggaagtgtagttcaacacttgaaggaaatgctttggagattgcgccacaaccagggcagcgtaaactacagttcccagagagcgccgcgtcgggagcggagccttttctcgctaacaccgctcgccctctccgagtcagttccgcggtagaggtgacctgactctctgaggctcattttgcagttgttgaaattgtccccgcagttttcaatcatgtctgaaccaatcagagtccttgtgactggagcagctggtcaaattgcatattcactgctgtacagtattggaaatggatctgtctttggtaaagatcagcctataattcttgtgctgttggatatcacccccatgatgggtgtcctggacggtgtcctaatggaactgcaagactgtgcccttcccctcctgaaagatgtcatcgcaacagataaagaagacgttgccttcaaagacctggatgtggccattcttgtgggctccatgccaagaagggaaggcatggagagaaaagatttactgaaagcaaatgtgaaaatcttcaaatcccagggtgcagccttagataaatacgccaagaagtcagttaaggttattgttgtgggtaatccagccaataccaactgcctgactgcttccaagtcagctccatccatccccaaggagaacttcagttgcttgactcgtttggatcacaaccgagctaaagctcaaattgctcttaaacttggtgtgactgctaatgatgtaaagaatgtcattatctggggaaaccattcctcgactcagtatccagatgtcaaccatgccaaggtgaaattgcaaggaaaggaagttggtgtttatgaagctctgaaagatgacagctggctcaagggagaatttgtcacgactgtgcagcagcgtggcgctgctgtcatcaaggctcgaaaactatccagtgccatgtctgctgcaaaagccatctgtgaccacgtcagggacatctggtttggaaccccagagggagagtttgtgtccatgggtgttatctctgatggcaactcctatggtgttcctgatgatctgctctactcattccctgttgtaatcaagaataagacctggaagtttgttgaaggtctccctattaatgatttctcacgtgagaagatggatcttactgcaaaggaactgacagaagaaaaagaaagtgcttttgaatttctttcctctgcctgactagacaatgatgttactaaatgcttcaaagctgaagaatctaaatgtcgtctttgactcaagtaccaaataataataatgctatacttaaattacttgtgaaaaacaacacattttaaagattacgtgcttcttggtacaggtttgtgaatgacagtttatcgtcatgctgttagtgtgcattctaaataaatatatattcaaatgaaa

SEQ ID NO: 151310 - DNA, 808 bp, Homo sapiens
  Payload ID: 9791
  Gene Symbol: MDH1
  Gene Name: malate dehydrogenase 1, NAD (soluble)
  ENST ID: ENST00000409476
  CDS Start-End: 72-704
cgcggtagaggtgacctgactctctgaggctcattttgcagttgttgaaattgtccccgcagttttcaatcatggttattgttgtgggtaatccagccaataccaactgcctgactgcttccaagtcagctccatccatccccaaggagaacttcagttgcttgactcgtttggatcacaaccgagctaaagctcaaattgctcttaaacttggtgtgactgctaatgatgtaaagaatgtcattatctggggaaaccattcctcgactcagtatccagatgtcaaccatgccaaggtgaaattgcaaggaaaggaagttggtgtttatgaagctctgaaagatgacagctggctcaagggagaatttgtcacgactgtgcagcagcgtggcgctgctgtcatcaaggctcgaaaactatccagtgccatgtctgctgcaaaagccatctgtgaccacgtcagggacatctggtttggaaccccagagggagagtttgtgtccatgggtgttatctctgatggcaactcctatggtgttcctgatgatctgctctactcattccctgttgtaatcaagaataagacctggaagtttgttgaaggtctccctattaatgatttctcacgtgagaagatggatcttactgcaaaggaactgacagaagaaaaagaaagtgcttttgaatttctttcctctgcctgactagacaatgatgttactaaatgcttcaaagctgaagaatctaaatgtcgtctttgactcaagtaccaaataataataatgctatacttaaattacttgtgaaa

SEQ ID NO: 151311 - DNA, 700 bp, Homo sapiens
  Payload ID: 9791
  Gene Symbol: MDH1
  Gene Name: malate dehydrogenase 1, NAD (soluble)
  ENST ID: ENST00000409908
  CDS Start-End: 87-596
tctccgagtcagttccgcggtagaggtgacctgactctctgaggctcattttgcagttgttgaaattgtccccgcagttttcaatcatgattgctcttaaacttggtgtgactgctaatgatgtaaagaatgtcattatctggggaaaccattcctcgactcagtatccagatgtcaaccatgccaaggtgaaattgcaaggaaaggaagttggtgtttatgaagctctgaaagatgacagctggctcaagggagaatttgtcacgactgtgcagcagcgtggcgctgctgtcatcaaggctcgaaaactatccagtgccatgtctgctgcaaaagccatctgtgaccacgtcagggacatctggtttggaaccccagagggagagtttgtgtccatgggtgttatctctgatggcaactcctatggtgttcctgatgatctgctctactcattccctgttgtaatcaagaataagacctggaagtttgttgaaggtctccctattaatgatttctcacgtgagaagatggatcttactgcaaaggaactgacagaagaaaaagaaagtgcttttgaatttctttcctctgcctgactagacaatgatgttactaaatgcttcaaagctgaagaatctaaatgtcgtctttgactcaagtaccaaataataataatgctatacttaaattacttgtgaaa

SEQ ID NO: 151312 - DNA, 680 bp, Homo sapiens
  Payload ID: 9791
  Gene Symbol: MDH1
  Gene Name: malate dehydrogenase 1, NAD (soluble)
  ENST ID: ENST00000436321
  CDS Start-End: 322-680
ggtgacctgactctctgaggctcattttgcagttgttgaaattgtccccgcagttttcaatcatgaatgtggagaaatgtttgaatgaattggaaatttcccagaacctgaaaagacacgttttcaaggcaagggcattactctctctgcctgtctaacggggccagtggagacagctactaatttccatctgaaccaatcagagtccttgtgactggagcagctggtcaaattgcatattcactgctgtacagtattggaaatggatctgtctttggtaaagatcagcctataattcttgtgctgttggatatcacccccatgatgggtgtcctggacggtgtcctaatggaactgcaagactgtgcccttcccctcctgaaagatgtcatcgcaacagataaagaagacgttgccttcaaagacctggatgtggccattcttgtgggctccatgccaagaagggaaggcatggagagaaaagatttactgaaagcaaatgtgaaaatcttcaaatcccagggtgcagccttagataaatacgccaagaagtcagttaaggttattgttgtgggtaatccagccaataccaactgcctgactgcttccaagtcagctccatccatccccaaggagaacttcagttgcttgactcgtttggatcacaaccgagctaaagc

SEQ ID NO: 151313 - DNA, 785 bp, Homo sapiens
  Payload ID: 9791
  Gene Symbol: MDH1
  Gene Name: malate dehydrogenase 1, NAD (soluble)
  ENST ID: ENST00000442225
  CDS Start-End: 584-785
gagtcagttccgcggtagaggtgacctgactctctgaggctcattttgcagttgttgaaattgtccccgcagttttcaatcatggagtttcgctcttgttgcccaggctggaatacaatggcacgatctccactcactcaacctctgcctcccgggttcaagtgattcacctgcctcagccttccaaatagctgggagatgcctgccaccacacccagctaattctgtatttttagtagagacggggtttctccatattggtcaggctggtctcaaactcccaacctcaggtgatccgcctgcctcagcctcccaaagtgctgagattacaggcatgagccaccatccctggcctgacacttcttttttgaaatttttttttttctttgacttctatgagtgagtaccaaattgctgagtgctgctaactttcagagcttagtgtcagaagcttgaaagaagccttcgaggctatccatccttgtttcgtctcagagacgtgactctcatctggaagaaggaactttaagtaaaaagaaaccaaacacttctgggcttagtcacatcagtggaccatttctccatgcagtctgaaccaatcagagtccttgtgactggagcagctggtcaaattgcatattcactgctgtacagtattggaaatggatctgtctttggtaaagatcagcctataattcttgtgctgttggatatcacccccatgatgggtgtcctggacggtgtcctaatggaactgcaagactgtgcccttcccctcctgaaag

SEQ ID NO: 151314 - DNA, 573 bp, Homo sapiens
  Payload ID: 9791
  Gene Symbol: MDH1
  Gene Name: malate dehydrogenase 1, NAD (soluble)
  ENST ID: ENST00000421012
  CDS Start-End: 4-267
aaaatgcgacgctgcagctattttccaaaggacgttacggtgtttgataaggacgataagtctgaaccaatcagagtccttgtgactggagcagctggtcaaattgcatattcactgctgtacagtattggaaatggatctgtctttggtaaagatcagatgtcatcgcaacagataaagaagacgttgccttcaaagacctggatgtggccattcttgtgggctccatgccaagaagggaaggcatggagagaaaagatttactgaaagcaaatgtgaaaatcttcaaatcccagggtgcagccttagataaatacgccaagaagtcagttaaggttattgttgtgggtaatccagccaataccaactgcctgactgcttccaagtcagctccatccatccccaaggagaacttcagttgcttgactcgtttggatcacaaccgagctaaagctcaaattgctcttaaacttggtgtgactgctaatgatgtaaagaatgtcattatctggggaaaccattcctcgactcagtatccagatgtcaaccatgccaaggtgaaattgcaaggaa

SEQ ID NO: 151315 - DNA, 575 bp, Homo sapiens
  Payload ID: 9791
  Gene Symbol: MDH1
  Gene Name: malate dehydrogenase 1, NAD (soluble)
  ENST ID: ENST00000454035
  CDS Start-End: 234-575
tgaggctcattttgcagttgttgaaattgtccccgcagttttcaatcatgtgagtaccaaattgctgagtgctgctaactttcagagcttagtgtcagaagcttgaaagaagccttcgaggctatccatccttgtttcgtctcagagacgtgactctcatctggaagaaggaactttaagtaaaaagaaaccaaacacttctgggcttagtcacatcagtggaccatttctccatgcagtctgaaccaatcagagtccttgtgactggagcagctggtcaaattgcatattcactgctgtacagtattggaaatggatctgtctttggtaaagatcagcctataattcttgtgctgttggatatcacccccatgatgggtgtcctggacggtgtcctaatggaactgcaagactgtgcccttcccctcctgaaagatgtcatcgcaacagataaagaagacgttgccttcaaagacctggatgtggccattcttgtgggctccatgccaagaagggaaggcatggagagaaaagatttactgaaagcaaatgtgaaaatcttcaaatcccagggt

SEQ ID NO: 151316 - DNA, 844 bp, Homo sapiens
  Payload ID: 9791
  Gene Symbol: MDH1
  Gene Name: malate dehydrogenase 1, NAD (soluble)
  ENST ID: ENST00000432309
  CDS Start-End: 178-844
ccttcgcgccctttggcaagctcggactcatcttctggggattgccgcagtgacccagtaatgggaagggattgatttccaccttgcggggtatggggcgctcttaggaggactctggagaagtagttgtcctgggagaggagcgatcttaatcctgctgcatgacgggaggacaaaatgcgacgctgcagctattttccaaaggacgttacggtgtttgataaggacgataagtctgaaccaatcagagtccttgtgactggagcagctggtcaaattgcatattcactgctgtacagtattggaaatggatctgtctttggtaaagatcagcctataattcttgtgctgttggatatcacccccatgatgggtgtcctggacggtgtcctaatggaactgcaagactgtgcccttcccctcctgaaagatgtcatcgcaacagataaagaagacgttgccttcaaagacctggatgtggccattcttgtgggctccatgccaagaagggaaggcatggagagaaaagatttactgaaagcaaatgtgaaaatcttcaaatcccagggtgcagccttagataaatacgccaagaagtcagttaaggttattgttgtgggtaatccagccaataccaactgcctgactgcttccaagtcagctccatccatccccaaggagaacttcagttgcttgactcgtttggatcacaaccgagctaaagctcaaattgctcttaaacttggtgtgactgctaatgatgtaaagaatgtcattatctggggaaaccattcctcgactcagtatccagatgtcaaccatgccaaggtgaaattgcaaggaa

SEQ ID NO: 151317 - DNA, 1443 bp, Homo sapiens
  Payload ID: 9791
  Gene Symbol: MDH1
  Gene Name: malate dehydrogenase 1, NAD (soluble)
  Uniprot ID: P40925
  ENST ID: ENST00000539945
  CDS Start-End: 178-1236
ccttcgcgccctttggcaagctcggactcatcttctggggattgccgcagtgacccagtaatgggaagggattgatttccaccttgcggggtatggggcgctcttaggaggactctggagaagtagttgtcctgggagaggagcgatcttaatcctgctgcatgacgggaggacaaaatgcgacgctgcagctattttccaaaggacgttacggtgtttgataaggacgataagtctgaaccaatcagagtccttgtgactggagcagctggtcaaattgcatattcactgctgtacagtattggaaatggatctgtctttggtaaagatcagcctataattcttgtgctgttggatatcacccccatgatgggtgtcctggacggtgtcctaatggaactgcaagactgtgcccttcccctcctgaaagatgtcatcgcaacagataaagaagacgttgccttcaaagacctggatgtggccattcttgtgggctccatgccaagaagggaaggcatggagagaaaagatttactgaaagcaaatgtgaaaatcttcaaatcccagggtgcagccttagataaatacgccaagaagtcagttaaggttattgttgtgggtaatccagccaataccaactgcctgactgcttccaagtcagctccatccatccccaaggagaacttcagttgcttgactcgtttggatcacaaccgagctaaagctcaaattgctcttaaacttggtgtgactgctaatgatgtaaagaatgtcattatctggggaaaccattcctcgactcagtatccagatgtcaaccatgccaaggtgaaattgcaaggaaaggaagttggtgtttatgaagctctgaaagatgacagctggctcaagggagaatttgtcacgactgtgcagcagcgtggcgctgctgtcatcaaggctcgaaaactatccagtgccatgtctgctgcaaaagccatctgtgaccacgtcagggacatctggtttggaaccccagagggagagtttgtgtccatgggtgttatctctgatggcaactcctatggtgttcctgatgatctgctctactcattccctgttgtaatcaagaataagacctggaagtttgttgaaggtctccctattaatgatttctcacgtgagaagatggatcttactgcaaaggaactgacagaagaaaaagaaagtgcttttgaatttctttcctctgcctgactagacaatgatgttactaaatgcttcaaagctgaagaatctaaatgtcgtctttgactcaagtaccaaataataataatgctatacttaaattacttgtgaaaaacaacacattttaaagattacgtgcttcttggtacaggtttgtgaatgacagtttatcgtcatgctgttagtgtgcattctaaataaatatatattcaaatg

SEQ ID NO: 151318 - DNA, 1346 bp, Homo sapiens
  Payload ID: 9791
  Gene Symbol: MDH1
  Gene Name: malate dehydrogenase 1, NAD (soluble)
  Uniprot ID: P40925
  ENST ID: ENST00000544381
  CDS Start-End: 402-1139
ccttcgcgccctttggcaagctcggactcatcttctggggattgccgcagtgacccagtaatgggaagggattgatttccaccttgcggggtatggggcgctcttaggaggactctggagaagtagttgtcctgggagaggagcgatcttaatcctgctgcatgacgggaggacaaaatgcgacgctgcagctattttccaaaggacgttacggtgtttgataaggacgataagtctgaaccaatcagagtccttgtgactggagcagctggtcaaattgcatattcactgctgtacagtattggaaatggatctgtctttggtaaagatcagatgtcatcgcaacagataaagaagacgttgccttcaaagacctggatgtggccattcttgtgggctccatgccaagaagggaaggcatggagagaaaagatttactgaaagcaaatgtgaaaatcttcaaatcccagggtgcagccttagataaatacgccaagaagtcagttaaggttattgttgtgggtaatccagccaataccaactgcctgactgcttccaagtcagctccatccatccccaaggagaacttcagttgcttgactcgtttggatcacaaccgagctaaagctcaaattgctcttaaacttggtgtgactgctaatgatgtaaagaatgtcattatctggggaaaccattcctcgactcagtatccagatgtcaaccatgccaaggtgaaattgcaaggaaaggaagttggtgtttatgaagctctgaaagatgacagctggctcaagggagaatttgtcacgactgtgcagcagcgtggcgctgctgtcatcaaggctcgaaaactatccagtgccatgtctgctgcaaaagccatctgtgaccacgtcagggacatctggtttggaaccccagagggagagtttgtgtccatgggtgttatctctgatggcaactcctatggtgttcctgatgatctgctctactcattccctgttgtaatcaagaataagacctggaagtttgttgaaggtctccctattaatgatttctcacgtgagaagatggatcttactgcaaaggaactgacagaagaaaaagaaagtgcttttgaatttctttcctctgcctgactagacaatgatgttactaaatgcttcaaagctgaagaatctaaatgtcgtctttgactcaagtaccaaataataataatgctatacttaaattacttgtgaaaaacaacacattttaaagattacgtgcttcttggtacaggtttgtgaatgacagtttatcgtcatgctgttagtgtgcattctaaataaatatatattcaaatg

SEQ ID NO: 151319 - DNA, 2553 bp, Homo sapiens
  Payload ID: 9792
  Gene Symbol: MDH1B
  Gene Name: malate dehydrogenase 1B, NAD (soluble)
  Uniprot ID: Q5I0G3
  ENST ID: ENST00000374412
  CDS Start-End: 277-1833
atgttcgcggctgtagctgaaggacttacttgaagaaagtttaccaaggagaatgactaatttccctgcatacaggagtggggctcggggataccacagagcttataagggcgatgtttgatcgtgtatcgcaacgtaacccattcaggtcctaactttaaacacctaacctctgctgggcgccagactttgtagtgcgcctgcgccttgcccttggctgcgtggttgccaggaaaccgcgaagccgcggtccctgcctctgagtctctctcgaccatggccaaattcgtcatcgcgggtagagcagattgtccatattatgctaaaacagaacttgtggcagactatttacaaaagaatcttcctgattttcggatacataaaatcacacaacgtcctgaggtttgggaggattggctaaaagatgtgtgtgaaaagaataagtggagtcacaagaattcccctatcatctggagagagctgttggatcgtggaggaaagggtttgcttttgggaggatataatgagttcctggagcatgctcagctttactatgatgtcacctctagcatgacgactgaactgatgatggtaattgctcaagagaacctgggggcacatatagaaaaagagcaggaggaagaagccctgaaaacttgcatcaaccccttgcaggtctggatcaccagtgcctctgctcctgcctgctacaacctaattcccatattgacgagtggcgaagtgtttgggatgcatacagaaattagcataactctatttgacaacaagcaggcggaagaacatctcaaaagccttgtggtggagacccaagacctggcatctcccgtcctgcgcagtgtctccatctgcacgaaggtggaggaggccttccgccaggcccacgtcattgtggtgctggatgacagcaccaacaaggaggtgttcactctggaggactgcctccgaagcagggtgcctctctgcaggctctatgggtacctgatagagaaaaatgctcatgagtctgtcagagtcatcgtgggagggagaacctttgtaaacctgaagacagttttactcatgagatatgccccacgcattgcacacaacattattgctgtggcgctgggggtggaaggtgaagcgaaagccatactggccagaaaactgaagacagctccttcatacattaaagacgtgatcatttggggtaatatcagtggaaataattacgttgatctgagaaaaacaagggtgtacagatatgagagtgccatttggggacctcttcattattcacgccctgttttaaacttgatttttgacagtgagtgggtaaaaagagaatttgtggcaattcttaaaaacttgaccaccacaggaagacaatttggaggcattttggctgcacacagtatagccactacactgaaatactggtaccatggctcaccacctggggagattgtatctttaggaatattgagtgaaggccagtttggtattccgaaagggatcgtcttttctatgcctgtgaaatttgagaatggaacttgggtggttcttacagatctcaaagatgttgaaataagtgaacaaataatgacccgaatgacaagtgatctaattcaggagaaacttgttgcacttggagacaagatacattttcagccataccaatcaggacataaagatctggtccctgatgaagaaaaaaatctagctatgtcagatgcagcagagtttccaaatcagattcctcaaaccacctttgaaaagccacagagtcttgagttcctaaatgaatttgaaggcaaaaccgtggaatcctaacagatcaaattggatgaaatatataattacttgatagcacaataaacatagaaagaatttatatgaatgtctatatttaaggaagaataatttgaaagatttatgtcagtcttagataataccatgcaaggcaattaaatcactgtgacagcacagaggtcagagttccgtcattttgcattacttgtatccactcatgtttgtttcataataattgcattttcttagaactattttggtgtcaaatgctattttttatattacattaaaatagagttgtcagtcattgcatctgcccatacatcttctgagagaacctgcttccttccatcagccatacctaagacctgcacctaagtggccatgtttgctcaaatgtcctcatcaccttggcctcaactaattaggccaaacagatgtacttcactcaaggagaaccaatcatattttctctctgtctctcaaaaaaaaattgaactgagaccagtgagtaagttggtgtctgggtcaggttaatggtggtgaactatgtgcctgtgagctcttcagagctggttgggttcaccaccttcataagacctgcctctgtaccatttttccttgagtgtgctttgtataaaggtctgtacaataaatcacacttttttaaagcttagattgaataggtttctgctccttgacaagagatatggcctgaataaaatgaattttgaaagaaaa

SEQ ID NO: 151320 - DNA, 1795 bp, Homo sapiens
  Payload ID: 9792
  Gene Symbol: MDH1B
  Gene Name: malate dehydrogenase 1B, NAD (soluble)
  Uniprot ID: Q5I0G3
  ENST ID: ENST00000454776
  CDS Start-End: 16-1569
gagtctctctcgaccatggccaaattcgtcatcgcgggtagagcagattgtccatattatgctaaaacagaacttgtggcagactatttacaaaagaatcttcctgattttcggatacataaaatcacacaacgtcctgaggtttgggaggattggctaaaagatgtgtgtgaaaagaataagtggagtcacaagaattcccctatcatctggagagagctgttggatcgtggaggaaagggtttgcttttgggaggatataatgagttcctggagcatgctcagctttactatgatgtcacctctagcatgacgactgaactgatgatggtaattgctcaagagaacctgggggcacatatagaaaaagagcaggaggaagaagccctgaaaacttgcatcaaccccttgcaggtctggatcaccagtgcctctgctcctgcctgctacaacctaattcccatattgacgagtggcgaagtgtttgggatgcatacagaaattagcataactctatttgacaacaagcaggcggaagaacatctcaaaagccttgtggtggagacccaagacctggcatctcccgtcctgcgcagtgtctccatctgcacgaaggtggaggaggccttccgccaggcccacgtcattgtggtgctggatgacagcaccaacaaggaggtgttcactctggaggactgcctccgaagcagggtgcctctctgcaggctctatgggtacctgatagagaaaaatgctcatgagtctgtcagagtcatcgtgggagggagaacctttgtaaacctgaagacagttttactcatgagatatgccccacgcattgcacacaacattattgctgtggcgctgggggtggaaggtgaagcgaaagccatactggccagaaaactgaagacagctccttcatacattaaagacgtgatcatttggggtaatatcagtggaaataattacgttgatctgagaaaaacaagggtgtacagatatgagagtgccatttggggacctcttcattattcacgccctgttttaaacttgatttttgacagtgagtgggtaaaaagagaatttgtggcaattcttaaaaacttgaccaccacaggaagacaatttggaggcattttggctgcacacagtatagccactacactgaaatactggtaccatggctcaccacctggggagattgtatctttaggaatattgagtgaaggccagtttggtattccgaaagggatcgtcttttctatgcctgtgaaatttgagaatggaacttgggtggttcttacagatctcaaagatgttgaaataagtgaacaaataatgacccgaatgacaagtgatctaattcaggagaaacttgttgcacttggagacaagatacattttcagccataccaatcaggacataaagatctggtccctgatgaagaaaaaaatctagctatgtcagatgcagagtttccaaatcagattcctcaaaccacctttgaaaagccacagagtcttgagttcctaaatgaatttgaaggcaaaaccgtggaatcctaacagatcaaattggatgaaatatataattacttgatagcacaataaacatagaaagaatttatatgaatgtctatatttaaggaagaataatttgaaagatttatgtcagtcttagataataccatgcaaggcaattaaatcactgtgacagcacagaggtcagagttccgtcattttgcattacttgtatccactcatgtttgtttcataataattgcattttctt

SEQ ID NO: 151321 - DNA, 1874 bp, Homo sapiens
  Payload ID: 9792
  Gene Symbol: MDH1B
  Gene Name: malate dehydrogenase 1B, NAD (soluble)
  Uniprot ID: Q5I0G3
  ENST ID: ENST00000432911
  CDS Start-End: 24-875
ctgcctctgagtctctctcgaccatggccaaattcgtcatcgcgggtagagcagattgtccatattatgctaaaacagaacttgtggcagactatttacaaaagaatcttcctgattttcggatacataaaatcacacaacgtcctgaggtttgggaggattggctaaaagatgtgtgtgaaaagaataagtggagtcacaagaattcccctatcatctggagagagctgttggatcgtggaggaaagggtttgcttttgggaggatataatgagttcctggagcatgctcagctttactatgatgtcacctctagcatgacgactgaactgatgatggtaattgctcaagagaacctgggggcacatatagaaaaagagcaggaggaagaagccctgaaaacttgcatcaaccccttgcaggtctggatcaccagtgagtgggtaaaaagagaatttgtggcaattcttaaaaacttgaccaccacaggaagacaatttggaggcattttggctgcacacagtatagccactacactgaaatactggtaccatggctcaccacctggggagattgtatctttaggaatattgagtgaaggccagtttggtattccgaaagggatcgtcttttctatgcctgtgaaatttgagaatggaacttgggtggttcttacagatctcaaagatgttgaaataagtgaacaaataatgacccgaatgacaagtgatctaattcaggagaaacttgttgcacttggagacaagatacattttcagccataccaatcagacacacccaggatcaatactttgcatccttcaatccaatcaagttggcactcggtattaaccatcacaattagaaaaagataagtattatttcatgtatttttttgtttcattaatatgtacacaaatgtacacattggactataatgtaaaatgtgtcttttattgtgggtcatagtcactgaagtttgaaaaacattgactcagaacatctcatgacctagttaggttgttggttatattctaaatccagcatgttttatttaattttgatttcaggacataaagatctggtccctgatgaagaaaaaaatctagctatgtcagatgcagcagagtttccaaatcagattcctcaaaccacctttgaaaagccacagagtcttgagttcctaaatgaatttgaaggcaaaaccgtggaatcctaacagatcaaattggatgaaatatataattacttgatagcacaataaacatagaaagaatttatatgaatgtctatatttaaggaagaataatttgaaagatttatgtcagtcttagataataccatgcaaggcaattaaatcactgtgacagcacagaggtcagagttccgtcattttgcattacttgtatccactcatgtttgtttcataataattgcattttcttagaactattttggtgtcaaatgctattttttatattacattaaaatagagttgtcagtcattgcatctgcccatacatcttctgagagaacctgcttccttccatcagccatacctaagacctgcacctaagtggccatgtttgctcaaatgtcctcatcaccttggcctcaactaattaggccaaacagatgtacttcactcaaggagaaccaatcatattttctctctgtctctcaaaaaaaaattgaactgagaccagtgagtaagttggtgtctgggtcaggttaatggtggtgaactatgtgcctgtgagctcttcagagctggttgggttcaccaccttcataagacctgcctctgtaccatttttccttgagtgtgctttgtataaaggtctgtacaataaatcacacttttttaaagctta

SEQ ID NO: 151322 - DNA, 911 bp, Homo sapiens
  Payload ID: 9792
  Gene Symbol: MDH1B
  Gene Name: malate dehydrogenase 1B, NAD (soluble)
  ENST ID: ENST00000436472
  CDS Start-End: 37-438
gaagccgcggtccctgcctctgagtctctctcgaccatggccaaattcgtcatcgcgggtagagcagattgtccatattatgctaaaacagaacttgtggcagactatttacaaaagaatcttcctgattttcggatacataaaatcacacaacgtcctgaggtttgggaggattggctaaaagatgtgtgtgaaaagaataagtggagtcacaagaattcccctatcatctggagagagctgttggatcgtggaggaaagggtttgcttttgggaggatataatgagttcctggagcatgctcagctttactatgatgtcacctctagcatgacgactgaactgatgatggtaattgctcaagagaacctgggggcacatatagaaaaagagcaggaggaagaagccctgaaaacttgcatcaaccccttgcagtgagtgggtaaaaagagaatttgtggcaattcttaaaaacttgaccaccacaggaagacaatttggaggcattttggctgcacacagtatagccactacactgaaatactggtaccatggctcaccacctggggagattgtatctttaggaatattgagtgaaggccagtttggtattccgaaagggatcgtcttttctatgcctgtgaaatttgagaatggaacttgggtggttcttacagatctcaaagatgttgaaataagtgaacaaataatgacccgaatgacaagtgatctaattcaggagaaacttgttgcacttggagacaagatacattttcagccataccaatcaggacataaagatctggtccctgatgaagaaaaaaatctagctatgtcagatgcagcagagtttccaaatcagattcctcaaaccacctttgaaaagccacagagtcttgagttcctaaatg

SEQ ID NO: 151323 - DNA, 1757 bp, Homo sapiens
  Payload ID: 9792
  Gene Symbol: MDH1B
  Gene Name: malate dehydrogenase 1B, NAD (soluble)
  ENST ID: ENST00000449792
  CDS Start-End: 237-1499
gtggttgccaggaaaccgcgaagccgcggtccctgcctctgagtctctctcgaccatggccaaattcgtcatcgcgggattggctaaaagatgtgtgtgaaaagaataagtggagtcacaagaattcccctatcatctggagagagctgttggatcgtggaggaaagggtttgcttttgggaggatataatgagttcctggagcatgctcagctttactatgatgtcacctctagcatgacgactgaactgatgatggtaattgctcaagagaacctgggggcacatatagaaaaagagcaggaggaagaagccctgaaaacttgcatcaaccccttgcaggtctggatcaccagtgcctctgctcctgcctgctacaacctaattcccatattgacgagtggcgaagtgtttgggatgcatacagaaattagcataactctatttgacaacaagcaggcggaagaacatctcaaaagccttgtggtggagacccaagacctggcatctcccgtcctgcgcagtgtctccatctgcacgaaggtggaggaggccttccgccaggcccacgtcattgtggtgctggatgacagcaccaacaaggaggtgttcactctggaggactgcctccgaagcagggtgcctctctgcaggctctatgggtacctgatagagaaaaatgctcatgagtctgtcagagtcatcgtgggagggagaacctttgtaaacctgaagacagttttactcatgagatatgccccacgcattgcacacaacattattgctgtggcgctgggggtggaaggtgaagcgaaagccatactggccagaaaactgaagacagctccttcatacattaaagacgtgatcatttggggtaatatcagtggaaataattacgttgatctgagaaaaacaagggtgtacagatatgagagtgccatttggggacctcttcattattcacgccctgttttaaacttgatttttgacagtgagtgggtaaaaagagaatttgtggcaattcttaaaaacttgaccaccacaggaagacaatttggaggcattttggctgcacacagtatagccactacactgaaatactggtaccatggctcaccacctggggagattgtatctttaggaatattgagtgaaggccagtttggtattccgaaagggatcgtcttttctatgcctgtgaaatttgagaatggaacttgggtggttcttacagatctcaaagatgttgaaataagtgaacaaataatgacccgaatgacaagtgatctaattcaggagaaacttgttgcacttggagacaagatacattttcagccataccaatcaggacataaagatctggtccctgatgaagaaaaaaatctagctatgtcagatgcagcagagtttccaaatcagattcctcaaaccacctttgaaaagccacagagtcttgagttcctaaatgaatttgaaggcaaaaccgtggaatcctaacagatcaaattggatgaaatatataattacttgatagcacaataaacatagaaagaatttatatgaatgtctatatttaaggaagaataatttgaaagatttatgtcagtcttagataataccatgcaaggcaattaaatcactgtgacagcacagaggtcagagttccgtcattttgcattacttgtatccactcatgtttgtttcataataattgcattttcttagaactattttggtgtcaaatgctatttttta

SEQ ID NO: 151324 - DNA, 2209 bp, Homo sapiens
  Payload ID: 9793
  Gene Symbol: MDH2
  Gene Name: malate dehydrogenase 2, NAD (mitochondrial)
  Uniprot ID: P40926
  ENST ID: ENST00000315758
  CDS Start-End: 95-1111
agagagcaggcgctgggcagtgtggaggtcgttggagtcacttccccgtcaccagctcctgtgcctgccagtcggtgcccctcccgctccagccatgctctccgccctcgcccggcctgccagcgctgctctccgccgcagcttcagcacctcggcccagaacaatgctaaagtagctgtgctaggggcctctggaggcatcgggcagccactttcacttctcctgaagaacagccccttggtgagccgcctgaccctctatgatatcgcgcacacacccggagtggccgcagatctgagccacatcgagaccaaagccgctgtgaaaggctacctcggacctgaacagctgcctgactgcctgaaaggttgtgatgtggtagttattccggctggagtccccagaaagccaggcatgacccgggacgacctgttcaacaccaatgccacgattgtggccaccctgaccgctgcctgtgcccagcactgcccggaagccatgatctgcgtcattgccaatccggttaattccaccatccccatcacagcagaagttttcaagaagcatggagtgtacaaccccaacaaaatcttcggcgtgacgaccctggacatcgtcagagccaacacctttgttgcagagctgaagggtttggatccagctcgagtcaacgtccctgtcattggtggccatgctgggaagaccatcatccccctgatctctcagtgcacccccaaggtggactttccccaggaccagctgacagcactcactgggcggatccaggaggccggcacggaggtggtcaaggctaaagccggagcaggctctgccaccctctccatggcgtatgccggcgcccgctttgtcttctcccttgtggatgcaatgaatggaaaggaaggtgttgtggaatgttccttcgttaagtcacaggaaacggaatgtacctacttctccacaccgctgctgcttgggaaaaagggcatcgagaagaacctgggcatcggcaaagtctcctcttttgaggagaagatgatctcggatgccatccccgagctgaaggcctccatcaagaagggggaagatttcgtgaagaccctgaagtgagccgctgtgacgggtggccagtttccttaatttatgaaggcatcatgtcactgcaaagccgttgcagataaactttgtattttaatttgctttggtgatgattactgtattgacatcatcatgccttccaaattgtgggtggctctgtgggcgcatcaataaaagccgtccttgattttatttttcaaggtcccttctgtaaatgctgtgctttcttccctgtgagagccaactttagagtgtctgctacctcttcattaccaatcagaattagatgatgtttaactgttagactgaagcgtgacgctttcatcagtagcttcaagaaagtctaaattgttaatttatggaattggacacagtattcagtttacccgtacatgctcctcccgcccctcctgttggcacccttgcatcgcccaggcctgattcctcctgggggtagttcacccccacgggttcatagttcagcggcgaatgccaggcagctgttttctggctgagcaaacagcacctttctcattgagcttcctctactgacctctgtcccccttgggatttcatcttctgaccgaaccctgatgttcagtggcagagacagcccatagccagaactgtgggtagaccagggttggggtgtgcggtttgggacagcccaaaccccagccgctgtgtcaaggcctaggacgccatgctgccatcaaaagggggttccaggtttccatcagtggcctaaagaagggacttcttgttgtactgaggagtgcggaattaaagagatttgactccctttagtattgggggcagtccgttccccagacactgtggcctctgaagtggaaactgaaagctgcatacctgggaaagaactttctaggaataggcaatggccttcagtggaagagggagggctggaggtgtgcccagtacttggatgttcatctgtccacaacagctttttgtttttttaaaaaagctaaaatggaaatggattttatcataaaggatgacatcgttttcttctacaattaatacatgttcattgtataaaacccaaaaagcagctaaaaaataaagcgggaaaggaactactggtaa

SEQ ID NO: 151325 - DNA, 1548 bp, Homo sapiens
  Payload ID: 9793
  Gene Symbol: MDH2
  Gene Name: malate dehydrogenase 2, NAD (mitochondrial)
  Uniprot ID: P40926
  ENST ID: ENST00000432020
  CDS Start-End: 1-891
atgctctccgccctcgcccggcctgccagcgctgctctccgccgcagcttcagcacctcggcccagaacaatgctaaagtagctgtgctaggggcctctggaggcatcgggcagccactttcacttctcctgaagaacagccccttggtgagccgcctgaccctctatgatatcgcgcacacacccggagtggccgcagatctgagccacatcgagaccaaagccgctgtgaaaggctacctcggacctgaacagctgcctgactgcctgaaaggttgtgatgtggtagttattccggctggagtccccagaaagccaggcatgacccgggacgacctgttcaacaccaatgccacgattgtggccaccctgaccgctgcctgtgcccagcactgcccggaagccatgatctgcgtcattgccaatccgggtttggatccagctcgagtcaacgtccctgtcattggtggccatgctgggaagaccatcatccccctgatctctcagtgcacccccaaggtggactttccccaggaccagctgacagcactcactgggcggatccaggaggccggcacggaggtggtcaaggctaaagccggagcaggctctgccaccctctccatggcgtatgccggcgcccgctttgtcttctcccttgtggatgcaatgaatggaaaggaaggtgttgtggaatgttccttcgttaagtcacaggaaacggaatgtacctacttctccacaccgctgctgcttgggaaaaagggcatcgagaagaacctgggcatcggcaaagtctcctcttttgaggagaagatgatctcggatgccatccccgagctgaaggcctccatcaagaagggggaagatttcgtgaagaccctgaagtgagccgctgtgacgggtggccagtttccttaatttatgaaggcatcatgtcactgcaaagccgttgcagataaactttgtattttaatttgctttggtgatgattactgtattgacatcatcatgccttccaaattgtgggtggctctgtgggcgcatcaataaaagccgtccttgattttatttttcaaggtcccttctgtaaatgctgtgctttcttccctgtgagagccaactttagagtgtctgctacctcttcattaccaatcagaattagatgatgtttaactgttagactgaagcgtgacgctttcatcagtagcttcaagaaagtctaaattgttaatttatggaattggacacagtattcagtttacccgtacatgctcctcccgcccctcctgttggcacccttgcatcgcccaggcctgattcctcctgggggtagttcacccccacgggttcatagttcagcggcgaatgccaggcagctgttttctggctgagcaaacagcacctttctcattgagcttcctctactgacctctgtcccccttgggatttcatcttctgaccgaaccctgatgttcagtggcagagacagcccatagccagaactgtgggtagaccagggttggggtgtgcggtttgggacagccc

SEQ ID NO: 151326 - DNA, 2020 bp, Homo sapiens
  Payload ID: 9793
  Gene Symbol: MDH2
  Gene Name: malate dehydrogenase 2, NAD (mitochondrial)
  ENST ID: ENST00000443006
  CDS Start-End: 229-924
agtgtggaggtcgttggagtcacttccccgtcaccagctcctgtgcctgccagtcggtgcccctcccgctccagccatgctctccgccctcgcccggcctgccagcgctgctctccgccgcagcttcagcacctcggcccaggctacctcggacctgaacagctgcctgactgcctgaaaggttgtgatgtggtagttattccggctggagtccccagaaagccaggcatgacccgggacgacctgttcaacaccaatgccacgattgtggccaccctgaccgctgcctgtgcccagcactgcccggaagccatgatctgcgtcattgccaatccggttaattccaccatccccatcacagcagaagttttcaagaagcatggagtgtacaaccccaacaaaatcttcggcgtgacgaccctggacatcgtcagagccaacacctttgttgcagagctgaagggtttggatccagctcgagtcaacgtccctgtcattggtggccatgctgggaagaccatcatccccctgatctctcagtgcacccccaaggtggactttccccaggaccagctgacagcactcactgggcggatccaggaggccggcacggaggtggtcaaggctaaagccggagcaggctctgccaccctctccatggcgtatgccggcgcccgctttgtcttctcccttgtggatgcaatgaatggaaaggaaggtgttgtggaatgttccttcgttaagtcacaggaaacggaatgtacctacttctccacaccgctgctgcttgggaaaaagggcatcgagaagaacctgggcatcggcaaagtctcctcttttgaggagaagatgatctcggatgccatccccgagctgaaggcctccatcaagaagggggaagatttcgtgaagaccctgaagtgagccgctgtgacgggtggccagtttccttaatttatgaaggcatcatgtcactgcaaagccgttgcagataaactttgtattttaatttgctttggtgatgattactgtattgacatcatcatgccttccaaattgtgggtggctctgtgggcgcatcaataaaagccgtccttgattttatttttcaaggtcccttctgtaaatgctgtgctttcttccctgtgagagccaactttagagtgtctgctacctcttcattaccaatcagaattagatgatgtttaactgttagactgaagcgtgacgctttcatcagtagcttcaagaaagtctaaattgttaatttatggaattggacacagtattcagtttacccgtacatgctcctcccgcccctcctgttggcacccttgcatcgcccaggcctgattcctcctgggggtagttcacccccacgggttcatagttcagcggcgaatgccaggcagctgttttctggctgagcaaacagcacctttctcattgagcttcctctactgacctctgtcccccttgggatttcatcttctgaccgaaccctgatgttcagtggcagagacagcccatagccagaactgtgggtagaccagggttggggtgtgcggtttgggacagcccaaaccccagccgctgtgtcaaggcctaggacgccatgctgccatcaaaagggggttccaggtttccatcagtggcctaaagaagggacttcttgttgtactgaggagtgcggaattaaagagatttgactccctttagtattgggggcagtccgttccccagacactgtggcctctgaagtggaaactgaaagctgcatacctgggaaagaactttctaggaataggcaatggccttcagtggaagagggagggctggaggtgtgcccagtacttggatgttcatctgtccacaacagctttttgtttttttaaaaaagctaaaatggaaatggattttatcataaaggatgacatcgttttcttctacaattaatacatgttcattgtataaaacccaaaaagcagctaaaaaataaagcgggaaaggaactactggt

SEQ ID NO: 151327 - DNA, 648 bp, Homo sapiens
  Payload ID: 9793
  Gene Symbol: MDH2
  Gene Name: malate dehydrogenase 2, NAD (mitochondrial)
  ENST ID: ENST00000461263
  CDS Start-End: 111-197
actctcgcgaggccccagagagcaggcgctgggcagtgtggaggtcgttggagtcacttccccgtcaccagctcctgtgcctgccagtcggtgcccctcccgctccagccatgctctccgccctcgcccggcctgccagcgctgctctccgccgcagcttcagcacctcggcccagcgttccattgctttgacgtagctaatctccttgcagcatccgtgtgagttgtgcgtgaataaaagaaatcgtatacttcctaattccatagtatggacaaaccgaggctagagaactgggccagggttacagtcatttggccagaggattagaattcagcgcttctgacctgaagacggcttcctcttaacctttttggaggatctctcctgctgtgggcggactgagcctgccgccaggtgtcttaacagtgcttgacttggcccgcgaccacttaagcctaggagcctaggctatttttagccatcttctagaatggtggttcttaaactctgcagtgtgtcagaatcaccagaaagctaataaaaaacagacgtctgggttcattgaagaagcttaagactgcgggggggggggggggggtccgcatttttaccaggtgaatctaattaaacctaattttgagaaccca

SEQ ID NO: 151328 - DNA, 3984 bp, Homo sapiens
  Payload ID: 9794
  Gene Symbol: MAK
  Gene Name: male germ cell-associated kinase
  Uniprot ID: P20794
  ENST ID: ENST00000313243
  CDS Start-End: 384-2255
gcaggcgcggacaggtaatccccagcgggctgcagggccaccaccctctgtccgacccagccggagcccgacctgcgaggctggccgggcatgtcccctcggcgccctgtgctaccagggccaatctccgcccggagaccggtccctgacgccgggtgtttataagaatggaagtgttgtttccttgcccgattccttcatgctatatctcatgaacctctgtaatcttgggggagagactatatttaatgatgacaaacctgtcaccagtgtagcaacaacagtgtgaggacaaaagcaaataaaaattaagaagcgttcaaatttatattcaacaaggaagtcatttcaatcaacaacttctgctgcattatttttccaagatgaaccgatacacaaccatgagacagttgggggacggcacgtatgggagtgtgcttatgggcaagagtaatgaatccggggagctggtggccatcaaaaggatgaagagaaagttctattcttgggatgaatgcatgaacttgagagaagttaagtctctgaagaaacttaatcatgccaatgttattaaattgaaagaagttatcagagaaaatgaccatctttattttatatttgaatatatgaaagaaaacctctatcaattaatgaaagacagaaacaagttgttccctgaatcagtcatcagaaatattatgtatcaaatattgcaagggctggcttttatccataaacatggcttttttcatagggacatgaaaccagaaaacttgctttgtatgggtccagagcttgtgaaaattgctgattttggacttgcaagagaattaaggtcacagccaccatacactgattatgtatctaccagatggtatcgtgcccctgaagttttactgagatcttcagtttatagttctcccattgatgtgtgggctgttggaagtatcatggctgaactctatatgttaaggccacttttcccagggacaagtgaggtcgatgaaatctttaaaatttgccaagttttagggactcccaaaaaaagtgactggccagaaggataccagctggcatcctctatgaacttccgttttccccagtgtgttcctataaacttaaaaactcttattcccaatgccagtaatgaagctattcagctcatgaccgaaatgttgaattgggatccaaagaaacgaccgacagcaagccaggcattgaaacacccatattttcaagttggtcaggtattaggcccttcgtcaaatcatctggaatcaaaacagtctttaaataagcagctgcaaccattagaatcaaagccatctttagttgaggtagagcctaagcctctgccggatataatcgatcaggttgttggacaaccccagccaaaaactagccagcagccactgcagcccattcagccgccacagaacctgagcgtccagcaacctccaaagcaacagagtcaggagaaaccgccacaaacgctattcccgagcatcgtcaaaaacatgccaactaagccaaatggcacactgagtcataaaagtggtaggaggcgttggggtcagactatcttcaagtctggagatagctgggaagagttggaggactatgatttcggagcctcccattccaagaagccaagcatgggtgtttttaaagaaaaaaggaaaaaagattctccatttcggcttccagagccagtaccctcaggctccaaccactcgacaggggaaaacaagagcttacctgctgttacttccctaaaatctgattccgaattgtcaactgctccaacctctaaacagtactacttgaaacaatcaagatatcttccaggtgtgaatcccaagaaggtgtccttgatagccagtggaaaggaaataaacccccacacttggagcaaccagttattccccaagtcactgggacccgttggggcagaacttgctttcaaaaggagcaatgcaggaaatcttggaagttatgctacttacaatcagtcaggatatattccttcctttctcaaaaaagaagtgcagtcagctggccagaggatccacttagcacctctcaatgcaacggcttcagaatatacctggaacacaaaaactggtcgggggcagttttcaggacgtacttataatcctacagcaaaaaacctaaatattgtgaaccgtgcacagcccattccctcagtgcatgggaggacagactgggtggccaagtatggaggccaccggtaggagtctatggtgtgaaaccctacagcattgctccgtagagtacgtgcaagttccttgaccctgggaaatgtctacaaatgtctatttctactgagttctggaagaaatatgcaaaagtgggtacttggaagggcaaaaatcatcccctattttacttatttccaagaaatgcattttcttagcatcattgcccacagtgttgatatatgggtaggatgttacaaagtattgaataaactatttgccaaagtatgaagtatttgatctacaatttaataaatagtaaatccaataagaacccttaaaaaaaaacaacttccagaaaatgtttagagtgttttagttttcatttgttgtatgtgcccaaatggtttagtagttcttcactttgctgtggttggcttaagaggtttgtcttttgtttttgtacagcagttgggccaacctttgctggctgtcagctgtggttcttatttgactaaggctctgcgctgccattttgtcaatgacagaaagattgcaattatttgtttttctactttgaagctatgggagcgatggtaatttcaatcttgagcaggatatctttttttttttttttgaggcgatgtttcactcttgtgtccaggctggagtgcagtggcactatcttggcttactgcaacctccacctcctgggttcaagtgattctcctgcctcagcctcccgagtagctgggattagaggcgtgtgccaccatgcctggctaatttttgtagtattagtagagacagggtttcaccatgttggtcaggctcaggctggtctcaaactcctgacctcaggtgatccacctgcctcggcctcccaaagtgcagggcttacaggtgtgagccacagtgcccagctttttttttttttttttagaaataaatttatctttaacatagagaatatcaaagttatgccacttgattttagtggacggcttgtgttttgatcttgaccagtacagttcccatgaattcaaggtgacaatcaagcccaatggcttgatgacttcaatagtaaccaagtcaaggttctcttggctggacatcattaagaaagttctggaaactgtgtttgtttgatgctggttcattggacttttcaaattgttttgtttctgtgtccctaccagacacaaagatgaagtgtgccagctggttcccccaagccagctcatgctgctgaccactgactcagctctgaccttcacatttgctctgaagcaagtgcgttcagctgctggggcagtgatatcacatagtacatatattatttccttagtttatttccaaactggtattttaaatagacacttcgaactttgggctactctgtttaaatctgccactttctggactggaccttagtactgtaaattctttttaaagaataataatgttaccaactgctgagatttttatgtattttgtgactttgtaacaactgctattgtaataagtgtcatcttgtgggcattatacaaaggcatattataaaataataatgatatttttgtatagaagagtcaactgttcagatgtaagatgttgaaaaatgttaaaatctaaagagtaatttatcctagtggtaatggttatatgtatttgtacagtttaaattaatgtctcaaagctgtgcagtcttttgttactgggacacttttaaactctgaataggcattaaaaaaaatatggctaa

SEQ ID NO: 151329 - DNA, 3941 bp, Homo sapiens
  Payload ID: 9794
  Gene Symbol: MAK
  Gene Name: male germ cell-associated kinase
  Uniprot ID: P20794
  ENST ID: ENST00000354489
  CDS Start-End: 283-2229
tcctaggagatgaaacacacaagacgccggagcttcacaagggagcgaacgagggtgtttataagaatggaagtgttgtttccttgcccgattccttcatgctatatctcatgaacctctgtaatcttgggggagagactatatttaatgatgacaaacctgtcaccagtgtagcaacaacagtgtgaggacaaaagcaaataaaaattaagaagcgttcaaatttatattcaacaaggaagtcatttcaatcaacaacttctgctgcattatttttccaagatgaaccgatacacaaccatgagacagttgggggacggcacgtatgggagtgtgcttatgggcaagagtaatgaatccggggagctggtggccatcaaaaggatgaagagaaagttctattcttgggatgaatgcatgaacttgagagaagttaagtctctgaagaaacttaatcatgccaatgttattaaattgaaagaagttatcagagaaaatgaccatctttattttatatttgaatatatgaaagaaaacctctatcaattaatgaaagacagaaacaagttgttccctgaatcagtcatcagaaatattatgtatcaaatattgcaagggctggcttttatccataaacatggcttttttcatagggacatgaaaccagaaaacttgctttgtatgggtccagagcttgtgaaaattgctgattttggacttgcaagagaattaaggtcacagccaccatacactgattatgtatctaccagatggtatcgtgcccctgaagttttactgagatcttcagtttatagttctcccattgatgtgtgggctgttggaagtatcatggctgaactctatatgttaaggccacttttcccagggacaagtgaggtcgatgaaatctttaaaatttgccaagttttagggactcccaaaaaaagtgactggccagaaggataccagctggcatcctctatgaacttccgttttccccagtgtgttcctataaacttaaaaactcttattcccaatgccagtaatgaagctattcagctcatgaccgaaatgttgaattgggatccaaagaaacgaccgacagcaagccaggcattgaaacacccatattttcaagttggtcaggtattaggcccttcgtcaaatcatctggaatcaaaacagtctttaaataagcagctgcaaccattagaatcaaagccatctttagttgaggtagagcctaagcctctgccggatataatcgatcaggttgttggacaaccccagccaaaaactagccagcagccactgcagcccattcagccgccacagaacctgagcgtccagcaacctccaaagcaacagagtcaggagaaaccgccacaaacgctattcccgagcatcgtcaaaaacatgccaactaagccaaatggcacactgagtcataaaagtggtaggaggcgttggggtcagactatcttcaagtctggagatagctgggaagagttggaggactatgatttcggagcctcccattccaagaagccaagcatgggtgtttttaaagaaaaaaggaaaaaagattctccatttcggcttccagagccagtaccctcaggctccaaccactcgacaggggaaaacaagagcttacctgctgttacttccctaaaatctgattccgaattgtcaactgctccaacctctaaacagtactacttgaaacaatcaagatatcttccaggtgtgaatcccaagaaggtgtccttgatagccagtggaaaggaaataaacccccacacttggagcaaccagttattccccaagtcactgggacccgttggggcagaacttgctttcaaaaggagcaatgcagaagaaagcataattaaaccaatcgaaaaactatcatgcaatgaaacttttcctgaaaaattagaggacccacaaggaaatcttggaagttatgctacttacaatcagtcaggatatattccttcctttctcaaaaaagaagtgcagtcagctggccagaggatccacttagcacctctcaatgcaacggcttcagaatatacctggaacacaaaaactggtcgggggcagttttcaggacgtacttataatcctacagcaaaaaacctaaatattgtgaaccgtgcacagcccattccctcagtgcatgggaggacagactgggtggccaagtatggaggccaccggtaggagtctatggtgtgaaaccctacagcattgctccgtagagtacgtgcaagttccttgaccctgggaaatgtctacaaatgtctatttctactgagttctggaagaaatatgcaaaagtgggtacttggaagggcaaaaatcatcccctattttacttatttccaagaaatgcattttcttagcatcattgcccacagtgttgatatatgggtaggatgttacaaagtattgaataaactatttgccaaagtatgaagtatttgatctacaatttaataaatagtaaatccaataagaacccttaaaaaaaaacaacttccagaaaatgtttagagtgttttagttttcatttgttgtatgtgcccaaatggtttagtagttcttcactttgctgtggttggcttaagaggtttgtcttttgtttttgtacagcagttgggccaacctttgctggctgtcagctgtggttcttatttgactaaggctctgcgctgccattttgtcaatgacagaaagattgcaattatttgtttttctactttgaagctatgggagcgatggtaatttcaatcttgagcaggatatctttttttttttttttgaggcgatgtttcactcttgtgtccaggctggagtgcagtggcactatcttggcttactgcaacctccacctcctgggttcaagtgattctcctgcctcagcctcccgagtagctgggattagaggcgtgtgccaccatgcctggctaatttttgtagtattagtagagacagggtttcaccatgttggtcaggctcaggctggtctcaaactcctgacctcaggtgatccacctgcctcggcctcccaaagtgcagggcttacaggtgtgagccacagtgcccagctttttttttttttttttagaaataaatttatctttaacatagagaatatcaaagttatgccacttgattttagtggacggcttgtgttttgatcttgaccagtacagttcccatgaattcaaggtgacaatcaagcccaatggcttgatgacttcaatagtaaccaagtcaaggttctcttggctggacatcattaagaaagttctggaaactgtgtttgtttgatgctggttcattggacttttcaaattgttttgtttctgtgtccctaccagacacaaagatgaagtgtgccagctggttcccccaagccagctcatgctgctgaccactgactcagctctgaccttcacatttgctctgaagcaagtgcgttcagctgctggggcagtgatatcacatagtacatatattatttccttagtttatttccaaactggtattttaaatagacacttcgaactttgggctactctgtttaaatctgccactttctggactggaccttagtactgtaaattctttttaaagaataataatgttaccaactgctgagatttttatgtattttgtgactttgtaacaactgctattgtaataagtgtcatcttgtgggcattatacaaaggcatattataaaataataatgatatttttgtatagaagagtcaactgttcagatgtaagatgttgaaaaatgttaaaatctaaagagtaatttatcctagtggtaatggttatatgtatttgtacagtttaaattaatgtctcaaagctgtgcagtcttttgttactgggacacttttaaactctgaataggcatt

SEQ ID NO: 151330 - DNA, 3767 bp, Homo sapiens
  Payload ID: 9794
  Gene Symbol: MAK
  Gene Name: male germ cell-associated kinase
  Uniprot ID: P20794
  ENST ID: ENST00000536370
  CDS Start-End: 304-2055
tcctaggagatgaaacacacaagacgccggagcttcacaagggagcgaacgaggtaagcagcaggcgcggacagggtgtttataagaatggaagtgttgtttccttgcccgattccttcatgctatatctcatgaacctctgtaatcttgggggagagactatatttaatgatgacaaacctgtcaccagtgtagcaacaacagtgtgaggacaaaagcaaataaaaattaagaagcgttcaaatttatattcaacaaggaagtcatttcaatcaacaacttctgctgcattatttttccaagatgaaccgatacacaaccatgagacagttgggggacggcacgtatgggagtgtgcttatgggcaagagtaatgaatccggggagctggtggccatcaaaaggatgaagagaaagttctattcttgggatgaatgcatgaacttgagagaagttaagtctctgaagaaacttaatcatgccaatgttattaaattgaaagaagttatcagagaaaatgaccatctttattttatatttgaatatatgaaagaaaacctctatcaattaatgaaagacagaaacaagttgttccctgaatcagtcatcagaaatattatgtatcaaatattgcaagggctggcttttatccataaacatggcttttttcatagggacatgaaaccagaaaacttgctttgtatgggtccagagcttgtgaaaattgctgattttggacttgcaagagaattaaggtcacagccaccatacactgattatgtatctaccagatggtatcgtgcccctgaagttttactgagatcttcagtttatagttctcccattgatgtgtgggctgttggaagtatcatggctgaactctatatgttaaggccacttttcccagggacaagtgaggtcgatgaaatctttaaaatttgccaagttttagggactcccaaaaaaagtgactggccagaaggataccagctggcatcctctatgaacttccgttttccccagtgtgttcctataaacttaaaaactcttattcccaatgccagtaatgaagctattcagctcatgaccgaaatgttgaattgggatccaaagaaacgaccgacagcaagccaggcattgaaacacccatattttcaagttggtcaggtattaggcccttcgtcaaatcatctggaatcaaaacagtctttaaataagcagctgcaaccattagaatcaaagccatctttagttgaggtagagcctaagcctctgccggatataatcgatcaggttgttggacaaccccagccaaaaactagccagcagccactgcagcccattcagccgccacagaacctgagcgtccagcaacctccaaagcaacagagtcaggagaaaccgccacaaacgctattcccgagcatcgtcaaaaacatgccaactaagccaaatggcacactgagtcataaaagtggtaggaggcgttggggtcagactatcttcaagtctggagatagctgggaagagttggaggactatgatttcggagcctcccattccaagaagccaagcatgggtgtttttaaagaaaaaaggaaaaaagattctccatttcggcttccagagccagtaccctcaggctccaaccactcgacaggggaaaacaagagcttacctgctgttacttccctaaaatctgattccgaattgtcaactgctccaacctctaaacagtactacttgaaacaatcaagatatcttccaggtgtgaatcccaagaaggtgtccttgatagccagtggaaaggaaataaacccccacacttggagcaaccagttattccccaagtcactgggacccgttggggcagaacttgctttcaaaaggagcaatgcagaatatacctggaacacaaaaactggtcgggggcagttttcaggacgtacttataatcctacagcaaaaaacctaaatattgtgaaccgtgcacagcccattccctcagtgcatgggaggacagactgggtggccaagtatggaggccaccggtaggagtctatggtgtgaaaccctacagcattgctccgtagagtacgtgcaagttccttgaccctgggaaatgtctacaaatgtctatttctactgagttctggaagaaatatgcaaaagtgggtacttggaagggcaaaaatcatcccctattttacttatttccaagaaatgcattttcttagcatcattgcccacagtgttgatatatgggtaggatgttacaaagtattgaataaactatttgccaaagtatgaagtatttgatctacaatttaataaatagtaaatccaataagaacccttaaaaaaaaacaacttccagaaaatgtttagagtgttttagttttcatttgttgtatgtgcccaaatggtttagtagttcttcactttgctgtggttggcttaagaggtttgtcttttgtttttgtacagcagttgggccaacctttgctggctgtcagctgtggttcttatttgactaaggctctgcgctgccattttgtcaatgacagaaagattgcaattatttgtttttctactttgaagctatgggagcgatggtaatttcaatcttgagcaggatatctttttttttttttttgaggcgatgtttcactcttgtgtccaggctggagtgcagtggcactatcttggcttactgcaacctccacctcctgggttcaagtgattctcctgcctcagcctcccgagtagctgggattagaggcgtgtgccaccatgcctggctaatttttgtagtattagtagagacagggtttcaccatgttggtcaggctcaggctggtctcaaactcctgacctcaggtgatccacctgcctcggcctcccaaagtgcagggcttacaggtgtgagccacagtgcccagctttttttttttttttttagaaataaatttatctttaacatagagaatatcaaagttatgccacttgattttagtggacggcttgtgttttgatcttgaccagtacagttcccatgaattcaaggtgacaatcaagcccaatggcttgatgacttcaatagtaaccaagtcaaggttctcttggctggacatcattaagaaagttctggaaactgtgtttgtttgatgctggttcattggacttttcaaattgttttgtttctgtgtccctaccagacacaaagatgaagtgtgccagctggttcccccaagccagctcatgctgctgaccactgactcagctctgaccttcacatttgctctgaagcaagtgcgttcagctgctggggcagtgatatcacatagtacatatattatttccttagtttatttccaaactggtattttaaatagacacttcgaactttgggctactctgtttaaatctgccactttctggactggaccttagtactgtaaattctttttaaagaataataatgttaccaactgctgagatttttatgtattttgtgactttgtaacaactgctattgtaataagtgtcatcttgtgggcattatacaaaggcatattataaaataataatgatatttttgtatagaagagtcaactgttcagatgtaagatgttgaaaaatgttaaaatctaaagagtaatttatcctagtggtaatggttatatgtatttgtacagtttaaattaatgtctcaaagctgtgcagtcttttgttactgggacacttttaaactctgaataggcatt

SEQ ID NO: 151331 - DNA, 2459 bp, Homo sapiens
  Payload ID: 9794
  Gene Symbol: MAK
  Gene Name: male germ cell-associated kinase
  ENST ID: ENST00000538030
  CDS Start-End: 232-1605
agggtgtttataagaatggaagtgttgtttccttgcccgattccttcatgctatatctcatgaacctctgtaatcttgggggagagactatatttaatgatgacaaacctgtcaccagtgtagcaacaacagtgtgaggacaaaagcaaataaaaattaagaagcgttcaaatttatattcaacaaggaagtcatttcaatcaacaacttctgctgcattatttttccaagatgaaccgatacacaaccatgagacagttgggggacggcacgtatgggagtgtgcttatgggcaagagtaatgaatccggggagctggtggccatcaaaaggatgaagagaaagttctattcttgggatgaatgcatgaacttgagagaagttaagtctctgaagaaacttaatcatgccaatgttattaaattgaaagaagttatcagagaaaatgaccatctttattttatatttgaatatatgaaagaaaacctctatcaattaatgaaagacagaaacaagttgttccctgaatcagtcatcagaaatattatgtatcaaatattgcaagggctggcttttatccataaacatggcttttttcatagggacatgaaaccagaaaacttgctttgtatgggtccagagcttgtgaaaattgctgattttggacttgcaagagaattaaggtcacagccaccatacactgattatgtatctaccagatggtatcgtgcccctgaagttttactgagatcttcagtttatagttctcccattgatgtgtgggctgttggaagtatcatggctgaactctatatgttaaggccacttttcccagggacaagtgaggtcgatgaaatctttaaaatttgccaagttttagggactcccaaaaaaagtgactggccagaaggataccagctggcatcctctatgaacttccgttttccccagtgtgttcctataaacttaaaaactcttattcccaatgccagtaatgaagctattcagctcatgaccgaaatgttgaattgggatccaaagaaacgaccgacagcaagccaggcattgaaacacccatattttcaagttggtcaggtattaggcccttcgtcaaatcatctggaatcaaaacagtctttaaataagcagctgcaaccattagaatcaaagccatctttagttgaggtagagcctaagcctctgccggatataatcgatcaggttgttggacaaccccagccaaaaactagccagcagccactgcagcccattcagccgccacagaacctgagcgtccagcaacctccaaagcaacagagtcaggagaaaccgccacaaacgctattcccgagcatcgtcaaaaacatgccaactaagccaaatggcacactgagtcataaaagtggtaggaggcgttggggtcagactatcttcaagtctggagatagctgggaagagttggaggactatgatttcggagcctcccattccaagaagccaagcatgggtgtttttaaagaaaaaaggaaaaaagattctccatttcgtcaacaggtgaagatggctgttatttccctctcagcacaccagtttcccacgttatgaatccaactgcagccgttgcaggacagatagaaacatgttacacacaagcttccagagccagtaccctcaggctccaaccactcgacaggggaaaacaagagcttacctgctgttacttccctaaaatctgattccgaattgtcaactgctccaacctctaaacagtactacttgaaacaatcaagatatcttccaggtgtgaatcccaagaaggtgtccttgatagccagtggaaaggaaataaacccccacacttggagcaaccagttattccccaagtcactgggacccgttggggcagaacttgctttcaaaaggagcaatgcaggaaatcttggaagttatgctacttacaatcagtcaggatatattccttcctttctcaaaaaagaagtgcagtcagctggccagaggatccacttagcacctctcaatgcaacggcttcagaatatacctggaacacaaaaactggtcgggggcagttttcaggacgtacttataatcctacagcaaaaaacctaaatattgtgaaccgtgcacagcccattccctcagtgcatgggaggacagactgggtggccaagtatggaggccaccggtaggagtctatggtgtgaaaccctacagcattgctccgtagagtacgtgcaagttccttgaccctgggaaatgtctacaaatgtctatttctactgagttctggaagaaatatgcaaaagtgggtacttggaagggcaaaaatcatcccctattttacttatttccaagaaatgcattttcttagcatcattgcccacagtgttgatatatgggtaggatgttacaaagtattgaataaactatttgccaaagt

SEQ ID NO: 151332 - DNA, 3859 bp, Homo sapiens
  Payload ID: 9794
  Gene Symbol: MAK
  Gene Name: male germ cell-associated kinase
  Uniprot ID: P20794
  ENST ID: ENST00000474039
  CDS Start-End: 259-2130
cgccggagcttcacaagggagcgaacgagggtgtttataagaatggaagtgttgtttccttgcccgattccttcatgctatatctcatgaacctctgtaatcttgggggagagactatatttaatgatgacaaacctgtcaccagtgtagcaacaacagtgtgaggacaaaagcaaataaaaattaagaagcgttcaaatttatattcaacaaggaagtcatttcaatcaacaacttctgctgcattatttttccaagatgaaccgatacacaaccatgagacagttgggggacggcacgtatgggagtgtgcttatgggcaagagtaatgaatccggggagctggtggccatcaaaaggatgaagagaaagttctattcttgggatgaatgcatgaacttgagagaagttaagtctctgaagaaacttaatcatgccaatgttattaaattgaaagaagttatcagagaaaatgaccatctttattttatatttgaatatatgaaagaaaacctctatcaattaatgaaagacagaaacaagttgttccctgaatcagtcatcagaaatattatgtatcaaatattgcaagggctggcttttatccataaacatggcttttttcatagggacatgaaaccagaaaacttgctttgtatgggtccagagcttgtgaaaattgctgattttggacttgcaagagaattaaggtcacagccaccatacactgattatgtatctaccagatggtatcgtgcccctgaagttttactgagatcttcagtttatagttctcccattgatgtgtgggctgttggaagtatcatggctgaactctatatgttaaggccacttttcccagggacaagtgaggtcgatgaaatctttaaaatttgccaagttttagggactcccaaaaaaagtgactggccagaaggataccagctggcatcctctatgaacttccgttttccccagtgtgttcctataaacttaaaaactcttattcccaatgccagtaatgaagctattcagctcatgaccgaaatgttgaattgggatccaaagaaacgaccgacagcaagccaggcattgaaacacccatattttcaagttggtcaggtattaggcccttcgtcaaatcatctggaatcaaaacagtctttaaataagcagctgcaaccattagaatcaaagccatctttagttgaggtagagcctaagcctctgccggatataatcgatcaggttgttggacaaccccagccaaaaactagccagcagccactgcagcccattcagccgccacagaacctgagcgtccagcaacctccaaagcaacagagtcaggagaaaccgccacaaacgctattcccgagcatcgtcaaaaacatgccaactaagccaaatggcacactgagtcataaaagtggtaggaggcgttggggtcagactatcttcaagtctggagatagctgggaagagttggaggactatgatttcggagcctcccattccaagaagccaagcatgggtgtttttaaagaaaaaaggaaaaaagattctccatttcggcttccagagccagtaccctcaggctccaaccactcgacaggggaaaacaagagcttacctgctgttacttccctaaaatctgattccgaattgtcaactgctccaacctctaaacagtactacttgaaacaatcaagatatcttccaggtgtgaatcccaagaaggtgtccttgatagccagtggaaaggaaataaacccccacacttggagcaaccagttattccccaagtcactgggacccgttggggcagaacttgctttcaaaaggagcaatgcaggaaatcttggaagttatgctacttacaatcagtcaggatatattccttcctttctcaaaaaagaagtgcagtcagctggccagaggatccacttagcacctctcaatgcaacggcttcagaatatacctggaacacaaaaactggtcgggggcagttttcaggacgtacttataatcctacagcaaaaaacctaaatattgtgaaccgtgcacagcccattccctcagtgcatgggaggacagactgggtggccaagtatggaggccaccggtaggagtctatggtgtgaaaccctacagcattgctccgtagagtacgtgcaagttccttgaccctgggaaatgtctacaaatgtctatttctactgagttctggaagaaatatgcaaaagtgggtacttggaagggcaaaaatcatcccctattttacttatttccaagaaatgcattttcttagcatcattgcccacagtgttgatatatgggtaggatgttacaaagtattgaataaactatttgccaaagtatgaagtatttgatctacaatttaataaatagtaaatccaataagaacccttaaaaaaaaacaacttccagaaaatgtttagagtgttttagttttcatttgttgtatgtgcccaaatggtttagtagttcttcactttgctgtggttggcttaagaggtttgtcttttgtttttgtacagcagttgggccaacctttgctggctgtcagctgtggttcttatttgactaaggctctgcgctgccattttgtcaatgacagaaagattgcaattatttgtttttctactttgaagctatgggagcgatggtaatttcaatcttgagcaggatatctttttttttttttttgaggcgatgtttcactcttgtgtccaggctggagtgcagtggcactatcttggcttactgcaacctccacctcctgggttcaagtgattctcctgcctcagcctcccgagtagctgggattagaggcgtgtgccaccatgcctggctaatttttgtagtattagtagagacagggtttcaccatgttggtcaggctcaggctggtctcaaactcctgacctcaggtgatccacctgcctcggcctcccaaagtgcagggcttacaggtgtgagccacagtgcccagctttttttttttttttttagaaataaatttatctttaacatagagaatatcaaagttatgccacttgattttagtggacggcttgtgttttgatcttgaccagtacagttcccatgaattcaaggtgacaatcaagcccaatggcttgatgacttcaatagtaaccaagtcaaggttctcttggctggacatcattaagaaagttctggaaactgtgtttgtttgatgctggttcattggacttttcaaattgttttgtttctgtgtccctaccagacacaaagatgaagtgtgccagctggttcccccaagccagctcatgctgctgaccactgactcagctctgaccttcacatttgctctgaagcaagtgcgttcagctgctggggcagtgatatcacatagtacatatattatttccttagtttatttccaaactggtattttaaatagacacttcgaactttgggctactctgtttaaatctgccactttctggactggaccttagtactgtaaattctttttaaagaataataatgttaccaactgctgagatttttatgtattttgtgactttgtaacaactgctattgtaataagtgtcatcttgtgggcattatacaaaggcatattataaaataataatgatatttttgtatagaagagtcaactgttcagatgtaagatgttgaaaaatgttaaaatctaaagagtaatttatcctagtggtaatggttatatgtatttgtacagtttaaattaatgtctcaaagctgtgcagtcttttgttactgggacacttttaaactctgaataggcattaaaaaaaatatggctaa

SEQ ID NO: 151333 - DNA, 6626 bp, Homo sapiens
  Payload ID: 9795
  Gene Symbol: MLEC
  Gene Name: malectin
  Uniprot ID: Q14165
  ENST ID: ENST00000228506
  CDS Start-End: 429-1307
gtgggattccggggccgcctgggcgctgcacccgccacttccgcatcgaaccgccgcttcaaccgaactcactccctctgcgcgcgctccatctggtgcccgactgctgggccggcgcctgggagaagccacgccctttcccgcgcctgacagccaatgagcgggcgcctcccggcggggtggtgggtaattaatgagggccgggcgctgattggctgcagcgtcgtggccgggggcagggcggcggggtaggttgttcctgaggtgggaggcggtacccgtggctgagaagaaggaggcctgagagcgacatgtccccggcggctcaggcggagcggcccgtggcgctgtttttctgagtccggggtggcctggcagccggccgaggacgagggtcggcgggggctgcccccgtggtggtggccgccatgctgggagcctgggcggttgagggaaccgctgtggcgctcctgcgactgctgctgctgctgctgccgccggcgatccggggacccgggctcggcgtggccggcgtggccggcgcggcgggggccgggctgcccgagagcgtcatttgggcggtcaacgcgggtggagaggcgcatgtggacgtgcacgggatccacttccgcaaggaccctttggaaggccgggtgggccgagcctcagactatggcatgaaactgccaatcctgcgttccaaccctgaggaccagatcctgtatcaaactgagcggtacaatgaggagacctttggctacgaagtgcccatcaaagaggagggggactacgtgctggtcttgaaatttgcagaggtctactttgcacagtcccagcaaaaggtatttgatgtacgattgaatggccacgtcgtggtgaaggacttggatatctttgatcgtgttgggcatagcacagctcacgatgaaattatacctatgagcatcagaaaggggaagctgagtgtccagggggaggtgtccaccttcacagggaaactctacattgagtttgtcaaggggtactatgacaatcccaaggtctgtgcactctacatcatggctgggacagtggatgatgtaccaaagcttcagcctcatccgggattggagaagaaagaagaggaagaagaagaagaagaatatgatgaagggtctaatctcaaaaaacagaccaataagaaccgggtgcagtcaggcccccgcacacccaacccctatgcctcggacaacagcagcctcatgtttcccatcctggtggccttcggagtcttcattccaaccctcttctgcctctgccggttgtgagaacaaatgactatcctgaacagggtggaggggtgtgggaaagaaaccagccatattggttttggtttctgtatttttcacaatgattaatgaacaaaaacaaagagaaaaaaacacacatcaattaaaggagacaaaaagaggcagagcgagtagagagcagccctcattcaccacctggtcccagacgtgcttcagtcctcgtcctctctttgtggctggctcccagccttctctttcctcttgaggatacttagggtaaactggatccttcctgctcaaggatcctcatttgtatacctagtggaaaggactctgaactcagaggagtcactgttcctttttttaggttagaaattaacagcagggaaatgccatcttattacctgagacgaccagcactgggagttaggtacggtctgaagttatgtctagataagacttcagacgtcctgggattgaaagaatgtgtgtgaaggggtagaatttgtgcggtaaagacttaaaaaaaaaagtagggagattaaaaaaaaagaaagaaaatgcttccttatctggaagcctttctggattaatccagtgatggtcccacctttagtgtttgagctttgtcattgcttgtctccctggcatgtgccagttatagactgtccagcatccaagacgtttcggttatgtcgggtcctcagatcgcctctgacttgttaccacaacaaatcattttgatttcagtgcctgttggggacttgatttcttctcagttttgtttgtttgtttgtttccttaatctggctcatttgaaatttcttctccctctcaaccatcccactaagttatagccaagaagggaaggagacacggggatttggggttctctgcttgaatgtcttctcctttaccacctcaccttgttggtacctccctccctggatctctgagccagcagccaggaggacctgacccagcagttctttactggcccctttgtagggccttgctgccagggggcagggatgctttccagcctgcagcaacagaacacttgaccttaaaagtctcttctggtctttggattagaaaaggcttatgttagcatagcttaagagcaacctcagagatttgagccctactaagtgactgaccactgtttagagtgtctggtatctgatgttcatttattcccatgttcttgtgtgtcacagttcagccagttttggtttatgcctagagctacttcaaggaactagactaattagctatataggcccagcgatgcttcttattgatcttaatagtatgcccctccttcccctgtcctttcatttctctatccaagtagcagtcaggttcttggtgtgatgggactgaaagaattccagtcagccagagccttggcagctctgaagctaaccttagcatctaagtgtcgatcttgaattccctgaaaaaatttctataggaaatgaagcttccctggtcccctcctttctggccattgtcatccatttcccagttagggcaacaatgaaggaggacccagccaagctagaaggaattttgtggatgggagacagcaggattagcttcagcttgggctggagcagtcaatataggatctcaggccaggcccgcttttctagaatgtgtttaattttgagtttgctttattagatatgttttttaagagctctgtatatttgaactgctccttatgtgacaaaataggtagctcttgggctcatgtcctgggttttggctctttaatgattactccaggccagcatttagtcgtttgagaattgtagcctgttgttttcgctgtgacttgggtctcagtgctagggtattgagtcaggcagctggagggttgtggcccgaggctgcagtcagaggtatacttcccatagtgcttcacacagctcccctgcttctaaaggataaggtactgtagccttggtcctggggaccacctgcctggggcagtggacatcctaactaaacaggcttctggcagtagctttggttcctatcccatcgaaattccccaaagccctgggccactgccattgggttagtcaagatgaaggaggaggactggctgcctccattttgccttgtttgttagtttgcctgggtctgtctgaggaaggagggggtcccgccttccacctcaacacatcccttcagtgactcagagtctcagaaggaaaccctgactcctggggccatttcctaatggtactgtaagccaagcagctttgcttctgcctctgtttccaagcccacccttttcccctgagctcagggttagggatgggcgctttcctctctggttgtgaacgaaaggaaggaacatctttctatggctaacaaaaactaaaggggaagtgaggaaacaggaagaagtatggtgggggctggggtagactcccctggagccaagcctatccagctaacaagagctccctggggctggtcacagctggctcatgatgctgaacttgaaagtttttttgtttttgtttttgttttgtggctcctccaagatataggtacatgaagtttaggttaaaggggtgggattctttatttttatttttgtattgtatgtgtcaagaattactctgttgttcaccttttgctttttgcactgtttgttctcttatctgtattttgagcttagtgctaggactgagaggctgcaccatagggaatgtatgggagatggtgaggggtgccagtgaggggtgcgtggaggagaggcctgggctcctctactggatctacactctgtcccaggtttttagatcccactgagcccagctgactgaaaacaaggacagtcagggtgaaacttcttttgccagaagtgtggcctgagttgaatttctgggaggatgacgcagatgtctgctgcagagctgggctgagagttctgcagtctagctctgacttaggtcaggggcctgttggtctctcattggacgtttttgggtctcactcatgcttactgaaacattgtgccaagaaactctgtgggatttgtgtcccttaaaccagactcacttttctgaaaaatctccattgttgaggagaggctgctcaatcgacaccccgagttctcatgactgggaagatagttttcttcaggtgtcaatggcgttagactcccaggaagactagccctgcccacagggccacctgttggtttgagagcgtgttcgtgttctcttgccctccctgcctaagagctactgggatcacgttagcgggcatttaggctttgatgagagggcacagtttgagttaggtttacctccccctttctgtgcctgggaactgtttggtccagctttagaactgtggttttgacttccttatctcttgggagaagcttctgttttaaggaatttctcttccttcttctcctgcctctagcctctcctggaaaggcctggatatggtttctaaaatctcagctgagaacttcagaaaacagcagcagtattttccttttcctagtgctaaaatccctttccctagaaattggctcaccttgggaaacccagggaaagaatcagcaggttctctgccctccctaggggttggggaaggacccaccccggtcagcacagtgccttttcctctcctgctctgagccagggtggggcattccctctagattcaggtttgggcaggggtcctatagtccctgccatggggctgcttccctgtcccttccctcccctttgctggcctactctggcataattcaagtgtcttcttgccttggggatccttagtggcatcaaatggcaacatggaatattgtcctccatgcccctccagaaggacctaggagagtaggtgagctttccaaagtgagagacgaatctttctttctttttttttttaaagggcaggatgggtatgctttgggctttctccttctgtggccccggaggaaggagagactgaggcaaggcaaagtgatagtacacggaagcagaaccggaaacacccaggaactgttcagaaatctcagaagaaatctgcttctcttcgatggaaagatataattaacgatcaaagagctctaagaaaattgcaaagaagccttaatgttcaagctttagaaagatcagagcaatttttctctttcagtccaaactaagactctctgtatttaaatctctctggggcaagagggctagatttcctcattttgttatgagactagattggtaccagtagatcagctgcctagcgagggcaggtttcttctttgcatctgtgtggcttgcttccagtctggcctgtcctttccagctgccttttgtctagcctgctatggggggccagattatcttgataagagcaggtgatttggggactagctgggttggcaggaaaagagcaggatggatctcttgggacaggttcccccaggagtataaacacaaggagccaggattgtgctggcagccaaggaaacagtagtgcctgtttgagttggcagagagggccttggcacctcttgcatccaggcagtcttgtgagatgggggcacatagcactggggaaagcagaactccattctcacctctattttgagcttcagtgctttatttcagtatgaggaaaaacaacaacaaactgaagtgcgctttccgtcctttcaaaggacaactgtcgggaagggagagccgagttgcgaggtaggaggggagcactggcagggagagacattcttgactcctctcttccctggtgtgttgtgatccagggaatgaaaagaaatttgaccctggattggttctctccttggacttaaggaatcttaccttttccttccacaaagttctcccaggcaaggaccagctgcccattctgagcccagggcagcctcttcaaccattattggtctaacctggcttgtcaggaaaccaagcccacccttccacattgggcctggctgctctattctgtaccaagtactggagaaaaagcatcaagttcttagcccttgtagcttctaccctagtttcccatcctctctctgtggaggccaaaccaactctttgccagcagccacaacatgcattgacagcggcacagtgagatataactgatgggctttgaacctggttggccggggaagctgtaggggtggatagagctggctttccttctgggctgtctccatctgaccctaccccttccatgtcccaccccactcccaccaaaaagtacaaaatcaggatgtttttcactgtccattgctttgtgttttaataaacaatttgcagtgacactctg

SEQ ID NO: 151334 - DNA, 549 bp, Homo sapiens
  Payload ID: 9795
  Gene Symbol: MLEC
  Gene Name: malectin
  ENST ID: ENST00000545525
  CDS Start-End: 112-549
tagcattgccctggaaatgcctctggctgttctggggtctttgcttttcttttgtgtcttgcctctgatgtgctttctctttgtcttttgtcctcagcctcagactatggcatgaaactgccaatcctgcgttccaaccctgaggaccagatcctgtatcaaactgagcggtacaatgaggagacctttggctacgaagtgcccatcaaagaggagggggactacgtgctggtcttgaaatttgcagaggtctactttgcacagtcccagcaaaaggtatttgatgtacgattgaatggccacgtcgtggtgaaggacttggatatctttgatcgtgttgggcatagcacagctcacgatgaaattatacctatgagcatcagaaaggggaagctgagtgtccagggggaggtgtccaccttcacagggaaactctacattgagtttgtcaaggggtactatgacaatcccaaggtctgtgcactctacatcatggctgggacagtggatgatgtaccaaagcttcagcctcatccgggattggagaag

SEQ ID NO: 151335 - DNA, 841 bp, Homo sapiens
  Payload ID: 9795
  Gene Symbol: MLEC
  Gene Name: malectin
  ENST ID: ENST00000412616
  CDS Start-End: 53-706
agccggccgaggacgagggtcggcgggggctgcccccgtggtggtggccgccatgctgggagcctgggcggttgagggaaccgctgtggcgctcctgcgactgctgctgctgctgctgccgccggcgatccggggacccgggctcggcgtggccggcgtggccggcgcggcgggggccgggctgcccgagagcgtcatttgggcggtcaacgcgggtggagaggcgcatgtggacgtgcacgggatccacttccgcaaggaccctttggaaggccgggtgggccgagcctcagactatggcatgaaactgccaatcctgcgttccaaccctgaggaccagatcctgtatcaaactgagcggtacaatgaggagacctttggctacgaagtgcccatcaaagaggagggggactacgtgctggtcttgaaatttgcagaggtctactttgcacagtcccagcaaaagatgtaccaaagcttcagcctcatccgggattggagaagaaagaagaggaagaagaagaagaagaatatgatgaagggtctaatctcaaaaaacagaccaataagaaccgggtgcagtcaggcccccgcacacccaacccctatgcctcggacaacagcagcctcatgtttcccatcctggtggccttcggagtcttcattccaaccctcttctgcctctgccggttgtgagaacaaatgactatcctgaacagggtggaggggtgtgggaaagaaaccagccatattggttttggtttctgtatttttcacaatgattaatgaacaaaaacaaagagaaaaaaacacacatcaattaaaggagacaaaaagaggc

SEQ ID NO: 151336 - DNA, 543 bp, Homo sapiens
  Payload ID: 9795
  Gene Symbol: MLEC
  Gene Name: malectin
  ENST ID: ENST00000535656
  CDS Start-End: 1-520
caatgaggagacctttggctacgaagtgcccatcaaagaggagggggactacgtgctggtcttgaaatttgcagaggtctactttgcacagtcccagcaaaaggtatttgatgtacgattgaatggccacgtcgtggtgaaggacttggatatctttgatcgtgttgggcatagcacagctcacgatgaaattatacctatgagcatcagaaaggggaagctgagtgtccagggggaggtgtccaccttcacagggaaactctacattgagtttgtcaagatgtaccaaagcttcagcctcatccgggattggagaagaaagaagaggaagaagaagaagaagaatatgatgaagggtctaatctcaaaaaacagaccaataagaaccgggtgcagtcaggcccccgcacacccaacccctatgcctcggacaacagcagcctcatgtttcccatcctggtggccttcggagtcttcattccaaccctcttctgcctctgccggttgtgagaacaaatgactatcctgaacagggtggagggg

SEQ ID NO: 151337 - DNA, 1089 bp, Homo sapiens
  Payload ID: 9796
  Gene Symbol: MEA1
  Gene Name: male-enhanced antigen 1
  Uniprot ID: Q16626
  ENST ID: ENST00000244711
  CDS Start-End: 156-713
gcggggctggaggactaggcacctctgcacgtcctgccccgccggaagtggaggccgcgggctctgagcgggtgaggcgcgcgggaacaccggcgccgggattcggatgggggcgggtgggggacgctgcagctggggccatttgaggggagcccatggggcctgaaaggcatctgtcaggcgcccctgcccggatggcaacagtagttctaggaggagacaccatgggccctgagcgtatcttccccaatcagactgaggaactgggacatcagggcccttcagaaggcactggggattggagcagtgaggagcctgaggaagagcaggaggaaacggggtcgggcccagctggctactcctaccagcccctgaaccaagatcctgaacaagaggaggtggaactggcaccagtgggggatggagatgtagttgctgacatccaggatcgaatccaggccctggggcttcatttgccagacccaccattagagagtgaagatgaagatgaggagggagctacagcgttgaacaaccacagctctattcccatggacccagaacatgtagagctggtgaaaaggacaatggctggagtaagcctgcctgcgccaggggttcctgcctgggctcgggagatatcggatgcccagtgggaagatgtggtacagaaagccctccaagcccggcaggcatcccctgcctggaagtgaccacagtgagagctgccttatattcctacattccaggccagaaccagcacaggactgaacacatccctggttgtaatgtccatttccatcttccccgtctccctttccacatcaaggcacatcagacttctcagagacccactttattcagttctgtacatatggggacatcggtccaagcccaacccaccttagcatgtatcactctgtggagaataaagcaccctatgtacacagccaaaagccgcactgcctgcgcccctggaacctgggtccggccttcctcagcccctggcccctccaaggtacctataagggacaagagaaggcctgcccagcatagcacaaacaaggaaataaataggtgttggcagga

SEQ ID NO: 151338 - DNA, 4707 bp, Homo sapiens
  Payload ID: 9797
  Gene Symbol: MSL1
  Gene Name: male-specific lethal 1 homolog (Drosophila)
  Uniprot ID: Q68DK7
  ENST ID: ENST00000398532
  CDS Start-End: 316-2160
gagctccggggatgagctcgggggcggctgggtgcgagctcctgcctctgaggcgaaggcggcggcggcggcagcagaggcggcggcgaggcccccatgggccggcggcgggcctcagccgcggcctccacgtctccgcacgccggcgggatggcgcccgggccccggaggagccgcgctagcggaggcctgctgccgcgctgctgaggcgagcccgccaaactcccctcccccccctcagtcctcgaccccccgcacctcgccccttccccaccccctcctccgcctcggtgcccggcgctgctccggaccactatgaccatgagatccgcggtgttcaaggcggccgcggcccctgccggcggcaatcctgagcagcgactggactacgagcgggctgcggcgctgggcgggcccgaggacgagcctggggcggccgaagcccacttcctcccccggcaccgtaagctcaaggagccggggcccccgctggcctcctcccagggcgggagccccgcgccttccccggccggctgcggcggcaagggccggggcttgttactcccggccggggcggcccccgggcagcaggaagagagctggggcggttcggtgcccttgccctgtccgcccccggccaccaagcaagccggcattgggggggagcctgccgcagccggagccggctgcagcccccggcccaagtatcaggcggtgctgcccattcagacgggctctctcgtggcggcggccaaagagcctacgccctgggctggggacaagggtggggcggcctcccccgctgccaccgcctcggacccggcgggacccccaccactacctctgcccgggccgccacccctcgcgcccaccgccaccgccgggaccctggcggccagcgagggcagatggaagagtatgaggaagagccctctcgggggtggtggcggctcgggagcctccagtcaggccgcctgcctcaaacagatccttctgctgcaattggacctcatcgaacagcagcagcagcagctgcaggccaaggaaaaggagatcgaggagctgaagtcagagagagacacgctccttgctcggattgaacgtatggaaaggcggatgcagctggtaaagaaggataacgagaaagaaaggcacaagctgtttcagggctatgaaactgaagagagagaggaaacagagctatctgagaaaattaaactggagtgccagccggagctttccgagacatcccagactctgcctcccaagcccttctcatgtgggcggagtggaaagggacataaaaggaaatccccatttggaagtacagaaagaaagactcctgttaaaaagctggctcctgaattttcaaaagtcaaaacaaaaactcctaagcactctcctattaaagaggaaccctgtggttccttatctgaaactgtttgtaaacgtgaattgaggagccaagaaaccccagaaaagccccggtcttcagtggacaccccaccaagactctccactccccaaaagggacccagcacccatcccaaggagaaagccttctcaagtgagatagaagatttgccgtacctttccaccacagaaatgtatttgtgtcgttggcaccagcctcccccatcaccgttaccattacgggaatcctctccaaagaaggaggagactgtagcaaggtgtctgatgccatcaagtgttgcaggagaaacttcagtcttggctgttccttcttggagggaccactcagtagagcctctaagggacccaaatccttcagaccttttggagaacctggatgacagtgtgttttcgaagcggcatgcaaaactggagctggatgagaagagaaggaaaagatgggatattcagaggatcagggaacaaagaattttacagcgactgcagctcagaatgtataaaaagaaaggaattcaggaatctgagcctgaggttacctcatttttccctgagccagatgatgttgaaagtttgatgattacccccttcttgcctgttgtagcatttggacgaccattaccaaaattaactccacagaattttgagctaccctggttggatgagcgtagccgatgcagattggagatccagaagaagcaaacacctcaccggacgtgtaggaaatagctgtgctggcaagaaccctgtcttcagatagttgtagcatgccattcccgagagtggcagagacctgtatatgtgacctttgtcctcacatatgttatcactcgctgataataccctttcatacttccttgactttgttttcattactctgatttcacaaaaactctttcattcggctaattgtgagttatggagggtgattgggatttcttttcccttttttgggaaatgggctctcaagctaaagctataggatggcagattcagaagtttcaggggtctgtttctatacatttgcctatgttaaaggggtaaaagggctctcttcattagacatgtggaagatgaagcagccccttcctttagagctgtgcctgcatggcactcttctcaccctggtacaccctccttatagtgggtatagtgatttttaaccctaaaataaaacaaacaacctcaccatgagctttaggaccagaagaggaatgacaagtgaagcgatgaagcaagccatcttcacagagtagaaaagacatcggagagttggtagataactgtctgaaaagatagttgttcatttgaaactattctgtgatacagtcatgtgggaagggatgtttggctgtgattattttttcagttaatggataacaatttctttactgctcaaaaaccaaaatctttggaaaagaaagtggggatggttagtttcagaacaagttacagctgtaaacaaaagcacttagtatttgggatggcatgccaaaacctgtataaatgtccttgtatcacatcacttctcaagtattccttcattgggcttcatccttttagcagaactcttggtggtgggatagagacttagggagggtagggggagagtgtggaaataggtgcttcctttggctggcaaatgtctacatcttgaaacaaacagatgtacctaatgagcttctccattcactttgtaaaaataatttgtatgtgtaccatcttggtcctctcccctcccgttttgttaaaatatcaggatagcactcccaggccactttggtctcagtgtaagatccctattaactatctgaaaggaaaatagagccaagacctctggtctcaaatatataggaattgcctttctttagtcttcaggactattgtgtgaaaacaagtaggggtctaatctcctagaaggtaggggcttttatccttaaagagaatatgtccccagattattagcacttttagaggagaagccaaggtatgtagggtgtgtggctggcccatcagtggagcacgaagagagaatgggataccattgtgggaagagaagaaaagttcctcaggggcctcccactgctaaagttttttgtgagatgttgatctgtgcttcctggatttgacttttaaaggaattattctggcagcacatgtagtattcttggatgatcttgctgctcttatttctccttttgtgtgtgtgtgtgtgtgtgtgtggctatgggttttcatttgtaactccatctgcttaggagagtgggctctctataagggaacctgctgtaaacttcattgcagcaaggatgtagagagaaataggacttaattccactaggggctctcatctcacaccttaaggaggagatttctagaaaaactgggccagattttctttgttctccatcattttaatgtggcaggctgttcagttttcttactcttacctatgtgatatttcttcgtaacgtgtccaaaaagaaaaaagacccaatcagtgtctcttgactttgttctttgatccctcagtttcttcttgatttcagcatgtgtcgggttcctaattttgggtatgagttagcaaatttaaccattgtgtttgtgccctacccaggggactccccagtttctgacttgaagtagactgagaagaatccacgaggtgctatctggccagatttaagtagattctatttccttggttctccctctccctgaggacctcttattttattgtcccctcttctaggttaattctcctttgatttgactttgttgagaaggaggttggacagtagattagcaaagttccaagtgcaaaattacagtgtgttagagtgtggggggaaaattagtcttatttttccctacatgggatacaacactgtgaattcaatcttcaactgaaggccctgcagttctcctaaaacatagttgtttgtttttctttaacaaagtttaagctagtgttaataaattaaaaaaaattgcttgtctgtctacttcagctttgttttatgcccatttcatattgttgtctgtgttgtaattcataacttttgataccatttctgatgtgtaaaattggttgtcttgtaaatatcttataaagagttcaattgtaaataaactattgtggctgttaatttttgaacttctgcttcaatttattatatttattggcaaacaaacaattctgcttgtatatttgaaacattggaaaaagaaatccattttctcaataaaaaagaataacacattattttccccttt

SEQ ID NO: 151339 - DNA, 525 bp, Homo sapiens
  Payload ID: 9797
  Gene Symbol: MSL1
  Gene Name: male-specific lethal 1 homolog (Drosophila)
  ENST ID: ENST00000582920
  CDS Start-End: 178-525
tatctcatggtgttgatttgtggaagttactcaacatggaggtggcactgctcagactgtactgcagtctaggggtgtgatggtaccgtaattacaacacatcatatccttgtatggggggagtgggaagagaaggaccagtgaaggagaaaaaaatcaaggaaatgtcacccacaaatggtggttaagggctgtgaatcaaaacatatacaaggagatgaaatgagagtatggctgataggggggttctctgctgattgtggaggtttctgctcagttcctgagctccttgctcggattgaacgtatggaaaggcggatgcagctggtaaagaaggataacgagaaagaaaggcacaagctgtttcagggctatgaaactgaagagagagaggaaacagagctatctgagaaaattaaactggagtgccagccggagctttccgagacatcccagactctgcctcccaagcccttctcatgtgggcggagtggaaagggacataaaaggaaatccccatttgga

SEQ ID NO: 151340 - DNA, 2267 bp, Homo sapiens
  Payload ID: 9797
  Gene Symbol: MSL1
  Gene Name: male-specific lethal 1 homolog (Drosophila)
  ENST ID: ENST00000578648
  CDS Start-End: 30-1826
ctcggtgcccggcgctgctccggaccactatgaccatgagatccgcggtgttcaaggcggccgcggcccctgccggcggcaatcctgagcagcgactggactacgagcgggctgcggcgctgggcgggcccgaggacgagcctggggcggccgaagcccacttcctcccccggcaccgtaagctcaaggagccggggcccccgctggcctcctcccagggcgggagccccgcgccttccccggccggctgcggcggcaagggccggggcttgttactcccggccggggcggcccccgggcagcaggaagagagctggggcggttcggtgcccttgccctgtccgcccccggccaccaagcaagccggcattgggggggagcctgccgcagccggagccggctgcagcccccggcccaagtatcaggcggtgctgcccattcagacgggctctctcgtggcggcggccaaagagcctacgccctgggctggggacaagggtggggcggcctcccccgctgccaccgcctcggacccggcgggacccccaccactacctctgcccgggccgccacccctcgcgcccaccgccaccgccgggaccctggcggccagcgagggcagatggaagagtatgaggaagagccctctcgggggtggtggcggctcgggagcctccagtcaggccgcctgcctcaaacagatccttctgctgcaattggacctcatcgaacagcagcagcagcagctgcaggccaaggaaaaggagatcgaggagctgaagtcagagagagacacgctccttgctcggattgaacgtatggaaaggcggatgcagctggtaaagaaggataacgagaaagaaaggcacaagctgtttcagggctatgaaactgaagagagagaggaaacagagctatctgagaaaattaaactggagtgccagccggagctttccgagacatcccagactctgcctcccaagcccttctcatgtgggcggagtggaaagggacataaaaggaaatccccatttggaagtacagaaagaaagactcctgttaaaaagctggctcctgaattttcaaaagtcaaaacaaaaactcctaagcactctcctattaaagaggaaccctgtggttccttatctgaaactgtttgtaaacgtgaattgaggagccaagaaaccccagaaaagccccggtcttcagtggacaccccaccaagactctccactccccaaaagggacccagcacccatcccaaggagaaagccttctcaagtgagatagaagatttgccgtacctttccaccacagaaatgtatttgtgtcgttggcaccagcctcccccatcaccgttaccattacgggaatcctctccaaagaaggaggagactgtagcaattccttcttggagggaccactcagtagagcctctaagggacccaaatccttcagaccttttggagaacctggatgacagtgtgttttcgaagcggcatgcaaaactggagctggatgagaagagaaggaaaagatgggatattcagaggatcagggaacaaagaattttacagcgactgcagctcagaatgtataaaaagaaaggaattcaggaatctgagcctgaggttacctcatttttccctgagccagatgatgttgaaagtttgatgattacccccttcttgcctgttgtagcatttggacgaccattaccaaaattaactccacagaattttgagctaccctggttggatgagcgtagccgatgcagattggagatccagaagaagcaaacacctcaccggacgtgtaggaaatagctgtgctggcaagaaccctgtcttcagatagttgtagcatgccattcccgagagtggcagagacctgtatatgtgacctttgtcctcacatatgttatcactcgctgataataccctttcatacttccttgactttgttttcattactctgatttcacaaaaactctttcattcggctaattgtgagttatggagggtgattgggatttcttttcccttttttgggaaatgggctctcaagctaaagctataggatggcagattcagaagtttcaggggtctgtttctatacatttgcctatgttaaaggggtaaaagggctctcttcattagacatgtggaagatgaagcagccccttcctttagagctgtgcctgcatggcactcttctcaccctggtacaccctccttatagtgggtatagtgatttttaaccctaaa

SEQ ID NO: 151341 - DNA, 580 bp, Homo sapiens
  Payload ID: 9797
  Gene Symbol: MSL1
  Gene Name: male-specific lethal 1 homolog (Drosophila)
  ENST ID: ENST00000582884
  CDS Start-End: 1-441
aagggacataaaaggaaatccccatttggaagtacagaaagaaagactcctgttaaaaagctggctcctgaattttcaaaagtcaaaacaaaaactcctaagcactctcctattaaagaggaaccctgtggttccttatctgaaactgtttgtaaacgtgaattgaggagccaagaaaccccagaaaagccccggtcttcagtggacaccccaccaagactctccactccccaaaagggacccagcacccatcccaaggagaaagccttctcaagtgagatagaagatttgccgtacctttccaccacagaaatgtatttgtgtcgttggcaccagcctcccccatcaccgttaccattacgggaatcctctccaaagaaggaggagactgtagcaaggtcaacttttactcacctgccatgttctgagtttaaggtttgatatccttggccatcaactgttgcagggaaaccaccctaaataatgaagaaaagaagtcgtctcagtgtaaaaaaaaaaagtgggtgtctgatgccatcaagtgttgcaggagaaacttcagtcttggctgttccttctt

SEQ ID NO: 151342 - DNA, 1401 bp, Homo sapiens
  Payload ID: 9797
  Gene Symbol: MSL1
  Gene Name: male-specific lethal 1 homolog (Drosophila)
  Uniprot ID: Q68DK7
  ENST ID: ENST00000579565
  CDS Start-End: 265-1320
tgaccatgagatccgcggtgttcaaggcggccgcggcccctgccggcggcaatcctgagcagcgactggactacgagcgggctgcggcgctgggcgggcccgaggacgagcctggggcggccgaagcccacttcctcccccggcaccatccttctgctgcaattggacctcatcgaacagcagcagcagcagctgcaggccaaggaaaaggagatcgaggagctgaagtcagagagagacacgctccttgctcggattgaacgtatggaaaggcggatgcagctggtaaagaaggataacgagaaagaaaggcacaagctgtttcagggctatgaaactgaagagagagaggaaacagagctatctgagaaaattaaactggagtgccagccggagctttccgagacatcccagactctgcctcccaagcccttctcatgtgggcggagtggaaagggacataaaaggaaatccccatttggaagtacagaaagaaagactcctgttaaaaagctggctcctgaattttcaaaagtcaaaacaaaaactcctaagcactctcctattaaagaggaaccctgtggttccttatctgaaactgtttgtaaacgtgaattgaggagccaagaaaccccagaaaagccccggtcttcagtggacaccccaccaagactctccactccccaaaagggacccagcacccatcccaaggagaaagccttctcaagtgagatagaagatttgccgtacctttccaccacagaaatgtatttgtgtcgttggcaccagcctcccccatcaccgttaccattacgggaatcctctccaaagaaggaggagactgtagcaaggtgtctgatgccatcaagtgttgcaggagaaacttcagtcttggctgttccttcttggagggaccactcagtagagcctctaagggacccaaatccttcagaccttttggagaacctggatgacagtgtgttttcgaagcggcatgcaaaactggagctggatgagaagagaaggaaaagatgggatattcagaggatcagggaacaaagaattttacagcgactgcagctcagaatgtataaaaagaaaggaattcaggaatctgagcctgaggttacctcatttttccctgagccagatgatgttgaaagtttgatgattacccccttcttgcctgttgtagcatttggacgaccattaccaaaattaactccacagaattttgagctaccctggttggatgagcgtagccgatgcagattggagatccagaagaagcaaacacctcaccggacgtgtaggaaatagctgtgctggcaagaaccctgtcttcagatagttgtagcatgccattcccgagagtggcagagacctgtatatgtgaccttt

SEQ ID NO: 151343 - DNA, 2081 bp, Homo sapiens
  Payload ID: 9797
  Gene Symbol: MSL1
  Gene Name: male-specific lethal 1 homolog (Drosophila)
  ENST ID: ENST00000577454
  CDS Start-End: 41-1426
ccctcctccgcctcggtgcccggcgctgctccggaccactatgaccatgagatccgcggtgttcaaggcggccgcggcccctgccggcggcaatcctgagcagcgactggactacgagcgggctgcggcgctgggcgggcccgaggacgagcctggggcggccgaagcccacttcctcccccggcaccgtaagctcaaggagccggggcccccgctggcctcctcccagggcgggagccccgcgccttccccggccggctgcggcggcaagggccggggcttgttactcccggccggggcggcccccgggcagcaggaagagagctggggcggttcggtgcccttgccctgtccgcccccggccaccaagcaagccggcattgggggggagcctgccgcagccggagccggctgcagcccccggcccaagtatcaggcggtgctgcccattcagacgggctctctcgtggcggcggccaaagagcctacgccctgggctggggacaagggtggggcggcctcccccgctgccaccgcctcggacccggcgggacccccaccactacctctgcccgggccgccacccctcgcgcccaccgccaccgccgggaccctggcggccagcgagggcagatggaagagtatgaggaagagccctctcgggggtggtggcggctcgggagcctccagtcaggccgcctgcctcaaacagatccttctgctgcaattggacctcatcgaacagcagcagcagcagctgcaggccaaggaaaaggagatcgaggagctgaagtcagagagagacacgctccttgctcggattgaacgtatggaaaggcggatgcagctggtaaagaaggataacgagaaagaaaggcacaagctgtttcagggctatgaaactgaagagagagaggaaacagagctatctgagaaaattaaactggagtgccagccggagctttccgagacatcccagactctgcctcccaagcccttctcatgtgggcggagtggaaagggacataaaaggaaatccccatttggaagtacagaaagaaagactcctgttaaaaagctggctcctgaattttcaaaagtcaaaacaaaaactcctaagcactctcctattaaagaggaaccctgtggttccttatctgaaactgtttgtaaacgtgaattgaggagccaagaaaccccagaaaagccccggtcttcagtggacaccccaccaagactctccactccccaaaagggacccagcacccatcccaaggagaaagccttctcaagtgagatagaagatttgccgtacctttccaccacagaaatgtatttgtgtcgttggcaccagcctcccccatcaccgttaccattacgggaatcctctccaaagaaggaggagactgtagcaagtaaggcatagagaacacttgctcttataccctagtggtggcggtcaagctaacaagtgtgaaaatgcctttggcatttttaaaaaagtgcaatcaataaagcagagttctgtcaagaatgagtaagttaacagccagagacagacactgtgcaggcattgcaaatagatggaattacagcaaaatgtgctcaatgtatttgcctgcttacaacactgggagatgtgtttgccagtaagttgctcatcacaagagcaccagacttgggggtgtaatctccggcaacttgcatgccctctgaaagaagggttttctgtgctgtgaaatgcatagaactatactttgccatgcacgactgttcctgcaattgatattgtgtgaaatctgggagggtggtctttgggtgttctcaggggccaatggtaatttttgggttggggagccagcttggggtggggaattttcacctgggcctccgctctttaactatataaacatttatctgtatatctatgtccctgtctggggggcaggaggaatctgccaaagaccaacagtcttactttatcttactatacttcacaaaggttctaaaatgtgaagagtttacttggattgcagtagcccattggttgttcatatatttaaataaaatggtctacaaac

SEQ ID NO: 151344 - DNA, 4692 bp, Homo sapiens
  Payload ID: 9798
  Gene Symbol: MSL2
  Gene Name: male-specific lethal 2 homolog (Drosophila)
  Uniprot ID: Q9HCI7
  ENST ID: ENST00000309993
  CDS Start-End: 734-2467
gcacttcctccccggccttcccctccgggttgaggactcccgcccgcctcgccacctcggggaactgcgggctgcaacccacggggcggagagccagggcgcagtctgggccccgcgtccgatatggagagcgcggcggcggcgtccgccagccgcaacatcaaccttcgtcgccgccgcggcgtcttgcactagatccgggaagccgctgcccgaccgtcgtccttgccgtcgccgccgcctccgcgccctgtactgggatggagtaagaggccctgcagcccgggagaagcgtgccgcgcctcagacggggccggggcctgctcccgcgcctgccagctcgacttgaggaggcgcctccgtgtccggagatggagctcgagtgcaggccgcctgccgagccgcggggctagactgagctccgagtcccgccccgagcgcccaagccgccgcgttctgcgctctgtggtcgctccggacgaactcgaacgctggtttctctctcatatttttggtctggaagtctcagggacggaggggcgccaaggccccatgtgtgggaggattgtttcagctccacaaacttgcacggattttggttacttgtttggccaatggttcggctctgatttcttccgaattgttgcaaattcgccatcgttccctggctgcttactaagttggatccggaatttcttttcaaccgggagccattggtgtcgaagtgtctgcaatgaaccccgtgaatgctactgctctctacatttccgcgagccgcctagtgctcaactacgaccccggagaccccaaggcgtttactgagattaacaggctcttgccttacttccgacagtccctttcgtgctgtgtttgcggacatttgctacaagatcctattgcacccaccaactccacctgccaacattatgtctgcaaaacttgtaaaggcaagaaaatgatgatgaaaccttcctgtagctggtgcaaagactatgagcagtttgaggaaaacaagcagttaagcatcctagtgaactgctacaaaaaactatgcgagtatataacacagactacactggcacgggatataatagaagcagttgactgttcttctgatattttggctttgcttaatgatggatcattgttttgtgaggagacagaaaaaccctcagattcatcctttactttgtgtttgacacattcccctttaccttcaacctcagaacccacaactgatcctcaagctagtttatctccaatgtctgaaagcaccctcagcattgctattggcagttctgttatcaatggtttgcctacttataatgggctttcaatagatagatttggtataaatattccttcacctgaacattcaaatacgattgacgtatgtaatactgttgacataaaaactgaggatctgtctgacagcctgccacccgtttgtgacacagtagccactgacttatgttccacaggcattgatatctgcagtttcagtgaagatataaaacctggagactctctgttactgagtgttgaggaagtactccgcagcttagaaactgtttcaaatacagaggtctgttgccctaatttgcagccgaacttggaagccactgtatccaatggaccttttctgcagctttcttcccagtctcttagccataatgtttttatgtccaccagtcctgcacttcatgggttatcatgtacagcagcaactccgaagatagcaaaattgaatagaaaacgatccagatcagagagtgacagtgagaaagttcagccacttccaatttctaccattatccgaggcccaacactgggggcatctgctcctgtgacagtgaaacgggagagcaaaatttctcttcaacctatagcaactgttcccaatggaggcacaacacctaaaatcagcaaaactgtacttttatctactaaaagcatgaaaaagagtcatgaacatggatccaagaaatctcactctaaaaccaagccaggtattcttaaaaaagacaaagcagtaaaggaaaagattcctagtcatcattttatgccaggaagtcctaccaagactgtgtacaaaaaaccccaggaaaagaaagggtgtaaatgtgggcgtgctactcaaaatccaagtgttcttacatgccgaggccaacgctgcccttgctactctaaccgcaaagcctgcttagattgtatatgtcgtggctgccaaaactcctatatggccaatggggagaagaagctggaggcatttgccgtgccagaaaaggccttggagcagaccaggctcactttgggcattaacgtgactagcattgctgtgcgtaacgctagtaccagcaccagtgtaataaatgtcacagggtccccagtaacgacgtttttagctgccagtacacatgatgataaaagtttggatgaagctatagacatgagattcgactgttaaatcagtgggtcttttaaacctactcctggtagggaaatagctacagttttacggcagctatggttctgttggtttaacttgccggagctcctgcatatagatcacttgtatcaagtgttttcattgctaagttatatgtgttagtgtcggggaaatagtttgcagataatggaggagtaaccctacaactatatgtccttagttcttacagaacctcatagtttgagaacaaagctgatgcaactgatttatacaaaatgaactttggcaagaaaaataacattaacctcattgtttatggccatgctttgtgcataatcaaagtttatgattaaatgtaaggaagtggtatctagtcagtccataaagattgtgctaatttttttgtggaaaagtagccattagttcaggaaactcagtgctgccttcagatgtcattgatgtttctcctgttggaaagctgatgtgtccagctcaacctttgtgctgacatcataccatttctgatcatgaaatattggctactggtgtatgtagcagttcttaaatcagcagtattatgaaaaaaaattccccctcattagaatgtttaagaaatctttttaaaaagtaaaattctgtcagactacaaatgtttagctgttactcatttctagggaagaaattctaaatccctccttcactttgagcagtgttctaattggataaatgaaggagagtagttttattctgaaggtaattaaatttagactatgtagtatgtgacagaatttttttaaaattataaaaagattttatttagtaattgggatttacttaaaataattttggaataatgctcccagacttgcccagatttgtgtattgtacttattgccactggccgccactttgacttattttctctaatagtttatttgccacagtctttattttgaatatgctcctagtttttttttagggtgctgttcattatgaaggcttctttatagaggcctaataagaatgcctttttataaagcctgtgcatttaggtaggttgaagctaggaggattttctttagaatgctcttttgcatgtaaagcacaaagtatgtttcagtttaaatgcacttcttccggttaatttttatggggaagacaagtgagtcacaaacattctgttgaagggaaatctagtcagttgcttgaaagagcacagcccaaataaaacaaggactgactaggtgtaatgaaataacctgtgatttaaaagaagagctgcagctttgacagtgcttatttaaagaaaaatactgctggaaaatttccaatttctactacgttcaccatctctagtaagatctgacatatgctgaagttatgttttgatttggcacacagcatgttcaatgatggttactcgcctagtacaagacatggagaagaaacctttggacacagagcagatgacacctccttctgttttgtagtgtatcctggtgtcattttctgtgaatgtggtcaggtagagttgtttttgttgttgttgttgggcttttttttctttttttttttttggtctcttttggtggggtgggggtgggctaaagccataggaagaaaaatgtgatgtatgtgtccagtatgtactattttgtttttgttttgcaagaagagttgaactatttttgataacaagagtaaatggtggaaaatgcttcttagttgtcttgtctttatttgctttccaagatttggaattttatttaattcctttaagtgttagcagtgtcttatgaaacgtgtatttacctaacgtttgtaacagttttgtgttgaacccagatgccctgctatataaagttgtaaatctgttctttattcactaatgatcactgcaaaaatgattagaaatgagattgtacacatggatgaggatatattttgcaaatcgaccaaactttcctaatattatgatcttaaaattcatagagtactttattgcttcccaagtttgataatcttgtgggtttttttttttttttgatgcatgggaggttggcaatatagacaaagtggaaatcattagtatgtgagggccttgattgttatgtaatattgccaatgatgaattcaggttgtttttagcacaagtttctcttttttatgctggtattctcactgccacatttttggaaacctgtattacaccttaaatctatcaataaatgatagttttctaa

SEQ ID NO: 151345 - DNA, 2272 bp, Homo sapiens
  Payload ID: 9798
  Gene Symbol: MSL2
  Gene Name: male-specific lethal 2 homolog (Drosophila)
  Uniprot ID: Q9HCI7
  ENST ID: ENST00000434835
  CDS Start-End: 241-1752
aaactggtgttacgtgggagtggtgggctaagctgatgaacccacagctggagaacccggcgcggaactttgccccaggttcctccacaaatgctttgacggtttgacggttaacagcgagccggggaaggctgttggtactcgaagtgctttttagctggacatttgctacaagatcctattgcacccaccaactccacctgccaacattatgtctgcaaaacttgtaaaggcaagaaaatgatgatgaaaccttcctgtagctggtgcaaagactatgagcagtttgaggaaaacaagcagttaagcatcctagtgaactgctacaaaaaactatgcgagtatataacacagactacactggcacgggatataatagaagcagttgactgttcttctgatattttggctttgcttaatgatggatcattgttttgtgaggagacagaaaaaccctcagattcatcctttactttgtgtttgacacattcccctttaccttcaacctcagaacccacaactgatcctcaagctagtttatctccaatgtctgaaagcaccctcagcattgctattggcagttctgttatcaatggtttgcctacttataatgggctttcaatagatagatttggtataaatattccttcacctgaacattcaaatacgattgacgtatgtaatactgttgacataaaaactgaggatctgtctgacagcctgccacccgtttgtgacacagtagccactgacttatgttccacaggcattgatatctgcagtttcagtgaagatataaaacctggagactctctgttactgagtgttgaggaagtactccgcagcttagaaactgtttcaaatacagaggtctgttgccctaatttgcagccgaacttggaagccactgtatccaatggaccttttctgcagctttcttcccagtctcttagccataatgtttttatgtccaccagtcctgcacttcatgggttatcatgtacagcagcaactccgaagatagcaaaattgaatagaaaacgatccagatcagagagtgacagtgagaaagttcagccacttccaatttctaccattatccgaggcccaacactgggggcatctgctcctgtgacagtgaaacgggagagcaaaatttctcttcaacctatagcaactgttcccaatggaggcacaacacctaaaatcagcaaaactgtacttttatctactaaaagcatgaaaaagagtcatgaacatggatccaagaaatctcactctaaaaccaagccaggtattcttaaaaaagacaaagcagtaaaggaaaagattcctagtcatcattttatgccaggaagtcctaccaagactgtgtacaaaaaaccccaggaaaagaaagggtgtaaatgtgggcgtgctactcaaaatccaagtgttcttacatgccgaggccaacgctgcccttgctactctaaccgcaaagcctgcttagattgtatatgtcgtggctgccaaaactcctatatggccaatggggagaagaagctggaggcatttgccgtgccagaaaaggccttggagcagaccaggctcactttgggcattaacgtgactagcattgctgtgcgtaacgctagtaccagcaccagtgtaataaatgtcacagggtccccagtaacgacgtttttagctgccagtacacatgatgataaaagtttggatgaagctatagacatgagattcgactgttaaatcagtgggtcttttaaacctactcctggtagggaaatagctacagttttacggcagctatggttctgttggtttaacttgccggagctcctgcatatagatcacttgtatcaagtgttttcattgctaagttatatgtgttagtgtcggggaaatagtttgcagataatggaggagtaaccctacaactatatgtccttagttcttacagaacctcatagtttgagaacaaagctgatgcaactgatttatacaaaatgaactttggcaagaaaaataacattaacctcattgtttatggccatgctttgtgcataatcaaagtttatgattaaatgtaaggaagtggtatctagtcagtccataaagattgtgctaatttttttgtggaaaagtagccattagttcaggaaactcagtgctgccttcagatgtcattgatgtttctcctgttggaaagctgatgtgtccagctcaacctttgtgctgacatcataccatttctgatcatgaaatattg

SEQ ID NO: 151346 - DNA, 559 bp, Homo sapiens
  Payload ID: 9798
  Gene Symbol: MSL2
  Gene Name: male-specific lethal 2 homolog (Drosophila)
  ENST ID: ENST00000491050
  CDS Start-End: 113-559
atgcgcagtgagcccagggtgggttggcagcggacatttgctacaagatcctattgcacccaccaactccacctgccaacattatgtctgcaaaacttgtaaaggcaagaaaatgatgatgaaaccttcctgtagctggtgcaaagactatgagcagtttgaggaaaacaagcagttaagcatcctagtgaactgctacaaaaaactatgcgagtatataacacagactacactggcacgggatataatagaagcagttgactgttcttctgatattttggctttgcttaatgatggatcattgttttgtgaggagacagaaaaaccctcagattcatcctttactttgtgtttgacacattcccctttaccttcaacctcagaacccacaactgatcctcaagctagtttatctccaatgtctgaaagcaccctcagcattgctattggcagttctgttatcaatggtttgcctacttataatgggctttcaatagatagatttggtataaatattccttcacctgaacattcaaatacgattgacgtatgtaatact

SEQ ID NO: 151347 - DNA, 543 bp, Homo sapiens
  Payload ID: 9798
  Gene Symbol: MSL2
  Gene Name: male-specific lethal 2 homolog (Drosophila)
  ENST ID: ENST00000473093
  CDS Start-End: 259-543
gtgcgagcgctagcgacgacggcggcgggggagtctcggggatgacagtggctttgcccgttggggtaacggtcgtcgtcgccgccagcagaggcctgaggcgccacacagcccgcgggatccattaaggccgcagcagcccgggccctaccgagctggagtggcgcgtggagtcggggacatttgctacaagatcctattgcacccaccaactccacctgccaacattatgtctgcaaaacttgtaaaggcaagaaaatgatgatgaaaccttcctgtagctggtgcaaagactatgagcagtttgaggaaaacaagcagttaagcatcctagtgaactgctacaaaaaactatgcgagtatataacacagactacactggcacgggatataatagaagcagttgactgttcttctgatattttggctttgcttaatgatggatcattgttttgtgaggagacagaaaaaccctcagattcatcctttactttgtgtttgacacattcccctttaccttcaacctcagaacccacaactgat

SEQ ID NO: 151348 - DNA, 576 bp, Homo sapiens
  Payload ID: 9798
  Gene Symbol: MSL2
  Gene Name: male-specific lethal 2 homolog (Drosophila)
  ENST ID: ENST00000481989
  CDS Start-End: 114-576
agctcggtgaagtcctgatcggcacccatgaaggacatttgctacaagatcctattgcacccaccaactccacctgccaacattatgtctgcaaaacttgtaaaggcaagaaaatgatgatgaaaccttcctgtagctggtgcaaagactatgagcagtttgaggaaaacaagcagttaagcatcctagtgaactgctacaaaaaactatgcgagtatataacacagactacactggcacgggatataatagaagcagttgactgttcttctgatattttggctttgcttaatgatggatcattgttttgtgaggagacagaaaaaccctcagattcatcctttactttgtgtttgacacattcccctttaccttcaacctcagaacccacaactgatcctcaagctagtttatctccaatgtctgaaagcaccctcagcattgctattggcagttctgttatcaatggtttgcctacttataatgggctttcaatagatagatttggtataaatattccttcacctgaacattcaaatacgattgacgtatgtaatactgttgacataaaaactg

SEQ ID NO: 151349 - DNA, 2345 bp, Homo sapiens
  Payload ID: 9799
  Gene Symbol: MSL3
  Gene Name: male-specific lethal 3 homolog (Drosophila)
  Uniprot ID: Q8N5Y2
  ENST ID: ENST00000312196
  CDS Start-End: 106-1671
cggccccccccggccacggcgcaccgcctccccgcccccgcccgccctcccccaccgcgcgcgctccgcccgccccggagcctcgccctccgccacgatgagcaaatgagcgcgagcgagggcatgaaatttaaattccactcaggggagaaagtgctgtgcttcgagcctgaccccaccaaggcgcgagtgctgtacgatgccaagattgttgatgttattgttgggaaagacgaaaaaggcagaaagatcccagaatatctgatccattttaatggttggaacagaagctgggatagatgggcagcagaagatcatgtgcttcgtgataccgatgaaaatcgtagattacagcgtaaattggcaagaaaagctgtagctcgcctgaggagcacaggaagaaagaagaagcgctgcaggttgcctggtgtggactctgtcttaaaaggcctccccactgaagaaaaagatgaaaatgatgaaaactcattaagcagttcctctgactgtagtgaaaacaaggatgaagaaataagtgaagaaagtgatattgaagaaaagactgaagtgaaagaagaaccagagcttcaaacaagaagggaaatggaagaaagaacaataactatagaaatccctgaagttctgaagaagcagctggaggatgattgttactacattaacaggaggaaacggttagtgaaacttccatgccagaccaacatcataacgattttggaatcctatgtgaagcattttgctatcaatgcagccttttcagccaatgagaggcctcgtcaccatcacgttatgccacatgccaacatgaacgtgcattatatcccagcagaaaagaatgttgacctttgtaaggagatggtggatggattaagaataacctttgattacactctcccgttggttttactctatccatatgaacaagctcagtataaaaaggtgacttcgtctaaattttttcttccaattaaggaaagtgccacaagcactaacaggagccaggaggaactctctcccagtccgcctttgttgaatccatccacgccacagtccacagagagtcagccgaccaccggtgaaccagccacccccaaaaggcgcaaagctgagccagaagcattgcagtctctgaggcggtccacgcgccacagtgccaactgtgacaggctttctgagagcagcgcttcacctcagcccaagcgccggcagcaggacacatccgccagcatgcccaagctcttcctgcacctggaaaagaagacacctgtgcatagcagatcatcttcacctattcctctgactcctagcaaggaagggagtgctgtgtttgctggctttgaagggagaagaactaatgaaataaacgaggtcctctcctggaagcttgtgcctgacaattaccccccaggtgaccagccgcctccaccctcttacatttatggggcacaacatttgctgcgattgtttgtgaaacttccagaaatccttggaaagatgtccttttctgagaagaatctgaaggctttattgaagcactttgatctctttttgaggtttttagcagaataccacgatgacttcttcccagagtcggcttatgtcgctgcctgtgaggcacattacagcaccaagaacccccgggcaatttattaaaatgttgttggttctgtaagagcaactgctctgtctagtttggcgctctgggttccaggtgaataactaacaaggtggtgggtctttacccacagcgcaaacacaatgcccaccttggggctctgttgtttgagttgcccacatactgcagttattctgttaggaatgattccctgggtgcctgaaagtgctctgacacgacacttgttactttgcaggccatctgtgatggcaaggaaaaagcaactatgttcacagtgaaatattcgtggaataggttaggccatttcagtagacattgcagttagttagcaagaaccacattgtctctttatttgttagcattaaacaaatttttttttgcaaattggttttatttttttgatgaagccgagcaactctgtccaaaaaggtttagtttgtactcggaaaccacaaagtagtctcaaagtattttagagggaatcgatattgatggcaaaagaaaatttgcagctatgcatttgcttctaacggttccctctctgtgaaacattatttttggtgatctaaagaaagcattgcctttcttatttgagattttacagctatactttgttgtgtaatgttatggttccctttctgtaaaatgttatttttggtgatctaaataaagcctgtcttgtttgaaagaa

SEQ ID NO: 151350 - DNA, 3446 bp, Homo sapiens
  Payload ID: 9799
  Gene Symbol: MSL3
  Gene Name: male-specific lethal 3 homolog (Drosophila)
  Uniprot ID: Q8N5Y2
  ENST ID: ENST00000337339
  CDS Start-End: 28-1278
agcctcgccctccgccacgatgagcaaatgagcgcgagcgagggcatgaaatttaaattccactcaggggagaaagtgctgtgcttcgagcctgaccccaccaaggcgcgagtgctgtacgatgccaagattgttgatgttattgttgggaaagacgaaaaaggcagaaagatcccagaatatctgatccattttaatggttggaacagaagctgggatagatgggcagcagaagatcatgtgcttcgtgataccgatgaaaatcgtagattacagcgtaaattggcaagaaaagctgtagctcgcctgaggagcacaggaagaaagaagaagcgctgcaggttgcctggtgtggactctgtcttaaaaggcctccccactgaagaaaaagatgaaaatgatgaaaactcattaagcagttcctctgactgtagtgaaaacaaggatgaagaaataagtgaagaaagtgatattgaagaaaagactgaagtgaaagaagaaccagagcttcaaacaagaagggaaatggaagaaagaacaataactatagaaatccctgaagttctgaagaagcagctggaggatgattgttactacattaacaggaggaaacggttagtgaaacttccatgccagaccaacatcataacgattttggaatcctatgtgaagcattttgctatcaatgcagccttttcagccaatgagaggcctcgtcaccatcacgttatgccacatgccaacatgaacgtgcattatatcccagcagaaaagaatgttgacctttgtaaggagatggtggatggattaagaataacctttgattacactctcccgttggttttactctatccatatgaacaagctcagtataaaaaggtgacttcgtctaaattttttcttccaattaaggaaagtgccacaagcactaacaggagccaggaggaactctctcccagtccgcctttgttgaatccatccacgccacagtccacagagagtcagccgaccaccggtgaaccagccacccccaaaaggcgcaaagctgagccagaagcattgcagtctctgaggcggtccacgcgccacagtgccaactgtgacaggctttctgagagcagcgcttcacctcagcccaagcgccggcagcaggacacatccgccagcatgcccaagctcttcctgcacctggaaaagagtaggttcattctcgggtgccccaggccggggagagccagcgtgtactttgtgtttagtcagtgccaggcatggtgctgaggttacatgtgtgtgtgtacagtgcgtgtgattcccatgtccaaagtgctgtcatgctgcctgctttctggagctgtagaaagttgaaacacctggcgcagattgcagcgcagctgtgttggaggcaggactgggctgtttcctcagcctttcttttttgccatcactctaccacttgtgagcaaattgagttatcagaattctatgtattgtgtagctaggcctaatgaagcattcaaaatgagcaatgctaatgggttgtttagctttttgttttctttgtactctgtctctgtagtctctccattctaaagtttaatttggaaaggtctgtcctgaattatcaaagtaagaatactcagatttccataagctcttctcacctcctcttagcccaactcaaactccatcagatcttctcaccttgattttgagctggaatgtttcaatgagcaaaataaattagacaaaagtttactttctttttttccaaaatacacacaggttgatttgctgtaatataaaacttagaagtaaaccactgctaattaatcattttaaactttcaaaaactgctaaaacaggtgccatgaatcaggtacaattactgtagaaactaacattagctattatacactaaccaggcatttttcccaaattaattacaatctggttgtttagcctatgctaattaagccctcttagtagtagtattcactttacattgaagacctcattcacaaatacagggtgctctgtgcttatatccttccacccttgactgccaaaaatgtgtgaaatggaaagttgatggcagcagggccgacgatgtcacctggtgcctcgcgggctcagtgagttaggaagtcagcagcaggggaggcagcttgcatgcctgtcccccggcacactgtgtggaggtggaaacagagctacgccagcaggcgccaagcacccaactccagagatggaagcctggtggccttcctttcacagagctcagctgctcgcaggctgtgaaatctaagacacccctcataaatatcaaaaacacctccaaagctaacgtcagggtaaaactacttggagtcgaatccccatgccccagtaggtgtatcttgtgtatgacctgtgccctgttcttccctcagcctcgcctgctgtgctgactccttcaggggtccttctaagcatcatcctgttggaactcccaaaagtcatcccagtgccattctgtgttcaggtgcccatttccttgtgtacatcctgtccctgccacatccataagctcctgagagaaaggtctgacttgttgattgtgtcaccccatcacagctcagtgttggtggcatagttccaggtgcgtgaaagtatttgctgattctttgaagattgggaaggctcagaagggcagagttgaagaaggcatacctttaagagaagccctttgaataatcaagtgctaaaacaaaatcaggtgcttttttaaaacagcttgattgagatataatccacataccttaaaattcacacatttaaagtttttagtgtctccagacacagtggttcatgcctgtgagactggggcaggaggatcacttgaggccaggagttcaagatcagcctgggcaatatagtgaaaccccatctcttaaagaaaaagttagccaggtgtgatgatgtgcacctatagtcccagctacttgggaggctgcagctgtggctgtggctgaagctggcggatcgcttgaggcccagagtctaagactgcagtgagctctcattgggccactgcagtcgagcctgggcgacacaaagagaccaccctgtctgatagataactaacaaaatagttttagttgggcaaaattaaagagttgggcaaccatcactgaaatcagtttcagacattttcaccactccaaaaaagaaaccccacatcgactagcagttactcatttgcttctccctatgtcccctgacaaccactaatctatttgtctctatagatttgccagtttggggcatttcatataaatggaatcatctgtatgtaagtggttaataaggattggttgattgaagattgaaaagggtcagctgggaaaatttttaaaaagactgtttttaaaaaggtgctacaaaataaagtgctatctttttctgtt

SEQ ID NO: 151351 - DNA, 2256 bp, Homo sapiens
  Payload ID: 9799
  Gene Symbol: MSL3
  Gene Name: male-specific lethal 3 homolog (Drosophila)
  Uniprot ID: Q8N5Y2
  ENST ID: ENST00000361672
  CDS Start-End: 470-1588
cggccccccccggccacggcgcaccgcctccccgcccccgcccgccctcccccaccgcgcgcgctccgcccgccccggagcctcgccctccgccacgatgagcaaatgagcgcgagcgagggcatgaaatttaaattccactcaggggagaaagtgctgtgcttcgagcctgaccccaccaaggcgcgagtgctgtacgatgccaagattgttgatgttattgttgggaaagacgaaaaaggcagaaagatcccagaatatctgatccattttaatggttggaacagaagctgggatagatgggcagcagaagatcatgtgcttcgtgataccgatgaaaatcgtagattacagcgtaaattggcaagaaaagctgtagctcgcctgaggagcacaggaagaaagaagaagcgctgcaggttgcctggtgtggactctgtcttaaaaggcctccccactgaagaaaaagatgaaaatgatgaaaactaaagaagaaccagagcttcaaacaagaagggaaatggaagaaagaacaataactatagaaatccctgaagttctgaagaagcagctggaggatgattgttactacattaacaggaggaaacggttagtgaaacttccatgccagaccaacatcataacgattttggaatcctatgtgaagcattttgctatcaatgcagccttttcagccaatgagaggcctcgtcaccatcacgttatgccacatgccaacatgaacgtgcattatatcccagcagaaaagaatgttgacctttgtaaggagatggtggatggattaagaataacctttgattacactctcccgttggttttactctatccatatgaacaagctcagtataaaaaggtgacttcgtctaaattttttcttccaattaaggaaagtgccacaagcactaacaggagccaggaggaactctctcccagtccgcctttgttgaatccatccacgccacagtccacagagagtcagccgaccaccggtgaaccagccacccccaaaaggcgcaaagctgagccagaagcattgcagtctctgaggcggtccacgcgccacagtgccaactgtgacaggctttctgagagcagcgcttcacctcagcccaagcgccggcagcaggacacatccgccagcatgcccaagctcttcctgcacctggaaaagaagacacctgtgcatagcagatcatcttcacctattcctctgactcctagcaaggaagggagtgctgtgtttgctggctttgaagggagaagaactaatgaaataaacgaggtcctctcctggaagcttgtgcctgacaattaccccccaggtgaccagccgcctccaccctcttacatttatggggcacaacatttgctgcgattgtttgtgaaacttccagaaatccttggaaagatgtccttttctgagaagaatctgaaggctttattgaagcactttgatctctttttgaggtttttagcagaataccacgatgacttcttcccagagtcggcttatgtcgctgcctgtgaggcacattacagcaccaagaacccccgggcaatttattaaaatgttgttggttctgtaagagcaactgctctgtctagtttggcgctctgggttccaggtgaataactaacaaggtggtgggtctttacccacagcgcaaacacaatgcccaccttggggctctgttgtttgagttgcccacatactgcagttattctgttaggaatgattccctgggtgcctgaaagtgctctgacacgacacttgttactttgcaggccatctgtgatggcaaggaaaaagcaactatgttcacagtgaaatattcgtggaataggttaggccatttcagtagacattgcagttagttagcaagaaccacattgtctctttatttgttagcattaaacaaatttttttttgcaaattggttttatttttttgatgaagccgagcaactctgtccaaaaaggtttagtttgtactcggaaaccacaaagtagtctcaaagtattttagagggaatcgatattgatggcaaaagaaaatttgcagctatgcatttgcttctaacggttccctctctgtgaaacattatttttggtgatctaaagaaagcattgcctttcttatttgagattttacagctatactttgttgtgtaatgttatggttccctttctgtaaaatgttatttttggtgatctaaataaagcctgtcttgtttg

SEQ ID NO: 151352 - DNA, 589 bp, Homo sapiens
  Payload ID: 9799
  Gene Symbol: MSL3
  Gene Name: male-specific lethal 3 homolog (Drosophila)
  ENST ID: ENST00000380691
  CDS Start-End: 1-351
gtgaagcattttgctatcaatgcagccttttcagccaatgagaggcctcgtcaccatcacgttatgccacatgccaacatgaacgtgcattatatcccagcagaaaagaatgttgacctttgtaaggagatggtggatggattaagaataacctttgattacactctcccgttggttttactctatccatatgaacaagctcagtataaaaaggtgacttcgtctaaattttttcttccaattaaggaaagtgccacaagcactaacagtccacagagagtcagccgaccaccggtgaaccagccacccccaaaaggcgcaaagctgagccagaagcattgcagtctctgaggcggtccacgcgccacagtgccaactgtgacaggctttctgagagcagcgcttcacctcagcccaagcgccggcagcaggacacatccgccagcatgcccaagctcttcctgcacctggaaaagaagacacctgtgcatagcagatcatcttcacctattcctctgactcctagcaaggaagggagtgctgtgtttgctggctttgaagggagaagaactaatgaaataaacgaggt

SEQ ID NO: 151353 - DNA, 1071 bp, Homo sapiens
  Payload ID: 9799
  Gene Symbol: MSL3
  Gene Name: male-specific lethal 3 homolog (Drosophila)
  ENST ID: ENST00000380692
  CDS Start-End: 482-1071
ccacttgggggaaaaaaatgaaaggaaaaatatttcaacccggctgtcggtctaaaagaggagagaatgctttctttaaaaaaggattgttgatgttattgttgggaaagacgaaaaaggcagaaagatcccagaatatctgatccattttaatggttggaacagaagctgggatagatgggcagcagaagatcatgtgcttcgtgataccgatgaaaatcgtagattacagcgtaaattggcaagaaaagctgtagctcgcctgaggagcacaggaagaaagaagaagcgctgcaggttgcctggtgtggactctgtcttaaaaggcctccccactgaagaaaaagatgaaaatgatgaaaactcattaagcagttcctctgactgtagtgaaaacaaggatgaagaaataagtgaagaaagtgatattgaagaaaagactgaagtgaaagaagaaccagagcttcaaacaagaagggaaatggaagaaagaacaataactatagaaatccctgaagttctgaagaagcagctggaggatgattgttactacattaacaggaggaaacggttagtgaaacttccatgccagaccaacatcataacgattttggaatcctatgtgaagcattttgctatcaatgcagccttttcagccaatgagaggcctcgtcaccatcacgttatgccacatgccaacatgaacgtgcattatatcccagcagaaaagaatgttgacctttgtaaggagatggtggatggattaagaataacctttgattacactctcccgttggttttactctatccatatgaacaagctcagtataaaaaggtgacttcgtctaaattttttcttccaattaaggaaagtgccacaagcactaacaggagccaggaggaactctctcccagtccgcctttgttgaatccatccacgccacagtccacagagagtcagccgaccaccggtgaaccagccacccccaaaaggcgcaaagctgagccagaagcattgcagtctctgaggcggtccacgcgccacagtgccaactgtgacaggctttctga

SEQ ID NO: 151354 - DNA, 2377 bp, Homo sapiens
  Payload ID: 9799
  Gene Symbol: MSL3
  Gene Name: male-specific lethal 3 homolog (Drosophila)
  Uniprot ID: Q8N5Y2
  ENST ID: ENST00000380693
  CDS Start-End: 638-1705
cagaagcctcacactgtctcacgctcagagaccaatcacggggtggttggacggatgtttcctattttgaaggcgtccacttgggggaaaaaaatgaaaggaaaaatatttcaacccggctgtcggtctaaaagaggagagaatgctttctttaaaaaagggtctgtgaattagttttcctgatctaacttctaattttctgtatgttctgccatttgtgggaaatatttcttcgtttcagattgttgatgttattgttgggaaagacgaaaaaggcagaaagatcccagaatatctgatccattttaatggttggaacagaagctgggatagatgggcagcagaagatcatgtgcttcgtgataccgatgaaaatcgtagattacagcgtaaattggcaagaaaagctgtagctcgcctgaggagcacaggaagaaagaagaagcgctgcaggttgcctggtgtggactctgtcttaaaaggcctccccactgaagaaaaagatgaaaatgatgaaaactcattaagcagttcctctgactgtagtgaaaacaaggatgaagaaataagtgaagaaagtgatattgaagaaaagactgaagtgaaagaagaaccagagcttcaaacaagaagggaaatggaagaaagaacaataactatagaaatccctgaagttctgaagaagcagctggaggatgattgttactacattaacaggaggaaacggttagtgaaacttccatgccagaccaacatcataacgattttggaatcctatgtgaagcattttgctatcaatgcagccttttcagccaatgagaggcctcgtcaccatcacgttatgccacatgccaacatgaacgtgcattatatcccagcagaaaagaatgttgacctttgtaaggagatggtggatggattaagaataacctttgattacactctcccgttggttttactctatccatatgaacaagctcagtataaaaaggtgacttcgtctaaattttttcttccaattaaggaaagtgccacaagcactaacaggagccaggaggaactctctcccagtccgcctttgttgaatccatccacgccacagtccacagagagtcagccgaccaccggtgaaccagccacccccaaaaggcgcaaagctgagccagaagcattgcagtctctgaggcggtccacgcgccacagtgccaactgtgacaggctttctgagagcagcgcttcacctcagcccaagcgccggcagcaggacacatccgccagcatgcccaagctcttcctgcacctggaaaagaagacacctgtgcatagcagatcatcttcacctattcctctgactcctagcaaggaagggagtgctgtgtttgctggctttgaagggagaagaactaatgaaataaacgaggtcctctcctggaagcttgtgcctgacaattaccccccaggtgaccagccgcctccaccctcttacatttatggggcacaacatttgctgcgattgtttgtgaaacttccagaaatccttggaaagatgtccttttctgagaagaatctgaaggctttattgaagcactttgatctctttttgaggtttttagcagaataccacgatgacttcttcccagagtcggcttatgtcgctgcctgtgaggcacattacagcaccaagaacccccgggcaatttattaaaatgttgttggttctgtaagagcaactgctctgtctagtttggcgctctgggttccaggtgaataactaacaaggtggtgggtctttacccacagcgcaaacacaatgcccaccttggggctctgttgtttgagttgcccacatactgcagttattctgttaggaatgattccctgggtgcctgaaagtgctctgacacgacacttgttactttgcaggccatctgtgatggcaaggaaaaagcaactatgttcacagtgaaatattcgtggaataggttaggccatttcagtagacattgcagttagttagcaagaaccacattgtctctttatttgttagcattaaacaaatttttttttgcaaattggttttatttttttgatgaagccgagcaactctgtccaaaaaggtttagtttgtactcggaaaccacaaagtagtctcaaagtattttagagggaatcgatattgatggcaaaagaaaatttgcagctatgcatttgcttctaacggttccctctctgtgaaacattatttttggtgatctaaagaaagcattgcctttcttatttgagattttacagctatactttgttgtgtaatgttatggttccctttctgtaaaatgttatttttggtgatctaaataaagcctgtcttgtttgaaag

SEQ ID NO: 151355 - DNA, 2324 bp, Homo sapiens
  Payload ID: 9799
  Gene Symbol: MSL3
  Gene Name: male-specific lethal 3 homolog (Drosophila)
  Uniprot ID: Q8N5Y2
  ENST ID: ENST00000398527
  CDS Start-End: 127-1656
gcacgcgcggttgggagcctcgcccatgctttgtcgcgttaccggggctaccgtttgcgcccccgactgcaacggtggccgctgagggaggaggcttctcgaatacggtttctgtcttcgcgttaaatgtctccttctgtgcggcctggtgccgggtgggctcctgtgggacgccctggccgtccgatccagattgttgatgttattgttgggaaagacgaaaaaggcagaaagatcccagaatatctgatccattttaatggttggaacagaagctgggatagatgggcagcagaagatcatgtgcttcgtgataccgatgaaaatcgtagattacagcgtaaattggcaagaaaagctgtagctcgcctgaggagcacaggaagaaagaagaagcgctgcaggttgcctggtgtggactctgtcttaaaaggcctccccactgaagaaaaagatgaaaatgatgaaaactcattaagcagttcctctgactgtagtgaaaacaaggatgaagaaataagtgaagaaagtgatattgaagaaaagactgaagtgaaagaagaaccagagcttcaaacaagaagggaaatggaagaaagaacaataactatagaaatccctgaagttctgaagaagcagctggaggatgattgttactacattaacaggaggaaacggttagtgaaacttccatgccagaccaacatcataacgattttggaatcctatgtgaagcattttgctatcaatgcagccttttcagccaatgagaggcctcgtcaccatcacgttatgccacatgccaacatgaacgtgcattatatcccagcagaaaagaatgttgacctttgtaaggagatggtggatggattaagaataacctttgattacactctcccgttggttttactctatccatatgaacaagctcagtataaaaaggtgacttcgtctaaattttttcttccaattaaggaaagtgccacaagcactaacaggagccaggaggaactctctcccagtccgcctttgttgaatccatccacgccacagtccacagagagtcagccgaccaccggtgaaccagccacccccaaaaggcgcaaagctgagccagaagcattgcagtctctgaggcggtccacgcgccacagtgccaactgtgacaggctttctgagagcagcgcttcacctcagcccaagcgccggcagcaggacacatccgccagcatgcccaagctcttcctgcacctggaaaagaagacacctgtgcatagcagatcatcttcacctattcctctgactcctagcaaggaagggagtgctgtgtttgctggctttgaagggagaagaactaatgaaataaacgaggtcctctcctggaagcttgtgcctgacaattaccccccaggtgaccagccgcctccaccctcttacatttatggggcacaacatttgctgcgattgtttgtgaaacttccagaaatccttggaaagatgtccttttctgagaagaatctgaaggctttattgaagcactttgatctctttttgaggtttttagcagaataccacgatgacttcttcccagagtcggcttatgtcgctgcctgtgaggcacattacagcaccaagaacccccgggcaatttattaaaatgttgttggttctgtaagagcaactgctctgtctagtttggcgctctgggttccaggtgaataactaacaaggtggtgggtctttacccacagcgcaaacacaatgcccaccttggggctctgttgtttgagttgcccacatactgcagttattctgttaggaatgattccctgggtgcctgaaagtgctctgacacgacacttgttactttgcaggccatctgtgatggcaaggaaaaagcaactatgttcacagtgaaatattcgtggaataggttaggccatttcagtagacattgcagttagttagcaagaaccacattgtctctttatttgttagcattaaacaaatttttttttgcaaattggttttatttttttgatgaagccgagcaactctgtccaaaaaggtttagtttgtactcggaaaccacaaagtagtctcaaagtattttagagggaatcgatattgatggcaaaagaaaatttgcagctatgcatttgcttctaacggttccctctctgtgaaacattatttttggtgatctaaagaaagcattgcctttcttatttgagattttacagctatactttgttgtgtaatgttatggttccctttctgtaaaatgttatttttggtgatctaaataaagcctgtcttgtttg

SEQ ID NO: 151356 - DNA, 795 bp, Homo sapiens
  Payload ID: 9799
  Gene Symbol: MSL3
  Gene Name: male-specific lethal 3 homolog (Drosophila)
  ENST ID: ENST00000421368
  CDS Start-End: 123-795
gcgcggttgggagcctcgcccatgctttgtcgcgttaccggggctaccgtttgcgcccccgactgcaacggtggccgctgagggaggaggcttctcgaatacggtttctgtcttcgcgttaaatgtctccttctgtgcggcctggtgccgggtgggctcctgtgggacgccctggccgtccgatccagattgttgatgttattgttgggaaagacgaaaaaggcagaaagatcccagaatatctgatccattttaatggttggaacagaagctgggatagatgggcagcagaagatcatgtgcttcgtgataccgatgaaaatcgtagattacagcgtaaattggcaagaaaagctgtagctcgcctgaggagcacaggaagaaagaagaagcgctgcaggttgcctggtgtggactctgtcttaaaaggcctccccactgaagaaaaagatgaaaatgatgaaaactcattaagcagttcctctgactgtagtgaaaacaaggatgaagaaataagtgaagaaagtgatattgaagaaaagactgaagtgaaagaagaaccagagcttcaaacaagaagggaaatggaagaaagaacaataactatagaaatccctgaagttctgaagaagcagctggaggatgattgttactacattaacaggaggaaacggttagtgaaacttccatgccagaccaacatcataacgattttggaatcctatgtgaagcattttgctatcaatgcagccttttcagccaatgagaggcctcgtcaccatcacgttatgccac

SEQ ID NO: 151357 - DNA, 1646 bp, Homo sapiens
  Payload ID: 9799
  Gene Symbol: MSL3
  Gene Name: male-specific lethal 3 homolog (Drosophila)
  ENST ID: ENST00000468149
  CDS Start-End: 12-395
acgatgagcaaatgagcgcgagcgagggcatgaaatttaaattccactcaggggagaaagtgctgtgcttcgagcctgaccccaccaaggcgcgagtgctgtacgatgccaagattgttgatgttattgttgggaaagacgaaaaaggcagaaagatcccagaatatctgatccattttaatggttggaacagaagctgggatagatgggcagcagaagatcatgtgcttcgtgataccgatgaaaatcgtagattacagcgtaaattggcaagaaaagctgtagctcgcctgaggagcacaggaagaaagaagaagcgctgcaggttgcctggtgtggactctgtcttaaaaggcctccccactgaagaaaaagatgaaaatgatgaaaactaaagaagaaccagagcttcaaacaagaagggaaatggaagaaagaacaataactatagaaatccctgaagttctgaagaagcagctggaggatgattgttactacattaacaggaggaaacggttagtgaaacttccatgccagaccaacatcataacgattttggaatcctatgtgaagcattttgctatcaatgcagccttttcagccaatgagaggcctcgtcaccatcacgttatgccacatgccaacatgaacgtgcattatatcccagcagaaaagaatgttgacctttgtaaggagatggtggatggattaagaataacctttgattacactctcccgttggttttactctatccatatgaacaagctcagtataaaaaggtgacttcgtctaaattttttcttccaattaaggaaagtgccacaagcactaacaggagccaggaggaactctctcccagtccgcctttgttgaatccatccacgccacagtccacagagagtcagccgaccaccggtgaaccagccacccccaaaaggcgcaaagctgagccagaagcattgcagtctctgaggcggtccacgcgccacagtgccaactgtgacaggctttctgagagcagcgcttcacctcagcccaagcgccggcagcaggacacatccgccagcatgcccaagctcttcctgcacctggaaaagaagacacctgtgcatagcagatcatcttcacctattcctctgactcctagcaaggaagggagtgctgtgtttgctggctttgaagggagaagaactaatgaaataaacgaggtcctctcctggaagcttgtgcctgacaattaccccccaggtgaccagccgcctccaccctcttacatttatggggcacaacatttgctgcgattgtttgtgaaacttccagaaatccttggaaagatgtccttttctgagaagaatctgaaggctttattgaagcactttgatctctttttgaggtttttagcagaataccacgatgacttcttcccagagtcggcttatgtcgctgcctgtgaggcacattacagcaccaagaacccccgggcaatttattaaaatgttgttggttctgtaagagcaactgctctgtctagtttggcgctctgggttccaggtgaataactaacaaggtggtgggtctttacccacagcgcaaacacaatgcccaccttggggctctgttgtttgagttgcccacatactgcagt

SEQ ID NO: 151358 - DNA, 560 bp, Homo sapiens
  Payload ID: 9799
  Gene Symbol: MSL3
  Gene Name: male-specific lethal 3 homolog (Drosophila)
  ENST ID: ENST00000476743
  CDS Start-End: 504-560
gcacgcgcggttgggagcctcgcccatgctttgtcgcgttaccggggctaccgtttgcgcccccgactgcaacggtggccgctgagggaggaggcttctcgaatacgattgttgatgttattgttgggaaagacgaaaaaggcagaaagatcccagaatatctgatccattttaatggttggaacagaagctgggatagatgggcagcagaagatcatgtgcttcgtgataccgatgaaaatcgtagattacagcgtaaattggcaagaaaagctgtagctcgcctgaggagcacaggaagaaagaagaagcgctgcaggttgcctggtgtggactctgtcttaaaaggcctccccactgaagaaaaagatgaaaatgatgaaaactcattaagcagttcctctgactgtagtgaaaacaaggatgaagaaataagtgaagaaagtgatattgaagaaaagactgaagtgaaagaagaaccagagcttcaaacaagaagggaaatggaagaaagaacaataactatagaaatccctgaagttctgaagaagcagctggag

SEQ ID NO: 151359 - DNA, 3371 bp, Homo sapiens
  Payload ID: 9800
  Gene Symbol: ME1
  Gene Name: malic enzyme 1, NADP(+)-dependent, cytosolic
  Uniprot ID: P48163
  ENST ID: ENST00000369705
  CDS Start-End: 118-1836
agtgcggccgccgccgccacagctgcagtcagcaccgtcaccccagcagcatccgccgcctgcaccgcgcgtgcggcccgccccggcctgaccccgccgccgaacccggcgccagccatggagcccgaagccccccgtcgccgccacacccatcagcgcggctacctgctgacacggaaccctcacctcaacaaggacttggcctttaccctggaagagagacagcaattgaacattcatggattgttgccaccttccttcaacagtcaggagatccaggttcttagagtagtaaaaaatttcgagcatctgaactctgactttgacaggtatcttctcttaatggatctccaagatagaaatgaaaaactcttttatagagtgctgacatctgacattgagaaattcatgcctattgtttatactcccactgtgggtctggcttgccaacaatatagtttggtgtttcggaagccaagaggtctctttattactatccacgatcgagggcatattgcttcagttctcaatgcatggccagaagatgtcatcaaggccattgtggtgactgatggagagcgtattcttggcttgggagaccttggctgtaatggaatgggcatccctgtgggtaaattggctctatatacagcttgcggagggatgaatcctcaagaatgtctgcctgtcattctggatgtgggaaccgaaaatgaggagttacttaaagatccactctacattggactacggcagagaagagtaagaggttctgaatatgatgattttttggacgaattcatggaggcagtttcttccaagtatggcatgaattgccttattcagtttgaagattttgccaatgtgaatgcatttcgtctcctgaacaagtatcgaaaccagtattgcacattcaatgatgatattcaaggaacagcatctgttgcagttgcaggtctccttgcagctcttcgaataaccaagaacaaactgtctgatcaaacaatactattccaaggagctggagaggctgccctagggattgcacacctgattgtgatggccttggaaaaagaaggtttaccaaaagagaaagccatcaaaaagatatggctggttgattcaaaaggattaatagttaagggacgtgcttccttaacacaagagaaagagaagtttgcccatgaacatgaagaaatgaagaacctagaagccattgttcaagaaataaaaccaactgccctcataggagttgctgcaattggtggtgcattctcagaacaaattctcaaagatatggctgccttcaatgaacggcctattatttttgctttgagtaatccaactagcaaagcagaatgttctgcagagcagtgctacaaaataaccaagggacgtgcaatttttgccagtggcagtccttttgatccagtcactcttccaaatggacagaccctatatcctggccaaggcaacaattcctatgtgttccctggagttgctcttggtgttgtggcgtgtggattgaggcagatcacagataatattttcctcactactgctgaggttatagctcagcaagtgtcagataaacacttggaagagggtcggctttatcctcctttgaataccattagagatgtttctctgaaaattgcagaaaagattgtgaaagatgcataccaagaaaagacagccacagtttatcctgaaccgcaaaacaaagaagcatttgtccgctcccagatgtatagtactgattatgaccagattctacctgattgttattcttggcctgaagaggtgcagaaaatacagaccaaagttgaccagtaggataatagcaaacatttctaactctattaatgaggtctttaaacctttcataatttttaaaggttggaatcttttataatgattcataagacacttagattaagattttactttaacagtctaaaaattgatagaagaatatcgatataaattgggataaacatcacatgagacaattttgcttcactttgccttctggttatttatggtttctgtctgaattattctgcctacgttctctttaaaagctgttgtacgtactacggagaaactcatcatttttatacaggacactaatgggaagaccaaaattactaataaattgacataaccaacattaaaactcataattattttgttgaccattttgttaaaatctacttttcaaaaaaaaaaagctagaaatgaatctaggcgtaggtgaacttttgctaagcagaaataacactactttgttgcctagagaaagataacttctcaagtatttttattccagtcctagatcatatatgttcttttgtgcaacggaattctaacagttctaagagaaagatcactgctgtttacagcgccttgtgcagccttagattttaatattcttttgtcattgttacatctcatagagtaaagctcttattaccttgatcctgagtcagaaatcccacctgaaatcaccttttttcccccttgatcaaacatcccatccttcagctaccatactgttgctacagggattttgtggactgtggcccctgtcccgaggttggcaccttcagttcagcacagcctgagcagtgagaaggtctgaaaggagagtatatagttaagatccttgagaaagggctgcctgaggaactgacctcttaaagatctcaggatctttaagacaacaagttaggttcctactggagttacctgccagaatggcctcttaattaactcaggtaatgaagagctaactgtgttataatcatcttgcttttgcctgaatttggagaaagtattataattaagttcccagtatcagaaatgtccttacataagattaaaatatcttgatgactaataccattctatgagaaagagtagttatatgcccagactgtattaatttactttagaaactaatgtttgaagtaatggaaaaaattttaaattataaagctaaggtgcaataacatttgctacttatttatagaattatttgaagaattttgtttttgaagtaatgctttaaggagtataagatattcaagataaattatactataaaatgattttattgaaagttgaaggttacacaaattgttttaggtatgagcagaagaggttaaggtatttctaaaggtaacatatagtcaagagtttcctcaaaatagttatttggagaagaatcagaatgtctgtgtatttcttgtctgtttctatgttgtcttatagctctgactaaatgtgtttacctatgcaaaagatttattaaagcatagaaaaggtgaatgaataaaaatataaaataattgtcctttttcttaaaa

SEQ ID NO: 151360 - DNA, 9100 bp, Homo sapiens
  Payload ID: 9801
  Gene Symbol: ME2
  Gene Name: malic enzyme 2, NAD(+)-dependent, mitochondrial
  Uniprot ID: P23368
  ENST ID: ENST00000321341
  CDS Start-End: 273-2027
cccgtccgtctccaccgtgggccacgccttccgggccccgcggctggccggctcctcgcgccctcccctctctcggccgctcttcgggccgcctctgcgtgtggggccgcccgcgccagtgtgagcctgagctgacggcggctccgggaggctcgcagaaggggagggccgggcggcgcgggagctgagcatcgccagggcgggcggcagggcgcggcctctccgccgggtgtaccacctgtcgcggcgcgagacctctggtgaaagaaaagatgttgtcccggttaagagtagtttccaccacttgtactttggcatgtcgacatttgcacataaaagaaaaaggcaagccacttatgctgaacccaagaacaaacaagggaatggcatttactttacaagaacgacaaatgcttggtcttcaaggacttctacctcccaaaatagagacacaagatattcaagccttacgatttcatagaaacttgaagaaaatgactagccctttggaaaaatatatctacataatgggaatacaagaaagaaatgagaaattgttttatagaatactgcaagatgacattgagagtttaatgccaattgtatatacaccgacggttggtcttgcctgctcccagtatggacacatctttagaagacctaagggattatttatttcgatctcagacagaggtcatgttagatcaattgtggataactggccagaaaatcatgttaaggctgttgtagtgactgatggagagagaattctgggtcttggagatctgggtgtctatggaatgggaattccagtaggaaaactttgtttgtatacagcttgtgcaggaatacggcctgatagatgcctgccagtgtgtattgatgtgggaactgataatatcgcactcttaaaagacccattttacatgggcttgtaccagaaacgagatcgcacacaacagtatgatgacctgattgatgagtttatgaaagctattactgacagatatggccggaacacactcattcagttcgaagactttggaaatcataatgcattcaggttcttgagaaagtaccgagaaaaatattgtactttcaatgatgatattcaagggacagctgcagtagctctagcaggtcttcttgcagcacaaaaagttattagtaaaccaatctccgaacacaaaatcttattccttggagcaggagaggctgctcttggaattgcaaatcttatagttatgtctatggtagaaaatggcctgtcagaacaagaggcacaaaagaaaatctggatgtttgacaagtatggtttattagttaagggacggaaagcaaaaatagatagttatcaggaaccatttactcactcagccccagagagcatacctgatacttttgaagatgcagtgaatatactgaagccttcaactataattggagttgcaggtgctggccgtcttttcactcctgatgtaatcagagccatggcctctatcaatgaaaggcctgtaatatttgcattaagtaatcctacagcacaggcagagtgcacggctgaagaagcatatacacttacagagggcaggtgtttgtttgccagtggcagtccatttgggccagtgaaacttacagatgggcgagtctttacaccaggtcaaggaaacaatgtttatatttttccaggtgtggctttagctgttattctctgtaacacccggcatattagtgacagtgttttcctagaagctgcaaaggccctgacaagccaattgacagatgaagagctagcccaagggagactttacccaccgcttgctaatattcaggaagtttctattaacattgctattaaagttacagaatacctatatgctaataaaatggctttccgatacccagaacctgaagacaaggccaaatatgttaaagaaagaacatggcggagtgaatatgattccctgctgccagatgtgtatgaatggccagaatctgcatcaagccctcctgtgataacagaatagaagcactcccctgataaatactttctgtgctccagggaaccccttttttcagacaagaagagataatgtcttcagttttatggtgttttctgtgttttgttctccctgaccactttggttgatgtattttttccatgcgtctccacatctgttggggtagacgtgttgattgattgcattgcccaccagcaccctacagtcagatagttgtgatgctttaattctaacatacagcccgtaccacatccaggagatgtaaaaagtgtgtttgtgaatgtcttcacttgtactctaattcagacttgccaaagtatttgctatttactattatgggtaatactcttctctggcctagttcttacagagctactaaaatagaaatttacttttatggatagaagtacagaattttgagaagaaactaaattttcaccaaattttaaggaaaaattgtcattatctaaaaatgttcttatatatctgcttcatcttaccttcatactctgaaattccctatagcagacagagctagggaaatattaaaaatttaccctatttattttctggaactaaatcaagccttaactataacattatgagagtaatgggaactactgctggctttaagtaaataaaagtcattgttttcaacagtgtataaaaatcatagtgtaacctttttatttaataaatatcttacatttaattgcttcagttatgctatcttattgcccaactagaaatttagatttgcttatgaaaaacacatatttttgttacttctagatgattctaggagggagtataagatacctaatcatatgggaacatcacgtgactttttaaatctaaattagtcatgcttcacatcaaaatgagtcatatttaactggagaaactatgcccttattccagaactgatgctctttattgcttgagataattttggaatgttactatgatactgtttctttgaatatcattagtagtgacaactctttctccattgaaggcagacttaatttttttaaaccaccaacattaatttagagctaaatggggatgaataaggttggtgttcatctgggaaatgccttttttaatcccagtaaaatgggtaataatggctatccagaacagttttcttgtgtggcttgcatattgaagaattctaaaggaaaatatatctgcctaccatgcttgctcttagggaagaaaacttaaatgctcattctaggatagtaacaacaacagataattcatcgataatatgagcatgcacagtatttgatattgctctgtaggaaaaaagagacttcatttttttcatcttctgcctatgaatacaaattgattctttttttttttttttttttttgagacagagtctcactctgttaccaggctggagtgcagtggtgtgatctcagctcactgcaacctctgcctcccaggttcaagcagttctcctgcctcagcctcccaagtagctgggactacaggtacacgccaccacgcccagctaatttttgtatttttagtagagacgggatttcaccatgttggccaggagggtctcgatttcctgacctcgcgatccgcccacctcagccttccaaagtgctgggattacaggcgtgagccaccgcacccagccaattttttttttttttttttttgagacagagtctcgcttttgtcgcccagtctggagtgtagtggcatgatctctgcaacctctgcctcctcggttcaggcgattcttctgccttagcctcccaagtagctgggattacaggcaccggccaccacacccagctaatttttgtatttttagtagagatggggtttcaccatgttggccaggctggtctcaaaatcctgacttcaggtgatccacccactttggcctcccaaagtgctgggattacaggcgtgagccaccacacctggtccaattcatcataattctgaatataatttaataattttaaaatggtcgcaatggcattgccatttggagtatgggaaaatgcagttggttaattcattgaacagattagtaaagtcagaagtctttttcataacatacggtcacaattcctttcttttaattaaagacaaaaggtttatgggttttggtttgtttgttttagatatggggttttgctatgtcacccttgctggagggcggtggctgttcacaggcgtgggtcatagagcactgcagcctggaactcctgggttcaagctctcctcctgcctcagcctcctgagcagcttggactaaaggtgtgcaccaccgcacctggctgagaggcttctgtttttcatgttccctttatcaaaacaaaatcacgcctaaacatactctctgtgtgaaatcttgattttagttcaacctaagaaatataataaatataaacctgtttcttgcttagtgtttattgaaggcaggaacgtatgctgaattaaagtaattttactacgaagtttgcttattaagtatgcctggtacagtcttcatggaagttattaagtattttaaggaaaaaaataggctaaatggcatatagcctgcttaaataaaataattctatttttttaaaaagctcccaattgtcattgttatttaccagtcaatctttcaacaagtatcaattattggatgtaaattaaagtaaaattgcttaatatttaagctaagaatacaggaaggactatgagcattgaggaaatcgggggaggccagaatggcatcaagctggaaaagaaattaaaacattaccttcgatgagactttacctagcaagaaggtaattattttgaataacagcaatagagaatcttttattttgaattgagaagaaattctgatgattagagtgtcagtaagtagtaggaaaaggtaagaatacatgtgtttctaatctcccaccaccacctgttgtatggaacaaattggattactagcaagggtaaggtttattgacaatgagaagttttagtccaagattttagttaaaatattttaaaattttttgattcataaccaagaagttgcctcagatcactgtgaagctttaaaatgcaggtgcctttgctcctcctccctccaggcccccgggggcagagccctggctggtgtctcttcaggaggacccctgacacaccgattctgccctcacaatcactgccttaaagcaggcagcagaatcttttggagaactaacaagattctgatgctgatgcatagggcctggggtggggcctcagattctgcttttttttttttttttttttttttttttaaacagggtctctttctttttcctttctcactcaggctgcagtgagtggcgtgatcttggctcactgcaacctccacttcctgggctcaaacgatcctcccgcctcagcctcctgagtagctgggactataggcgcaagtctatgcaaccacccagctaatttttgtatttttagaagagtgggggttttgccacgttgcctgggctggtctcgaactcctgacctcaagtgatccaaccacctcagcctcccaaagtgctggaattacaggcatgagccactgcacccagccaagaatgtccacttctgacaagctcccaggtgatgcctatgctgctggtacagtgaacaacatgctgagaggcattgctccaggatactgcatgtagtgagcagttctttagcgtttatgtgtcatatacttcaagttacatgaaaaagatcaactgaaattatgttcttacacagaatagttttcatctagttttattatgtttttacaggctgtttacaagaacaaaaatagagaatttttgaacatatttttctgaaaacataaaaactagagtactctttaattctaaattatagatttgtagcatacttagtaaacttagtaaccaattttcatttgtaaaagattagctatcaaatggacatttatttctcttagttttcttatgacatgacttgccttatatcctttgtcctttttctgtaacttgtcagcctctggagaaataggattttacatttttgcaaatgagttgccaatgaattaagatcaaaacgtcattattaaggagtatgaagcattatttactggctctcagataacagaaaacccaaaagggatggtggcggagtgaagaaagccttgccttgggaaaaatacttcaaatgctcccatagttttttttcctcaagcccagtcagtatccttcaaggataactttttcataccttttttttggtttgtttgtttctgctagctttatgacagaggttataatattcttttctcctctcttctttgacgtgttacgttgtctttttttttttttttttaacttcttcatactcttaaaaagctccagaatggccaggcgcagtggctcacgcctataatcccagcactttgggaggccaaggcaggcggatcacgaggtcaggagatcaagaccatcctggctgacacggtgaaaccctgtctctactaaaaatacaaaaacttagccaggcgtggtggcgggcgcctgtagtcccaggtactcgggagtctgaggagtgaacccgggaggtggaggttgcagtgagctgagatcgcaccgctgcactccagcctgggcgacagagtgagcctccatctcaaaaaaaaaaaaaaaaaaaaaaaaaaaaaaaaaaaaatctccagggttctgttgaattcaccaaaatggggtcagctctggtgagcctatgtaatactcgagaacattaatataaacccatagctctttactgggcttccatttaaagggaagtcctaagaatgaaatggcaccagcatcctgtttccatccaagacaagaccacacgtgttcaggtgccatgtattcatatagctctcaactgattggtgatttgcactttgtgcatctaattattaaaatgaaactctctacaggtgagctgaagtaacatacttcatatttaaaaagttcacagcaatttgaccatagaaaactttctcatctgaaatcagggtaagtttttttaatgtaagcagagaaaaaaataaagcagtgttttatttcaaatttcagtaagttcaggtgggcctaattaagacatgactattattacaaatcctattcttgccagaagttacttagatagattagtgattagattttaaaaacattattttcctttcttgaataaggaaaattgtgcatctcaaagagaaaagtaaatatggaaatatgttcatagttcagttgcataaaatagacacattaagtcaagtgatttgaatgcttagtgtcttttggtaaacagcattttgtcaacaaacttttcatatggctatagaatcttgttttttccaaataaaaactttgcaattgggagttattcctccattcagcacactttttaatgttaagactaggggaaacttgtgggtatatattcagtggttttcaggattttcttttatgttctagaaaagtaatttttcctttcctagttttaagtatatattcaagcaaatcgttgattcctatacagccattggattatcaccaacacatttggtatatacagtgggccgataatgacaaactaaagtttgtggttaatacctactctataccagacactgttctaaggatccgacatatttaatcctctgtttaccctctgtttctgtgcctgatttacagacagagacagaggcacagagaggttaaatgacttgtcaaaggtcttatgatgtgtggcagagcctgggtttttagctcaaacccctctcagtgaagaaagccttctgtgtaggcaatttcatctaataccttcatgaattgttacttcagatgagaattctcacttattcttttttttttttttttttcttttctttgagacagccttgctctgtctcccaggctggagtgcagtggcgcaatctcagctcactgcaagctccgcctcccgggttatgccattctcctgcctcagccttccgagtagctcggactacaggcgcccgccacctcgcccagctaattttttgtatttttagtagagacggggtttcaccgtgttagccaggatggtctcgatctcctgacctcatgatccacccgcctcggcctcccaaagtgctgggattacaggcgtgagccaccgcgcccggcctcacttagtcttttaccagttcatctgatttttactttgttcccatttataattcaaatataatataaacgtcttattcatttagtcttcagcattttaagtattcgacacgaacattaaagatttggtgttgaatttaataaattacaccaaaaagtctcagtagccaattcactaacatcttttgatttggtaatcttcacagaatcaacaactgttaacacttctgtgcaaataaatttcagttgtgcttatatattataatattcactttaggaatccacctgtcaatttgcaattcaattataaggtatattttaagtgatatctatgtattgtatacacatattccattgaaaggtgagaataattagaaagtagtaatataaaaatgtgtatgaaataagaactttcttaaaagacctagtttagctaaatatatgacaatataaaatgtctgcccaatgttttattatactttgtctaatgacctttaaatttaactgaaattaaaaccgtacttttgcagttgatatttttgtgttccctttgttaacataccaagcactaattattgacttcaaggaagccacgtattgcaagtcattgcttagcctttcacatctgagtgttgataagatgacggaatgggtagtcttgtagtaattgcttatgggaatgctagtttaagaggaatgccttgtatagaacatattataccagattgacttgttaaaaatggttccaagaatcagtctaaaaacttcagaattatgtgaattattttttctctgttgtgatatgttgtaatgagatgtgtgttcttatattttcttagtaaaattttcttaagcataaaa

SEQ ID NO: 151361 - DNA, 2492 bp, Homo sapiens
  Payload ID: 9801
  Gene Symbol: ME2
  Gene Name: malic enzyme 2, NAD(+)-dependent, mitochondrial
  Uniprot ID: P23368
  ENST ID: ENST00000382927
  CDS Start-End: 202-1641
ctcggccgctcttcgggccgcctctgcgtgtggggccgcccgcgccagtgtgagcctgagctgacggcggctccgggaggctcgcagaaggggagggccgggcggcgcgggagctgagcatcgccagggcgggcggcagggcgcggcctctccgccgggtgtaccacctgtcgcggcgcgagacctctggtgaaagaaaagatgttgtcccggttaagagtagtttccaccacttgtactttggcatgtcgacatttgcacataaaagaaaaaggcaagccacttatgctgaacccaagaacaaacaagggaatggcatttactttacaagaacgacaaatgcttggtcttcaaggacttctacctcccaaaatagagacacaagatattcaagccttacgatttcatagaaacttgaagaaaatgactagccctttggaaaaatatatctacataatgggaatacaagaaagaaatgagaaattgttttatagaatactgcaagatgacattgagagtttaatgccaattgtatatacaccgacggttggtcttgcctgctcccagtatggacacatctttagaagacctaagggattatttatttcgatctcagacagaggtcatgttagatcaattgtggataactggccagaaaatcatgttaaggctgttgtagtgactgatggagagagaattctgggtcttggagatctgggtgtctatggaatgggaattccagtaggaaaactttgtttgtatacagcttgtgcaggaatacggcctgatagatgcctgccagtgtgtattgatgtgggaactgataatatcgcactcttaaaagacccattttacatgggcttgtaccagaaacgagatcgcacacaacagtatgatgacctgattgatgagtttatgaaagctattactgacagatatggccggaacacactcattcagttcgaagactttggaaatcataatgcattcaggttcttgagaaagtaccgagaaaaatattgtactttcaatgatgatattcaagggacagctgcagtagctctagcaggtcttcttgcagcacaaaaagttattagtaaaccaatctccgaacacaaaatcttattccttggagcaggagaggctgctcttggaattgcaaatcttatagttatgtctatggtagaaaatggcctgtcagaacaagaggcacaaaagaaaatctggatgtttgacaagtatggtttattagttaagggacggaaagcaaaaatagatagttatcaggaaccatttactcactcagccccagagagcatacctgatacttttgaagatgcagtgaatatactgaagccttcaactataattggagttgcaggtgctggccgtcttttcactcctgatgtaatcagagccatggcctctatcaatgaaaggcctgtaatatttgcattaagtaatcctacagcacaggcagagtgcacggctgaagaagcatatacacttacagagggcaggtgtttgtttgccagtggcagtccatttgggccagtgaaacttacagatgggcgagtctttacaccaggtcaaggaaacaatgtttatatttttccaggttacagaatacctatatgctaataaaatggctttccgatacccagaacctgaagacaaggccaaatatgttaaagaaagaacatggcggagtgaatatgattccctgctgccagatgtgtatgaatggccagaatctgcatcaagccctcctgtgataacagaatagaagcactcccctgataaatactttctgtgctccagggaaccccttttttcagacaagaagagataatgtcttcagttttatggtgttttctgtgttttgttctccctgaccactttggttgatgtattttttccatgcgtctccacatctgttggggtagacgtgttgattgattgcattgcccaccagcaccctacagtcagatagttgtgatgctttaattctaacatacagcccgtaccacatccaggagatgtaaaaagtgtgtttgtgaatgtcttcacttgtactctaattcagacttgccaaagtatttgctatttactattatgggtaatactcttctctggcctagttcttacagagctactaaaatagaaatttacttttatggatagaagtacagaattttgagaagaaactaaattttcaccaaattttaaggaaaaattgtcattatctaaaaatgttcttatatatctgcttcatcttaccttcatactctgaaattccctatagcagacagagctagggaaatattaaaaatttaccctatttattttctggaactaaatcaagccttaactataacattatgagagtaatgggaactactgctggctttaagtaaataaaagtcattgttttcaacagtgtataaaaatcatagtgtaacctttttatttaataaatatcttacatttaa

SEQ ID NO: 151362 - DNA, 1068 bp, Homo sapiens
  Payload ID: 9802
  Gene Symbol: ME3
  Gene Name: malic enzyme 3, NADP(+)-dependent, mitochondrial
  ENST ID: ENST00000323418
  CDS Start-End: 289-1068
gctcctcaccccgcctgctccgcagcgggaccgcgtagacctcagctccccgagcagcgcaggtgggccagggaaggagaggaccgaggtctgccaaggaccatgggtgccgcgctggggacaggcacgcggctggctccctggccgggccgggcctgcggcgccctcccgcgctggacacccaccgcgcccgcccaaggctgccactccaagcctggcccggcgcgccctgtgcccctgaagaagcgcggatacgatgtcaccaggaaccctcatctcaacaaggggatggcctttacccttgaagaaaggctgcagcttggaatccacggcctaatcccgccctgctttctgagccaggacgtccagctcctccgaatcatgagatattacgagcggcagcagagtgacctggacaagtacatcattctcatgacactccaagaccggaacgagaagctcttctaccgagtgctgacttcggacgtggagaagttcatgccaatcgtgtacacgcctaccgtggggctggcctgtcagcactatggcctgactttccgcaggccccgtggactgttcatcaccattcatgacaaaggtcatcttgcaacaatgctgaattcttggccagaagacaatattaaggccgtggtggtgactgatggggagcgcatcctgggcctgggagacctgggctgctacggcatgggcatccctgtgggcaagctggccctgtacacggcatgcggaggggtgaacccgcagcagtgcctccctgtgctgctggacgtcggcaccaacaatgaggagctgctcagagaccctctgtacatcggcctgaaacaccagcgcgtgcacgggaaggcatacgatgacttgctggatgagttcatgcaggctgtgacagacaagtttggaataaattgcctcatccaatttgaagacttcgccaatgccaatgccttccgcctgctcaacaaataccgtaacaagtactgcatgttcaatgatgacatccaagatgacttctccagaggcccaaagaggtcacaacttttcttcaagtga

SEQ ID NO: 151363 - DNA, 2240 bp, Homo sapiens
  Payload ID: 9802
  Gene Symbol: ME3
  Gene Name: malic enzyme 3, NADP(+)-dependent, mitochondrial
  Uniprot ID: Q16798
  ENST ID: ENST00000393324
  CDS Start-End: 255-2069
caccggatctgcttccagggcttggtttcgctttgcctggctcttggctaggcctggcgccccgcgcggagccgagcaggtggcagccgaggagtggcgggggctggaacatttaaccctttgggagcacctgccctctcccagagggcgcgtccccggatcaggcccggtgccccgcagcgcgcgtgggtcctggctggctggaaggaggccctgaccttgctttctctcccgtgccaggtctgccaaggaccatgggtgccgcgctggggacaggcacgcggctggctccctggccgggccgggcctgcggcgccctcccgcgctggacacccaccgcgcccgcccaaggctgccactccaagcctggcccggcgcgccctgtgcccctgaagaagcgcggatacgatgtcaccaggaaccctcatctcaacaaggggatggcctttacccttgaagaaaggctgcagcttggaatccacggcctaatcccgccctgctttctgagccaggacgtccagctcctccgaatcatgagatattacgagcggcagcagagtgacctggacaagtacatcattctcatgacactccaagaccggaacgagaagctcttctaccgagtgctgacttcggacgtggagaagttcatgccaatcgtgtacacgcctaccgtggggctggcctgtcagcactatggcctgactttccgcaggccccgtggactgttcatcaccattcatgacaaaggtcatcttgcaacaatgctgaattcttggccagaagacaatattaaggccgtggtggtgactgatggggagcgcatcctgggcctgggagacctgggctgctacggcatgggcatccctgtgggcaagctggccctgtacacggcatgcggaggggtgaacccgcagcagtgcctccctgtgctgctggacgtcggcaccaacaatgaggagctgctcagagaccctctgtacatcggcctgaaacaccagcgcgtgcacgggaaggcatacgatgacttgctggatgagttcatgcaggctgtgacagacaagtttggaataaattgcctcatccaatttgaagacttcgccaatgccaatgccttccgcctgctcaacaaataccgtaacaagtactgcatgttcaatgatgacatccaaggcacagcctccgttgctgtggcagggatcttggctgctctgcgaatcaccaagaacaagctttccaatcacgtgtttgttttccaaggtgcaggcgaggcagctatgggcattgcccacctccttgtcatggccctagagaaagaaggtgtaccgaaggcagaggccacaagaaagatctggatggtggactctaaagggctcattgtcaaggggaggagccacctgaaccatgaaaaggagatgtttgcccaagaccatcctgaagtcaactccctggaggaggtggtgaggctggtgaagcccacagccatcataggtgttgctgccatcgcaggagccttcacggagcagattctgagggacatggcctccttccacgagcgccctatcatctttgccctgagcaaccccaccagcaaggccgagtgcacggctgagaagtgctaccgggtcaccgagggccgagggatttttgccagtggaagtccttttaagagtgtgactctggaagatggcaagaccttcattcctgggcagggaaacaatgcttacgtgttccccggggtggcactgggagtcatcgccggcgggatccggcacatcccagatgagatcttcctcctgacagcagagcaaattgcccaggaagtctctgagcagcatctgtcccaggggagactctacccaccactcagcaccatccgagacgtgtctttgagaattgccatcaaagttctcgactacgcgtacaaacacaacctggcttcctactacccagagcctaaggacaaggaggcttttgtaagatccctggtctacactccagactatgactcctttacactggacagctacacttggcccaaggaagccatgaatgttcagacggtctgaggcagtctcagaggctagtatggggctagatgaagcccagagtaacacccacaatataaatgggttccaaaatggcccaagtgaatccttgtcgctgtgttttttcttttaaactttctggtgtgagaggagatgccaaggcatacagtgaataaaagccttgtctctgaa

SEQ ID NO: 151364 - DNA, 2069 bp, Homo sapiens
  Payload ID: 9802
  Gene Symbol: ME3
  Gene Name: malic enzyme 3, NADP(+)-dependent, mitochondrial
  ENST ID: ENST00000524826
  CDS Start-End: 328-2069
aaacgcaaatccccctctgtgcatttagtcttgccaagatggagagtctcaggcgggcattctgagctgcttcttgtcactggggaaaaccacgtgcacgcagtgctgaggcgccccacgcgcgtcctcaggggaagccaggcactgagaacaaaggttgtgggaccgctctttgaggaactcaccagctccgcgagctcgcggccgccagcgcggtccacccattggcgggagaggactcacagaccgcagctcctcaccccgcctgctccgcagcgggaccgcgtagacctcagctccccgagcagcgcaggtctgccaaggaccatgggtgccgcgctggggacaggcacgcggctggctccctggccgggccgggcctgcggcgccctcccgcgctggacacccaccgcgcccgcccaaggctgccactccaagcctggcccggcgcgccctgtgcccctgaagaagcgcggatacgatgtcaccaggaaccctcatctcaacaaggggatggcctttacccttgaagaaaggctgcagcttggaatccacggcctaatcccgccctgctttctgagccaggacgtccagctcctccgaatcatgagatattacgagcggcagcagagtgacctggacaagtacatcattctcatgacactccaagaccggaacgagaagctcttctaccgagtgctgacttcggacgtggagaagttcatgccaatcgtgtacacgcctaccgtggggctggcctgtcagcactatggcctgactttccgcaggccccgtggactgttcatcaccattcatgacaaaggtcatcttgcaacaatgctgaattcttggccagaagacaatattaaggccgtggtggtgactgatggggagcgcatcctgggcctgggagacctgggctgctacggcatgggcatccctgtgggcaagctggccctgtacacggcatgcggaggggtgaacccgcagcagtgcctccctgtgctgctggacgtcggcaccaacaatgaggagctgctcagagaccctctgtacatcggcctgaaacaccagcgcgtgcacgggaaggcatacgatgacttgctggatgagttcatgcaggctgtgacagacaagtttggaataaattgcctcatccaatttgaagacttcgccaatgccaatgccttccgcctgctcaacaaataccgtaacaagtactgcatgttcaatgatgacatccaaggcacagcctccgttgctgtggcagggatcttggctgctctgcgaatcaccaagaacaagctttccaatcacgtgtttgttttccaaggtgcaggcgaggcagctatgggcattgcccacctccttgtcatggccctagagaaagaaggtgtaccgaaggcagaggccacaagaaagatctggatggtggactctaaagggctcattgtcaaggggaggagccacctgaaccatgaaaaggagatgtttgcccaagaccatcctgaagtcaactccctggaggaggtggtgaggctggtgaagcccacagccatcataggtgttgctgccatcgcaggagccttcacggagcagattctgagggacatggcctccttccacgagcgccctatcatctttgccctgagcaaccccaccagcaaggccgagtgcacggctgagaagtgctaccgggtcaccgagggccgagggatttttgccagtggaagtccttttaagagtgtgactctggaagatggcaagaccttcattcctgggcagggaaacaatgcttacgtgttccccggggtggcactgggagtcatcgccggcgggatccggcacatcccagatgagatcttcctcctgacagcagagcaaattgcccaggaagtctctgagcagcatctgtcccaggggagactctacccaccactcagcaccatccgagacgtgtctttgagaattgccatcaaagttctcgactacgcgtacaaacacaacctggcttcctactacccagagcctaaggacaaggaggcttttgtaagatccctggtctacac

SEQ ID NO: 151365 - DNA, 1776 bp, Homo sapiens
  Payload ID: 9802
  Gene Symbol: ME3
  Gene Name: malic enzyme 3, NADP(+)-dependent, mitochondrial
  Uniprot ID: Q16798
  ENST ID: ENST00000526504
  CDS Start-End: 328-1356
aaacgcaaatccccctctgtgcatttagtcttgccaagatggagagtctcaggcgggcattctgagctgcttcttgtcactggggaaaaccacgtgcacgcagtgctgaggcgccccacgcgcgtcctcaggggaagccaggcactgagaacaaaggttgtgggaccgctctttgaggaactcaccagctccgcgagctcgcggccgccagcgcggtccacccattggcgggagaggactcacagaccgcagctcctcaccccgcctgctccgcagcgggaccgcgtagacctcagctccccgagcagcgcaggtctgccaaggaccatgggtgccgcgctggggacaggcacgcggctggctccctggccgggccgggcctgcggcgccctcccgcgctggacacccaccgcgcccgcccaaggctgccactccaagcctggcccggcgcgccctgtgcccctgaagaagcgcggatacgatgtcaccaggaaccctcatctcaacaaggggatggcctttacccttgaagaaaggctgcagcttggaatccacggcctaatcccgccctgctttctgagccaggacgtccagctcctccgaatcatgagatattacgagcggcagcagagtgacctggacaagtacatcattctcatgacactccaagaccggaacgagaagctcttctaccgagtgctgacttcggacgtggagaagttcatgccaatcgtgtacacgcctaccgtggggctggcctgtcagcactatggcctgactttccgcaggccccgtggactgttcatcaccattcatgacaaaggtcatcttgcaacaatgctgaattcttggccagaagacaatattaaggccgtggtggtgactgatggggagcgcatcctgggcctgggagacctgggctgctacggcatgggcatccctgtgggcaagctggccctgtacacggcatgcggaggggtgaacccgcagcagtgcctccctgtgctgctggacgtcggcaccaacaatgaggagctgctcagagaccctctgtacatcggcctgaaacaccagcgcgtgcacgggaaggcatacgatgacttgctggatgagttcatgcaggctgtgacagacaagtttggaataaattgcctcatccaatttgaagacttcgccaatgccaatgccttccgcctgctcaacaaataccgtaacaagtactgcatgttcaatgatgacatccaaggaacaacctgccacactttcagctgcccatggcatttatgggcacaagtcatgttccagcacatccctggacccatgggcttctcagagtggttacctcgaaacagctaagtagcttcctttccagttttaaacccctagtgcatagcccaagagcaccccaaaaatgcaggttaatgatggagataactttatttgccaaattttgtaatttggagcttaagaaccactgtttttcctcttgagttctggcctgtaccaagtgcagaaatagcttcccaaaggaaaaaaatgggcaacagtaccaaatgctgctgagaggtcaagaaagaagaaggctgagaactgattactgaatttggccacctggaggtacttggggaccctgacaagaggcacagcctccgttgctgtggcagggatcttggctgctctgcgaatcaccaagaacaagctttccaatcacgtgtttgttttccaaggtgcaggcgaggcagctatgggcattgcccacctccttgtcatggccct

SEQ ID NO: 151366 - DNA, 487 bp, Homo sapiens
  Payload ID: 9802
  Gene Symbol: ME3
  Gene Name: malic enzyme 3, NADP(+)-dependent, mitochondrial
  ENST ID: ENST00000526944
  CDS Start-End: 305-487
tttagtcttgccaagatggagagtctcaggcgggcattctgagctgcttcttgtcactggggaaaaccacgtgcacgcagtgctgaggcgccccacgcgcgtcctcaggggaagccaggcactgagaacaaaggttgtgggaccgctctttgaggaactcaccagctccgcgagctcgcggccgccagcgcggtccacccattggcgggagaggactcacagaccgcagctcctcaccccgcctgctccgcagcgggaccgcgtagacctcagctccccgagcagcgcaggtctgccaaggaccatgggtgccgcgctggggacaggcacgcggctggctccctggccgggccgggcctgcggcgccctcccgcgctggacacccaccgcgcccgcccaaggctgccactccaagcctggcccggcgcgccctgtgcccctgaagaagcgcggatacgatgtcaccaggaaccctcatctcaacaag

SEQ ID NO: 151367 - DNA, 814 bp, Homo sapiens
  Payload ID: 9802
  Gene Symbol: ME3
  Gene Name: malic enzyme 3, NADP(+)-dependent, mitochondrial
  ENST ID: ENST00000530335
  CDS Start-End: 360-814
gtgcatttagtcttgccaagatggagagtctcaggcgggcattctgagctgcttcttgtcactggggaaaaccacgtgcacgcagtgctgaggcgccccacgcgcgtcctcaggggaagccaggcactgagaacaaaggttgtgggaccgctctttgaggaactcaccagctccgcgagctcgcggccgccagcgcggtccacccattggcgggagaggactcacagaccgcagctcctcaccccgcctgctccgcagcgggaccgcgtagacctcagctccccgagcagcgcaggtgggccagggaaggagaggaccgaggcaagccaccacgcgggattaggggtctgccaaggaccatgggtgccgcgctggggacaggcacgcggctggctccctggccgggccgggcctgcggcgccctcccgcgctggacacccaccgcgcccgcccaaggctgccactccaagcctggcccggcgcgccctgtgcccctgaagaagcgcggatacgatgtcaccaggaaccctcatctcaacaaggggatggcctttacccttgaagaaaggctgcagcttggaatccacggcctaatcccgccctgctttctgagccaggacgtccagctcctccgaatcatgagatattacgagcggcagcagagtgacctggacaagtacatcattctcatgacactccaagaccggaacgagaagctcttctaccgagtgctgacttcggacgtggagaagttcatgccaatcgtgtacacgcctaccgtggggctggcctgtcagcactatggcctgacttt

SEQ ID NO: 151368 - DNA, 384 bp, Homo sapiens
  Payload ID: 9802
  Gene Symbol: ME3
  Gene Name: malic enzyme 3, NADP(+)-dependent, mitochondrial
  ENST ID: ENST00000532471
  CDS Start-End: 146-384
cagcgcggtccacccattggcgggagaggactcacagaccgcagctcctcaccccgcctgctccgcagcgggaccgcgtagacctcagctccccgagcagcgcaggtgggccagggaaggagaggaccgaggtctgccaaggaccatgggtgccgcgctggggacaggcacgcggctggctccctggccgggccgggcctgcggcgccctcccgcgctggacacccaccgcgcccgcccaaggctgccactccaagcctggcccggcgcgccctgtgcccctgaagaagcgcggatacgatgtcaccaggaaccctcatctcaacaaggtaatgggccagagggcaggacggcccgcgttgcgatcccgtggctgccggaaaat

SEQ ID NO: 151369 - DNA, 298 bp, Homo sapiens
  Payload ID: 9802
  Gene Symbol: ME3
  Gene Name: malic enzyme 3, NADP(+)-dependent, mitochondrial
  ENST ID: ENST00000526834
  CDS Start-End: 114-298
cctgctccgcagcgggaccgcgtagacctcagctccccgagcagcgcaggtgggccagggaaggagaggaccgaggcaagccaccacgcgggattaggggtctgccaaggaccatgggtgccgcgctggggacaggcacgcggctggctccctggccgggccgggcctgcggcgccctcccgcgctggacacccaccgcgcccgcccaaggctgccactccaagcctggcccggcgcgccctgtgcccctgaagaagcgcggatacgatgtcaccaggaaccctcatctcaacaaggt

SEQ ID NO: 151370 - DNA, 2311 bp, Homo sapiens
  Payload ID: 9802
  Gene Symbol: ME3
  Gene Name: malic enzyme 3, NADP(+)-dependent, mitochondrial
  Uniprot ID: Q16798
  ENST ID: ENST00000543262
  CDS Start-End: 328-2142
aaacgcaaatccccctctgtgcatttagtcttgccaagatggagagtctcaggcgggcattctgagctgcttcttgtcactggggaaaaccacgtgcacgcagtgctgaggcgccccacgcgcgtcctcaggggaagccaggcactgagaacaaaggttgtgggaccgctctttgaggaactcaccagctccgcgagctcgcggccgccagcgcggtccacccattggcgggagaggactcacagaccgcagctcctcaccccgcctgctccgcagcgggaccgcgtagacctcagctccccgagcagcgcaggtctgccaaggaccatgggtgccgcgctggggacaggcacgcggctggctccctggccgggccgggcctgcggcgccctcccgcgctggacacccaccgcgcccgcccaaggctgccactccaagcctggcccggcgcgccctgtgcccctgaagaagcgcggatacgatgtcaccaggaaccctcatctcaacaaggggatggcctttacccttgaagaaaggctgcagcttggaatccacggcctaatcccgccctgctttctgagccaggacgtccagctcctccgaatcatgagatattacgagcggcagcagagtgacctggacaagtacatcattctcatgacactccaagaccggaacgagaagctcttctaccgagtgctgacttcggacgtggagaagttcatgccaatcgtgtacacgcctaccgtggggctggcctgtcagcactatggcctgactttccgcaggccccgtggactgttcatcaccattcatgacaaaggtcatcttgcaacaatgctgaattcttggccagaagacaatattaaggccgtggtggtgactgatggggagcgcatcctgggcctgggagacctgggctgctacggcatgggcatccctgtgggcaagctggccctgtacacggcatgcggaggggtgaacccgcagcagtgcctccctgtgctgctggacgtcggcaccaacaatgaggagctgctcagagaccctctgtacatcggcctgaaacaccagcgcgtgcacgggaaggcatacgatgacttgctggatgagttcatgcaggctgtgacagacaagtttggaataaattgcctcatccaatttgaagacttcgccaatgccaatgccttccgcctgctcaacaaataccgtaacaagtactgcatgttcaatgatgacatccaaggcacagcctccgttgctgtggcagggatcttggctgctctgcgaatcaccaagaacaagctttccaatcacgtgtttgttttccaaggtgcaggcgaggcagctatgggcattgcccacctccttgtcatggccctagagaaagaaggtgtaccgaaggcagaggccacaagaaagatctggatggtggactctaaagggctcattgtcaaggggaggagccacctgaaccatgaaaaggagatgtttgcccaagaccatcctgaagtcaactccctggaggaggtggtgaggctggtgaagcccacagccatcataggtgttgctgccatcgcaggagccttcacggagcagattctgagggacatggcctccttccacgagcgccctatcatctttgccctgagcaaccccaccagcaaggccgagtgcacggctgagaagtgctaccgggtcaccgagggccgagggatttttgccagtggaagtccttttaagagtgtgactctggaagatggcaagaccttcattcctgggcagggaaacaatgcttacgtgttccccggggtggcactgggagtcatcgccggcgggatccggcacatcccagatgagatcttcctcctgacagcagagcaaattgcccaggaagtctctgagcagcatctgtcccaggggagactctacccaccactcagcaccatccgagacgtgtctttgagaattgccatcaaagttctcgactacgcgtacaaacacaacctggcttcctactacccagagcctaaggacaaggaggcttttgtaagatccctggtctacactccagactatgactcctttacactggacagctacacttggcccaaggaagccatgaatgttcagacggtctgaggcagtctcagaggctagtatggggctagatgaagcccagagtaacacccacaatataaatgggttccaaaatggcccaagtgaatccttgtcgctgtgttttttcttttaaactttctggtgtgagaggagatgccaaggcatacagtgaataaaagccttgtctctg

SEQ ID NO: 151371 - DNA, 6414 bp, Homo sapiens
  Payload ID: 9803
  Gene Symbol: MFHAS1
  Gene Name: malignant fibrous histiocytoma amplified sequence 1
  Uniprot ID: Q9Y4C4
  ENST ID: ENST00000276282
  CDS Start-End: 588-3746
ccggcgggcggcgctgccgcttcccaatcgcgccctcccagcgccggggacgcggcgcccgcgctcccgcccgagcccggggaaacggagacaaggaggcgccgccgccccctccccgcggctgcgccccagccctgcgcccgcagcatgcccgccgccgggccgagcgccgccctcccccaggagctcgaggaggcgacgccgctgccggccgcgggaccgcggctgcgagggtagcggggccggagccgggccccccgaggcgccgcgcggcgggcggagagggaggaggagcaggcatcctccgcggcgcgcgggcggcggccctgctgcccggcgcgcccatggcccggccgcagggagaatgcaagctgctctccacgcgctcggcgtcccccggagccgctcgcgtcgccgccgccccctagccgccagcgctcggccgctggctgcgctaggacccgcggccgccggccgccgagcgcgggagggcaggcaggggcaggagccggagggcccggggcgcggcgcggcatgtagctgcgggctcccgcgtccgcgtgaggctgtcggcccggggccccgccatggctgggatggacagtggcaacctgaagaccgcgaggctgtggcgggacgccgccctgcgtgccaggaagctgcggagcaacctgcgccagctcacgcttaccgccgccggggcctgccccggggccggggccgacgcgctcgagtcccccgcctccccccagctcgtgctgccggccaacctcggggacattgaggcactgaacctggggaacaacggcctggaggaggtacccgaggggctggggtcggcgctgggcagcctgcgcgtcctggtcctgcgcaggaaccgcttcgcccggctgcccccggcggtggccgagctcggccaccacctcaccgagctggacgtgagccacaaccggctgaccgccctgggcgcggaggtggtgagtgctctgagggagctgcggaagctcaacctcagccacaaccagctgcccgccctgcccgcccagctgggcgctctcgctcacctggaggagctggatgtcagctttaaccggctggcgcacctgcctgactccctctcctgcctctcccgcctgcgcaccctggacgtggatcacaaccagctcactgccttcccccggcagctgctgcagctggtggccctggaggagctggacgtgtccagcaaccggctgcggggcctgcctgaggatatcagtgccctgcgtgccctcaagatcctctggctgagtggggccgagcttggcacgctgcccgccggcttctgcgagctggccagtttggagagcctcatgctagacaacaacgggctgcaggctctgcccgcccagttcagctgcctgcagcggctcaaaatgctcaacctctcctccaacctcttcgaggagttccctgccgcgctgctgcccctggctggtctggaggagctctaccttagtcgcaaccagctcacctcggtgccatcccttatctcgggcctgggccggcttctcaccttgtggctggataataaccgcatccgctacctgccggactccatcgtggagctgaccggcctggaggagctcgtgctgcaggggaaccagatcgcggtgctgcccgaccactttggccagctctcccgggtgggtttgtggaagatcaaagacaacccactgatccagcccccctacgaggtctgcatgaaggggatcccctacatcgcagcctaccagaaggaactggctcattcccagccggcggtgcagccccggctcaagctgctcctgatggggcataaggctgcaggaaagactttgctgcgccactgcctcaccgaggagagagtggagggatgcccaggaggaggggacaaggagaagtgctacccaccgtcacctccccctgtgagcaagggcatcgaggtgaccagctggacggccgatgcctcccggggcctgcggttcatcgtgtatgacttagctggggatgaaagttatgaggtgatccagcccttcttcctgtccccaggggccctatacgtgctggtggtcaacttggccacctatgagcctcgccactttcctaccaccgtgggctccttcttgcatcgggtcggggcgagagtgccccacgcggtggtgtgcatcgtgggcacccacgcagacctgtgcggagagcgtgagctggaggagaaatgtctggacattcaccgccagatcgccctgcaggagaagcacgacgcggagggactgagccgcttggccaaggtggtggacgaggcactggcccgggacttcgagctgcgctctgccagcccccacgcagcctactatggcgtttcggacaagaaccttcgacggcgcaaggcccattttcaatacctgctcaaccaccggctgcagatcctctcccccgtgttgcctgttagctgcagggacccgcgccacttacgacgccttcgggacaagttgctgtcagttgctgagcaccgagagatcttccccaacttacacagagtactgcctcgatcctggcaggtgctggaggaactgcatttccagccacctcaggcccagcgactgtggctaagctggtgggactcggcgcgcttgggcctgcaggcgggtctgaccgaggaccgactgcagagtgccctctcctacctgcatgagagcggcaagctactctactttgaggacagtccggctctcaaggagcacgtcttccacaacctcacccgcctcatcgacatcctcaatgtcttcttccagagggatccctctttgctgctgcataagctgctcctagggaccagtggagagggcaaggcggagggggaaagctccccgcccatggcgcggtccacccccagccaggaactgctccgggccacccagctccatcagtatgtggagggctttctgttgcatgggctcttgccagctcatgtcattcggttgctgcttaagcctcatgtccaggcccagcaggacttgcagctgttgctggagctgctggagaagatgggactctgttactgcctcaataaacccaagggcaagcctttgaatgggtccacagcttggtacaagttcccatgctatgtgcagaacgaggtgccccatgcagaagcctggattaatgggaccaacctagctgggcagtcttttgtggctgagcagttgcagattgaatatagctttccttttacttttccacttgggttgtttgcacgctacagtgtccagatcaacagccatgtggtgcacaggtcggatggtaaatttcagatctttgcctatagagggaaagttcctgtggttgtgagttacagacctgccaggggagtcctgcagccagacaccctgtccattgctagccatgcatcattaccaaatatatggaccgcatggcaagccataacccccttggtggaggaactgaatgtcctacttcaggaatggcctggactgcactacaccgtgcacattctctgttctaagtgccttaagagaggatcgcccaatccacatgcttttccaggggagttgctgagtcagcccagaccggaaggagtggcagagatcatttgccccaagaacggcagcgagcgagtaaatgttgccttggtttacccacccacgccgactgtgatcagcccctgttccaagaagaatgttggtgaaaagcacagaaaccagtgacgtttgtggctgtggaatttccatggagaaaagagagcatctgaacacctggaccatcttttgcacctggcagaccctctgcactcaccccagcgtgttctgtgaacttgagtgacaacgcgtgcttgcagggtgctttttggacgactggggaagaggtggggagggggtggtggggggaagcatggacgagaacatggagcaaatgttttacaacctgaacctcagaactgtgatcctccaaggagcgcgctacttgaagaaaagaaaaaaaaaaaaaaaaagtcgaatggcttctcagggattttgttttccgtgcacatataagccatagttacagtacaggtggcagtatttagagcactcagatttcagttctgttaaatgtgaaagagggatcgactgacgttcattgctgttccataactagtgtaaaatatgtatatgtttatctttatttttataatatgcaaatacatttaaatttatacagtttgaagcttctagcgttagttcacactgggtgcaatattctgcatgagaactgtgccaagatggggctgatttcttattttagtataagacttttttgttttttctttattctttaatcctcttcacattaaaaaaaaaatctctctgttagcccatggattaagtgttggttcatagagattgccaataatcagaaagaaccttaaatgtgcatttaagacagtgtcccttcccttcttttcaatgaaggtccctgcctatataaatcatctggcacgctggtgggaaatcctttgctcttccaacgtgttattagtgctgggcagagatggggcacactcaggggccaaagaggacaaaaagtccatgcaaaacttgagtcttttaatggcttaagataatcaggagtcagttctgaatcttacaaagtgctctgcttaataagtaccttacttagcagagcactttgcaaacatattacttattagcagagctctttgtagaccttccacatctggctgtcagatcttaaggttgtgaatttaggctccagttacattcactggagagcataatcccacacgggttatttataaatacagagcctctgattggacggtctcctgccaagaactagtaatacccttgttttaaaatcttcacaaggtaaaacttaaaaagccaaccaaacaaattgctctccattctacttttaattgggccaaacagcatatgctacagtagtaacatgtttttcggagagtgtaaaaaactctgtttacatttgcctcctccgtgggttgatcgaaaatgtataaaactgactgcttctcgccagcctcagacaagaagagtgagttgctggtactcgctactcttttacttcttttgtaaagtattgactcttggaaggctacagtatacaaagtctcaacatgttttttaaaagaaataaggagcaagcgactgccctgctagaaatcacaaaccgatttttgtagaatattttgtgccccaggcattaatttcactgactccagaacctgcagttcagagaatgatttcttatgatgataaaaatcgaatgggatcagacgatgtttgcatttttttaatacttgaataggacacctcaagtttgagatttcattttcttttagaacacagtcacaagattaatctggtgaatccttttgtcacagttctcgtgtgtgtgtgcgcgtctccgtgtgtgtgtgtgtgcatgtgtgtaaaactgaatggtcacatttaattgctttttggaccattgaatagttgggaagtaagaattttttaattggcatgagacggttcctcaactgttaaattaaccaactttgacctgtctttagaaaaaggcttatttgtatgattttgggctaactccccggggaccatattaaatgacaaaaatgctcctttgggtgacacaccctacaaagtatttgctgttacgaacataaacgcccacattcttaatatctaatatttttgaccagtgatgttttatgctgtcatctgaaccctagagaagcagtgtcagaggaaaccttggtgtcacatgtgtcttagcaaaagggttaccatgatcgagggtcatgtgaccaaaagatgctccagagaagcttgagaatttgtttcaagttgggaggagggttggagatacaaaaatcactctgctctacaggactcttcagctgtctatgcaagaaattccgttttctctttcagcacctggaaagacacagcagcccaccgaggcgataggtgattcactaagcacaagaggaatgttttctaagcaaggcgtcccttgcctctcaaacaaatgccctccaagtttgttagggtttctattcctgcaacttgtggtatcaaaaccacttcctggaattgtcaaagcactgccaaaataaatgtttttcccccttctaagaaaaaaaaaatgacagtgctcatatttgacacttgtgtattggactctcttttgaatgaataaaaaggaaaaggggtttggtgtaattcctgatggggtgcgtgttgtttttcatgccatggtttgtgaattttaattgtggtttcccatttcgttgttgtaactgggcagaaattaaaaaagaaaaatcaataaaaatacaaagaaatggttaaa

SEQ ID NO: 151372 - DNA, 1130 bp, Homo sapiens
  Payload ID: 9804
  Gene Symbol: MCTS1
  Gene Name: malignant T cell amplified sequence 1
  Uniprot ID: Q9ULC4
  ENST ID: ENST00000371315
  CDS Start-End: 534-1082
taagatcctctttctctctcccccgcccctgccatcctgactccctaaggttttctatagtactatgctctcactcccaacttgaacacttctttaagctttccatccgtagtccttaattgggtttcagtccctccactcccattgttttttctccttacccctctttctcttttgccccctcccccaattctgtctccattcctagggttctaccaatcacatccgtgcactgtgatttagaggcatattctctgtagctgagaggggagccctgcgctcactgccatatgtttattagttatgaactgaataaaggaaggcttgacttcctgggtcatgggagtgaaggagtctgggtgacaggaagcaagcggcctgtcatgcctattgcctagctgccagattaaccttgccttgaaaataacgattgccccataggctattcagtgtaaggaagacaaaaattccttgggaacctactagtgggtttgccttccagatttggtagacgcaaaaagcaaagggggaacatgggcaaaggaagatttgatgaaaaagaaaatgtgtccaactgcatccagttgaaaacttcagttattaagggtattaagaatcaattgatagagcaatttccaggtattgaaccatggcttaatcaaatcatgcctaagaaagatcctgtcaaaatagtccgatgccatgaacatatagaaatccttacagtaaatggagaattactcttttttagacaaagagaagggcctttttatccaaccctaagattacttcacaaatatccttttatcctgccacaccagcaggttgataaaggagccatcaaatttgtactcagtggagcaaatatcatgtgtccaggcttaacttctcctggagctaagctttaccctgctgcagtagataccattgttgctatcatggcagaaggaaaacagcatgctctatgtgttggagtcatgaagatgtctgcagaagacattgagaaagtcaacaaaggaattggcattgaaaatatccattatttaaatgatgggctgtggcatatgaagacatataaatgagcctcagaaggaatgcacttgggctaaatatggatattgtgctgtatc

SEQ ID NO: 151373 - DNA, 1018 bp, Homo sapiens
  Payload ID: 9804
  Gene Symbol: MCTS1
  Gene Name: malignant T cell amplified sequence 1
  Uniprot ID: Q9ULC4
  ENST ID: ENST00000371317
  CDS Start-End: 258-803
gctacctccaactgctgaggaaccggttgcctaaaaggagccggcaaaagcgcctacgtggagtccagaggagcggaagtagtcagatttgactgagagccgtaaagcgcggctggctctcgttttccggataacgactacagctccgactgtcagtgccggccttcctcgtgtgaggggatctgccggacccctgcaaattcaatttctttcccattccgggcccttccctatcgtcgcccccttcaccttggatcatgttcaagaaatttgatgaaaaagaaaatgtgtccaactgcatccagttgaaaacttcagttattaagggtattaagaatcaattgatagagcaatttccaggtattgaaccatggcttaatcaaatcatgcctaagaaagatcctgtcaaaatagtccgatgccatgaacatatagaaatccttacagtaaatggagaattactcttttttagacaaagagaagggcctttttatccaaccctaagattacttcacaaatatccttttatcctgccacaccagcaggttgataaaggagccatcaaatttgtactcagtggagcaaatatcatgtgtccaggcttaacttctcctggagctaagctttaccctgctgcagtagataccattgttgctatcatggcagaaggaaaacagcatgctctatgtgttggagtcatgaagatgtctgcagaagacattgagaaagtcaacaaaggaattggcattgaaaatatccattatttaaatgatgggctgtggcatatgaagacatataaatgagcctcagaaggaatgcacttgggctaaatatggatattgtgctgtatctgtgtttgtgtctgtgtgtgacagcatgaagataatgcctgtggttatgctgaataaattcaccagatgctaaaattctgttagcttcagaaattattttaagttttcttaaactcaagttaaaattgggtagcaaacttggacattaaaaggtatctggtaagtaa

SEQ ID NO: 151374 - DNA, 2056 bp, Homo sapiens
  Payload ID: 9805
  Gene Symbol: MCAT
  Gene Name: malonyl CoA:ACP acyltransferase (mitochondrial)
  Uniprot ID: Q8IVS2
  ENST ID: ENST00000290429
  CDS Start-End: 47-1219
tcgggcctcggtcgccacggtaacgcgcgcgggcaggtgtccgaccatgagcgtccgggtcgcacgggtagcgtgggtcaggggcttgggcgccagctaccgccgcggcgcctcgagcttcccggtgcctccgccgggcgcccagggtgtagcggagctgctgcgagatgcgaccggggcggaggaggaggcgccctgggcggcgacggagcggcgaatgccgggccagtgctccgtgctgctcttcccgggccagggcagccaggtggtgggcatgggccgcggtctgctcaactacccgcgcgtccgcgaactctacgccgccgcccgccgcgtgctgggctacgacctgctggaactgagcctgcacgggccgcaggagaccctggaccgcaccgtgcactgtcagcccgcgatcttcgtggcatcgctggccgctgtcgagaaactacatcacctgcagccctcggtgattgagaactgtgttgctgctgctggattcagtgtgggagagtttgcagccctagtgtttgccggagccatggaatttgctgaaggtttgtatgcagtgaaaatccgagctgaggccatgcaggaagcttcagaagctgtccccagtgggatgctgtctgtcctcggccagcctcagtccaagttcaacttcgcctgtttggaagcccgggaacactgcaagtctttaggcatagagaaccccgtatgtgaagtgtccaactacctctttccagattgcagggtgatttcaggacaccaagaggctctacggtttctccagaagaattcctctaagtttcatttcagacgcaccaggatgttgccggttagtggcgcattccacacccgcctcatggagccagccgtggagcccctgacgcaagctttaaaggcagtcgacattaagaagcctctggtttctgtctactccaacgtccacgcgcatagatacaggcatcccgggcacatccacaagctgctggcccagcagctggtctccccagtgaagtgggagcagacgatgcatgccatatacgaaaggaaaaagggcagggggttcccccaaactttcgaagtaggccctggcaggcagctgggagccatcctgaagagctgtaacatgcaggcctggaagtcctacagcgccgtggatgtgctgcagaccctcgaacatgtggacctggaccctcaggagcccccgagatgactgcagggggctcaaatgcgatgaccccctctgtcctcctgaggagaggctgtaggctgtgcctgtcgccccctaccttcctaatggctcctcctctgaggagtgaaagggatttgtttgcaacgtgctttgaaggccacataaaaagccctaaaaatgagtatttctttacatgacccagtccatttctcccccttggaaaaacgtttggacgttgggaagaatgatgccacagggctggtgtgtggggaagctagaatcctggccccgcctctgccagccctgcaccataggcaggtgtgccatctcagcgggaaggggaggactggctgctgcagcctgtcctgctctgtgagtgctgagaacatgctggtgtggcctcaatttcagccagtgccaggggagcccctccaccacccccagcctgccccccagggctcctttgtcacaaatctgaaaggttttagaacccagttggccttggcagttttgttcacctcctcacttgacagctgggagacagaggcccacatttatggacatacccaagagatatgtattgcctgctgtgtgctagagagtgagtgcgctctgttctggtagaaaggtccttgagtgaggtgcggggtgtggggagtgccaggtagggagggcgactgaggccctggtcctaggggtggaaccatggaggaacaccctggtcacccactgggactgcgggtctgcggggcgccagagggagcacagcacatacctgcctcggagctgacccctggctccatgccccgtcctcagagcagctcctgcgccaatattaagtatgagacattccaagct

SEQ ID NO: 151375 - DNA, 1134 bp, Homo sapiens
  Payload ID: 9805
  Gene Symbol: MCAT
  Gene Name: malonyl CoA:ACP acyltransferase (mitochondrial)
  Uniprot ID: Q8IVS2
  ENST ID: ENST00000327555
  CDS Start-End: 17-559
gggcaggtgtccgaccatgagcgtccgggtcgcacgggtagcgtgggtcaggggcttgggcgccagctaccgccgcggcgcctcgagcttcccggtgcctccgccgggcgcccagggtgtagcggagctgctgcgagatgcgaccggggcggaggaggaggcgccctgggcggcgacggagcggcgaatgccgggccagtgctccgtgctgctcttcccgggccagggcagccaggtggtgggcatgggccgcggtctgctcaactacccgcgcgtccgcgaactctacgccgccgcccgccgcgtgctgggctacgacctgctggaactgagcctgcacgggccgcaggagaccctggaccgcaccgtgcactgtcagcccgcgatcttcgtggcatcgctggccgctgtcgagaaactacatcacctgcagccctcggtgattgagaactgtgttgctgctgctggattcagtgtgggagagtttgcagccctagtgtttgccggagccatggaatttgctgaaggctctacggtttctccagaagaattcctctaagtttcatttcagacgcaccaggatgttgccggttagtggcgcattccacacccgcctcatggagccagccgtggagcccctgacgcaagctttaaaggcagtcgacattaagaagcctctggtttctgtctactccaacgtccacgcgcatagatacaggcatcccgggcacatccacaagctgctggcccagcagctggtctccccagtgaagtgggagcagacgatgcatgccatatacgaaaggaaaaagggcagggggttcccccaaactttcgaagtaggccctggcaggcagctgggagccatcctgaagagctgtaacatgcaggcctggaagtcctacagcgccgtggatgtgctgcagaccctcgaacatgtggacctggaccctcaggagcccccgagatgactgcagggggctcaaatgcgatgaccccctctgtcctcctgaggagaggctgtaggctgtgcctgtcgccccctaccttcctaatggctcctcctctgaggagtgaaagggatttgtttgcaacgtgctttgaaggccacataaaaagccctaaaaatgagta

SEQ ID NO: 151376 - DNA, 459 bp, Homo sapiens
  Payload ID: 9805
  Gene Symbol: MCAT
  Gene Name: malonyl CoA:ACP acyltransferase (mitochondrial)
  ENST ID: ENST00000608052
  CDS Start-End: 1-264
ctggccgctgtcgagaaactacatcacctgcagccctcggtgattgagaactgtgttgctgctgctggattcagtgtgggagagtttgcagccctagtgtttgccggagccatggaatttgctgaaggtacaggaaggagtttggttttatgcaaggctgtggtcttgggctcattaggggtaagggacactgccaaaaatgatactggacccactcaggtgatgggaagggagcacatggacaggggtgacattggcacatgaggacagggctttgctgtgattccttttcaagactgaaggattcattagggatttcccttatttttgtaatctcatgaaatctgcttgctgaactgtctaacccgctatcctgtgcactcatacctgcagcacctgcaacacgagagtatgtgttcagtagatattcgttgaattaaagagtaaataaatattgga

SEQ ID NO: 151377 - DNA, 13038 bp, Homo sapiens
  Payload ID: 9806
  Gene Symbol: MLYCD
  Gene Name: malonyl-CoA decarboxylase
  Uniprot ID: O95822
  ENST ID: ENST00000262430
  CDS Start-End: 20-1501
gcagctgttgtggggcaccatgcgaggcttcgggccaggcttgacggccaggcgtctcctcccgctgcggttgcccccgcggccgcccgggccccggctggcgagcgggcaggcggccggcgccctggagcgggccatggacgagctgctgcgccgcgcggtgccgccgacgccggcctacgagctgcgcgagaagacaccggcgcccgccgagggtcagtgcgcggacttcgtgagcttctacggtgggctggccgagacggcccagcgggccgaactgctgggccgcctggcgcggggcttcggcgtggaccacggccaggtggcggagcagagcgccggcgtgctccatctgcgccagcagcagcgggaggcggcggtgctgctgcaggccgaggaccggctgcgctacgcgctggtgccgcgctatcgcggcctcttccaccacatcagcaagctggacggcggcgtgcgcttcctggtgcagctgcgggccgacctgctggaggcgcaggccctcaagctggtggaggggccggacgtccgggaaatgaatggggtgctgaaaggaatgctctcagaatggttttcctccgggttcctgaacctagaacgggttacctggcattcaccgtgtgaagtgcttcagaaaatcagtgaggctgaggctgtgcatcctgtaaaaaactggatggacatgaagcgccgcgttgggccctacagaaggtgttacttcttttctcactgttcgacccctggggagcccctggtcgttttgcacgtggcactgactggtgacatctccagcaacatccaggcaatcgtgaaggaacatcctccatcagaaacagaagagaagaacaaaatcactgctgcgatcttttattccatcagcttgacccagcagggactccaaggggtggagctgggaacattcctcataaagcgagtcgtcaaggagttgcagagagagtttcctcaccttggggtgttttcaagtctgtcacctatacctggtttcaccaaatggcttctggggcttctgaactcgcaaacgaaggagcatgggaggaatgaactctttacagattcggaatgtaaggaaatctcggagatcacaggtggccccattaacgagaccctcaagctcctcctcagcagcagcgagtgggtgcagtcggagaagctggtgcgggcgctgcagactccgctgatgaggctgtgcgcctggtacctgtatggagagaagcaccgcggctacgcgctgaaccccgtggccaacttccacctgcagaacggggcggtgctgtggcgcatcaactggatggcggatgtgagcctcagaggcatcaccggctcctgcggcctgatggccaactaccgctacttcctggaggagacgggccccaacagcacctcctacctcggctccaagatcatcaaagcctctgagcaggtcctcagcctagtggcccagtttcaaaagaacagcaagctctgacagtaaacctctcctaaagcacagggccccggctaagaaaacgatcattttcaggaggggccgggagttatgtatctgaagcagctttccaagcaaagccaaagttgactgtgttcttgtcccgcagccggtccacactgtgaggccaggcctcaacttccctcaccctgggcgtgacatgcacccagtgcaagacggttgtgggtgcgggtgcacacaaatgagtgggttgctgtgctgtctccggaagattctgtcgttgcccttggcctggctccctgcccggggctggtgctgtggtacctacatcttcaggaagctgtgcagcctctgccattgccatcccagggggatctggcatcctcctaaggaccggggcgcgtggcccagataagaataggtgttcctttgtgctcataaaacagaatgcggcgatggttgctttagccgtttctcaccatgcaatgcagagggacaaagggctgtgctacacttcccagttacattctgaagctcataaatgtatgagaaggtttgtgattttgcacaaggtgtgtgtagtaagttaaattgttgaacacaaaaatgttgctgcttgaggcataagttggataataggctttaaatgatcagggattcaggttcataatgaacttcacagtaaagaacacgtttgttctgtaaagcattgaacatctgattgtgtagtggtggtcgtctttaagattagagacctgggaaggctggaatcagccagccagcctacggggagtttgggatgaaggagcctggggtgtgttggatgagaacaaaggtgaaggaaggggcagtcattgtgcttgtgggaggaaggcagttgtgtttgtgtgtgtatgtgtgtatcagtgcacatctgtgtgcatgtgcacgagcgtctctgtgtggatcagtgcacgtctgtgcgtgtgcacgagcgtctgtggatcagtgcacgtctgtgtgcgtgtgcacgagcgtctctgtgtgtatcagtgcatgtctgtgtacgtgtgcacgagcatctctggatcagtgcacgtctgtgtgcatgtgcccgagcgtctctgtgtggatcagtgcacgtctgtgtgcgtgtgcacgagcgtctctgtgtggatcagtgcacgtctgtgtgcgtgtgcacgagcatctctgtgtgtgtcagtgcacgtctgtgtgcgtgtgcacgagcgtctctgtgtgtatcagtgcacgtctgtgtgcgtgtgcccgagcgtctctgtgtggatcagtgcacgtctgtgtgcatgtgcacgagcgttctatgtggatcagtgcacgcctgtgtgcgtgtgcacgagcgtctctgtgtgtcagtgcacgtctgtgtgcgtgtgcccgagcgtctctgtgtggatcagtgcacgtctgtgtgcgtgtgcacgagcgtctctgtgtggatcagtgcacgtctgtgtgcgtgtgcacgagcgttctatgtggatcagtgcacgcctgtgtgcgtgtgcacgagcgtctctgtgtgtcagtgcacgtctgtgtgcgtgtgcacaagcgtctctgtgtggatcagtgcacgtctgtgtgcgtgtgcacgagcgtctctgtggatcagtgcacgtctgtgtgcgtgtgcacgagcgttctatgtggatcagtgcacgcctgtgtgcgtgtgcacgagcgtctctgtgtgtgtcagtgcacgtctgtgtgtgcacgagcgtctctgtgtggatcagtgcacgtctgtgtgcgtgtgcccgagcgtctctgtgtggatcagtgcacgtctgtgtgcgtgtgcacaagcatctgtgtgtgtcagtgcacgtctgtgtgcgtgtgcacgagcgtctctggatcagtgcacgtctgtgcatgtgcacacgtgcatgtgcatgtgcttacacgtctttgtgtgtctgtgtgcgtgtgtccgcagttgccctgtcctcgctgtcctcggtttggcagacaggtccctcaccttccttgcctttcatctcctgtgaccctcgccaggccccttctctgtcttctgcgtacggcgtgttgcttcgtgacagacggtgtgatcgcgggagctgtctcatgcctcttgttctccgggctgattctgaaagagtggcttgcaggccaatcaatgcaatcctggcaacctgcccgcccttcttgcgggcagagttctttaccgtaagcgtccccagaccctcaggcctgcggaaacctgctgggccttaccgtctttgcttagcttttggcctagaccttaaagaccagcagtcttctgtgctttatcctgctgcctccagagtgccatggacagatcacccattctcgatcactccggcagcctttcggatccggtggcgcccttcctggctgtgtccttcacctgtgctgtctggttctctcctgtgtggacaggggatgataggaattcccgctgcacaggccgctgggaggacgggctcaggtgacatctgccgaggctttggctcaccagaggagtttgtagatgtcagtcatccccaagtcactaggaactagcacgcctgaggtaggtctcggaatagtgttcaaatccattttactattgcggccaaggagccctccctccagcaaggcggctcatcacatcacgttactctttaggtcaaatgtaaccctcccggttttatttatcactcaggcagagtttcttaaccttttgtgagttacagatcactgaaattctggtgaaagccaggtaggcctcgccgcaggagaacacatacatggtgcacagaacacacacagtgcacagaacacagtgcacaggagaacactcacagtgcacaggagaacacgcacacggtgcacaggagaacacgcacacatgttgcacaggagaattcacacacagtgcacaggagaacacacagtgcacaggagaacacatggtgcacaggagaacacgcacacacggtgcacaggagaacacacacagtgcacaggagaacacgcacagtgcacaggagaacacagagtgcacaggagaacacatggtgcacaggagaacacgcacacacggtgcacagaacacacacagtgcacaggagaacacgcacagtgcacaggagaacacggtgcaccggagaacatgcacacatggtgcacaggagaacacagtgcacaggagaatacagactgcacagaacacacgcacagtgcacaggagaaaacgcacacacagtgcacagaacacagtgcacaggagaacacgcacacagtgcacagagaaccacacagtgcacaggagaatacgcacacacagtgcacagaacacagacacagtacacaggagaacacgcacacacagtgcacagaacacagccagtgcacaggagaacactgcacaggagaaccacactgcacaggagaatatgcataaacagttcacaggagaacacgcacacacagtgcatagagcacagacacagtgcacaggagaaccacacaatgtacaggagaatacgcacacacagtgcacaggagaacatacacgcagtacacagacacagtgcaccggagaacacagtgcacaggagaacacgcacacacagtgcacagaacacagacacagtgcacaggagaacacacagtgcacaggagaacacagtgcacaggagaatacacacggtgcacaggagaattcacacacaatgcacaggagaacacagtgcacaggagaacacacacacacactgcacaggagaccatgcacagtgcacaggagaatacacatggtgcacagcagaattcacacagtgcacaggagaacacacacagtgcacagaattcatgcacacagtgcacaggagaacacacacagtgcacaggagaacacagtgcacaggagaacacacactgcacagaacaaatgcacagcacacaggagaacatgcacacacagtgcacaggagaacacagtgcacaggagaacacacagtgcacaggagagaacacacagtgcacagaacacacagggcacaggagaacacacagtgcacaggagaacactgcacagaacacacggtgatcagaacacacagtgcacaggagaacacacagtgcacagaacacacggggcacaggagaacacacgatgcacggaacacggtgatcagaacacggttcacaggagaacacacagtgcacagaacacacggggcacaggagaacacacagtgcacagaacacacagtgcacagaacacacggtgcacaggagaacacatggtgcacaggagaacacacggtgtacagaacacacggtgcacaggagaacacgcagtgcacaggagaacatgcaatgcacgggagaacacagtgcagagaacacacacgcactgcacagaacatgcagtggtgcacaggagaacagtacacaacaacacattccatgcacaggagaacacacgcaattcacaggacacaacagaacacacgcagtgcacaggacacaacagaacacacgtgcacaggagaacacagtacacacacagcgcactggagaacacgcacagtgcacaggagaacagagtgcacagaacacagtccacaggacagcacacggtacacagcagaacacccgcagtgcacaggagaacctagtgcacagaacacacaccctgtgcacagttttgttttgttttgcttttgcaattccagggagctccctggcctcccacagccattcatagagcccattctgtttgcgataaaaacagatctcctccagctcacgtgaggctaggcacgggttcctcaaaacctttttgggcagctagcagctttgactagcagctcatctcaccaggctgaggtcgctgcctgtgaacagttgacagacctaaagccagccagaatgttctgtgtcagagagccctgtccaatgggcagagctgggagacacgcaggaagacccccagcccatgcccgttctcaggcctgaggttcattctcgttctctccctcttccctttccccttcctccctcctgccctcgaatctgcaaggtctctccgggtggctgtgttctgccagggcctcccaggctccaagatcactgccttcagggagcccaggaagagctgcacatccgctgcctctgtgtggcaggcgtgtccgagactgcaactcctagttcccacctttcacacctcatctctctaacctcttatggaaaatttcaaacatatgtaaaagcagggagaaattgcataacgaacctacagacctatcacccagcttccacagtcatcagtggttttctgtttttatcaaactttatctttgtacttcttacagtgcttcacatttagcaggtcctcaatgaacattagatggatggatggaaggaaggaagatggatggatggatggatggatggatggatggatggatggatgacagatggatggtggagggttaatggaaggaaggaagatggatgggtggaaggaagatgggtggatggatggtggagggtggatagaaggaagatgggtatatgaatagatggctgggtgggtggaaggaaggaagatggttggatggatggaagatggatggatggatggatggagggtagagttttaatggaaggaagatggatggacgaatagatggaaggaagatgggtggatggaaggaagatggatggatggaatgatggatgggtggtagagggtggatggaaggaagatggatgaatagatgggtgggtgggtggatgtttggatggatggtggagggcagagtgttaatggaaggaagatgaatggatagatggagggtagagtgtagatggaaggaaaggaaaggaggatggatggatggatggatggatagatggatggaggagggtggatggaaggaaggaggatggatggatggatgggtgggtgggtgggtggatggatggcgcagggtatatggaaggaagatggatgaatgatggaagatggatggatgggggacagatgaattgatggcggaggatgttaggatgggtggatggatgtattaacatcccttctccatgcctcagtccccatcataaggagaaagagcctgtcgtccctctatgatactgcactgaaccaatattcccctcacttcatgggtgttacaaacctcttatcatctgtttacgtctcactcttactgtagaacctctagaaaggcaggtggcttccagctcctcgcttttcctgagggatgatctgaccacccattcttacacatgtcatctttcccacagtggcagtgcagaggagacaaaagcagaacaaaagcagacagcggccaggtctgagggtgataggctactcactgggtcctagtgttctgaactacaccctacaggaaagtgctactcagtgcccaggtgacatcgtcacaaggggaacacagtggctaagagggcaggggctcagtctcacagacctggtttccatcccacttgctctcaggaaccctgggcaacaactgtgaccacagtgtcttcctctggaaagtgcccagcagtgttgggctcaccgtagctgcacaataaattgtcatgagtgctttccactgtgtcccaggttcaaggctgaagtcacaaccccacccctgccacagagcctgcccccccgagtgttccccatctcagtctgaggcccgacctgtgcttccggagcccgcgtcccgtcccatctcaggagctactctgctccattccccccgtatccgagacctaagttccggctctccttatctcttggagccctgtcatctgtggatcagatgctccccagctccctccatcccacccacagggtttcacaagaggcccagccatgcaccctgctggggttcagacttgaggggtgccactggagttggggtgcacctgctctcacctgttcatgggctcctttttcttctgaaatgcagcgtgaggcaccatggagggagctgtagactttggctccggccagtgcccagttcaaatgctggccccaccacttccagctgggtggcccagggcaagccacctacccttgctttgcctcagtttcctcatctttaagtggcagtaaccatagtaccgaccccacagcctgctgagaggctcaaaggagacgatgtatataaagcagttaactgatgcctgccctgggaagcagagcagtccctgtcatgatgggcgtttctacatctggacctgggcgccaccatcctgctcacctgaatgcgggttctgggatctttcagtccttatttggatatttgaatatttgttggttttctggcttctcacaatttctaagaggtgactaagtggatcattcgttcccgggagaggtgggaatggctcctgtggacacggcattgcacaggggcttgaggggacctcctgacccctgatggctgagcacccttgtcatactcctcagggagagcccaggccaccggctagctccagactggctctgcagggcctcagaatctgaactccctgtggtcactctgaggcctctctgtctctctgtgtctttctctttctaccctctccatccctccttccctctgagggcttgaccttcactgacctccagggcaagaacaaccaagagttgctcccaagagggcttccctcctcctcgttctgtgtggcctcagaagtgagggaatctcagtgctctgtgcaggcatgtgcttattctgagctctgtttgaaattaaacatgaggtgtactaaagatttaaatcgagcaaacacctctgtgatttccaattggattctgaggcgcttacagaaatatgaagtccattttgatctactcttagaaacaaaagctgcccatgatttcaccacagaaagtctgcctcatttgcagtttagcggactcacagaggtgaccctagatctctgtctcgcctttgtttggtttatttccacattgcatttgcgtttcccgcctggctagttcttgatcattgaggaaggcagagagaaacgagattctctgctctgggccaggcattctctgtacacgttcctggttccagcctgcctccttccctagaggatcaccgtgtccagccctgaagctggagcgagtgttcctcacttagagatgaggcgatgaggcggcgagctgggagagggctgagcagctggtgagggcagagttgggactcaaacccaggcccgaccaccacccagctctccttccaccgcactggtccacctcctgaccgtacgtggggagacccacgcaaaggcccagagaggagaaggccagcagtgggcagaacagagtgggccgcaggttttggcaagcctggaggggaataggtcagaaaggtagcccggctgggctgagagactgaggacagggggtgttagggtgctgacattctggcaagggggcgggggtctgtggaagacaaccccaggctggggtggcttctctcaaacccgggcatgcacagtgctggccgtatcggtccgagccctcggctgccagggagagaagctgagctcccaccaaagcataaaatccaggccagcgaggggcagccagaccacgggaagacaggaggaacccggacctggctctcgtgcaggaagcaggcagtgcacagctccgccgccacagagacagcctcctctcatgaccccagactcagcccgggccgtggtgggaacgatggttggcccggtttggagatgggggatctggccctgtggtgagtgcacccagagcaggtgtctctccggagcagttgagtagaacagctggcgtcacctcttcatgttgacgaggggagatgagtggcccaggcagttcctagagcgggggagatggagtgggccgtatcccacccagcaggagcgcttgcttctgaagctcccgtgcgtctgtgacagaggcttgaacccccggcttgttctctcacgtctgttgccgtaaatctgtctccatcgcctggcacataggagaggcttggcaaatatttttggttcactgaagaaaggcagccctcactcctgctgctcagacagcaccccctgaacgtgagttactgcctccttgagcactttcgcaggagagaagaccagagagctgccttcaaagatgccagagccatgtttatttaagcggcgctgctccagagagaactggccatttgcagtctccaccccagtgtggctcacgatgccacctctccttgccagctctcaccgaggcccccggtgacctcctagggggtacatccagccaggttccccctcagcaatggccaggggccaccgtgggccacactgcacttcccaaatgctcccggcactggcacagatgcacaccctcttggccatccccacctgtgctccgccactcttagtcagccattcctctcggcttccgggagtcccctccttctctaaggatctcacccccatccgtgtctctgctgtctcctaactaccgatagcaagggcactagtgcccctgtttgccggggacaggccctgtctggggccctggtgtggcatcattgttaacagagcttcttttcactctgaagtgttcagttaggacagtcacttgcacagtcccctcactggtgacacagacaccccatacctgtgtgtttcccctgcatagctcagcagcagctcaggctcagcacggccaaggctgaatgcagatgccctccctccaaaacctggcctcctccagctgttccttcctggcgaggccacctccaactgtgtaacacagaagcctgggtgccatccctggggctcccctcacccccacctcccacccgtccccgggcccctggacagaccactggccttgttctcttcatttccctggcccaggttacaaagtctccttcctgattatgtgcattaactaacctcgcaggtgctctgcccacctgcctacgccagactcttccagatccttctccaccccagcaggcagagttgtcattgtgaaatgcaaatcaggttccatctctcctctcctttcctacctcccaccatccccgtcaccctccctgtcacacacagccccctccgtggcctctcaagcctgctgtggcctgaccctcccctctgcttttccaggccctcctggcactgtcctccctcagtctgggactccctgtcctccctccttcctgcgtggcacatgctcctccctcttcttgaaacgctctcccctccctgcctcccaggcaatgcccactctgcctccaaagttcatccatcgtcctctcctcaggaagatttccctggtggcttgactaggtcacagtccccctttatttgccgtcttctcactggggcctctccttcctggtagcttctaaacaaggcagtttcatgtgtgtatctccactagactagacgctctctgagggcagggaccctgcttcgcttctggcccgaggtggctgcagggtctgcaagatcatcagggccccctccaatgtgacacttgcagaggggacccctggcctggggccacgctggttacttgggtacactccttgcccagggttccacagccccttaaaggcagggtctttctggccacgcctggccctggtctggcctccccaaggagccctgccgctgggggtgctgtgtgggaacagagcacaggccctccctcccagagcccacgagatctcactttctccaagcccagctccccaaggactcagaccccagttgccctgcactgaacgctggcttgccctagctcactcggaccccaccctgcactgggaaggagggtccctgtccccgtttgacgggtgacgacactgaggcccagagagctgaaggggctggccgaggggacgggcttgggcgcttccattctcacactgctgccgtgacacctaatccatccggggaagttccctttaaacccaaaaggggacggtgaagccacacgcggccgcccttctcaggagcccacttccacctctcgcaggctagacagcgttccccaagtccccccttgagctgggtgggctgcccagctgtgaacacaaggacacctccgatttcgtcctgtgaatgttgatattagtggtcccttccttcaggggctgtggggatctcaaaagataaggcaggtctggagtcctgcgcggtacctgccgcatggcaggctctttacggacagcgcagggacgcactttgatgctgaaaatgagtctctgggacagatggatcccagtctgggtcctcgcaagcgctgtgcaccccgtcgccgcgagatggcggtgttgcgcccctccagcctcctctgctctgcgcttgggcgctgaatgttaaaattcctaacaggtgaatcgcttgaatccgggaggcggaggttgcagttggccgagatggcgccactcactccagcctggcgacagagcgagactacgtctcaaaaaaaaataaaaataaaaaaataaaat

SEQ ID NO: 151378 - DNA, 2866 bp, Homo sapiens
  Payload ID: 9807
  Gene Symbol: MALT1
  Gene Name: MALT1 paracaspase
  Uniprot ID: Q9UDY8
  ENST ID: ENST00000345724
  CDS Start-End: 113-2554
gttcttccgcccctgcctccgcggctcggaggcgagcggaaggtgccccggggccgaggcccgtgacggggcgggcgggagccccggcagtccggggtcgccggcgagggccatgtcgctgttgggggacccgctacaggccctgccgccctcggccgcccccacggggccgctgctcgcccctccggccggcgcgaccctcaaccgcctgcgggagccgctgctgcggaggctcagcgagctcctggatcaggcgcccgagggccggggctggaggagactggcggagctggcggggagtcgcgggcgcctccgcctcagttgcctagacctggagcagtgttctcttaaggtactggagcctgaaggaagccccagcctgtgtctgctgaagttaatgggtgaaaaaggttgcacagtcacagaattgagtgatttcctgcaggctatggaacacactgaagttcttcagcttctcagccccccaggaataaagattactgtaaacccagagtcaaaggcagtcttggctggacagtttgtgaaactgtgttgccgggcaactggacatccttttgttcaatatcagtggttcaaaatgaataaagagattccaaatggaaatacatcagagcttatttttaatgcagtgcatgtaaaagatgcaggcttttatgtctgtcgagttaataacaatttcacctttgaattcagccagtggtcacagctggatgtttgcgacatcccagagagcttccagagaagtgttgatggcgtctctgaatccaagttgcaaatctgtgttgaaccaacttcccaaaagctgatgccaggcagcacattggttttacagtgtgttgctgttggaagccctattcctcactaccagtggttcaaaaatgaattaccattaacacatgagaccaaaaagctatacatggtgccttatgtggatttggaacaccaaggaacctactggtgtcatgtatataatgatcgagacagtcaagatagcaagaaggtagaaatcatcatagatgaattaaataatcttggtcatcctgataataaagagcaaacaactgaccagcctttggcgaaggacaaggttgcccttttgataggaaatatgaattaccgggagcaccccaagctcaaagctcctttggtggatgtgtacgaattgactaacttactgagacagctggacttcaaagtggtttcactgttggatcttactgaatatgagatgcgtaatgctgtggatgagtttttactccttttagacaagggagtatatgggttattatattatgcaggacatggttatgaaaattttgggaacagcttcatggtccccgttgatgctccaaatccatataggtctgaaaattgtctgtgtgtacaaaatatactgaaattgatgcaagaaaaagaaactggacttaatgtgttcttattggatatgtgtaggaaaagaaatgactacgatgataccattccaatcttggatgcactaaaagtcaccgccaatattgtgtttggatatgccacgtgtcaaggagcagaagcttttgaaatccagcattctggattggcaaatggaatctttatgaaatttttaaaagacagattattagaagataagaaaatcactgtgttactggatgaagttgcagaagatatgggtaagtgtcaccttaccaaaggcaaacaggctctagagattcgaagtagtttatctgagaagagagcacttactgatccaatacagggaacagaatattctgctgaatctcttgtgcggaatctacagtgggccaaggctcatgaacttccagaaagtatgtgtcttaagtttgactgtggtgttcagattcaattaggatttgcagctgagttttccaatgtcatgatcatctatacaagtatagtttacaaaccaccggagataataatgtgtgatgcctacgttactgattttccacttgatctagatattgatccaaaagatgcaaataaaggcacacctgaagaaactggcagctacttggtatcaaaggatcttcccaagcattgcctctataccagactcagttcactgcaaaaattaaaggaacatctagtcttcacagtatgtttatcatatcagtactcaggattggaagatactgtagaggacaagcaggaagtgaatgttgggaaacctctcattgctaaattagacatgcatcgaggtttgggaaggaagacttgctttcaaacttgtcttatgtctaatggtccttaccagagttctgcagccacctcaggaggagcagggcattatcactcattgcaagacccattccatggtgtttaccattcacatcctggtaatccaagtaatgttacaccagcagatagctgtcattgcagccggactccagatgcatttatttcaagtttcgctcaccatgcttcatgtcattttagtagaagtaatgtgccagtagagacaactgatgaaataccatttagtttctctgacaggctcagaatttctgaaaaatgacctccttgtttttgaaagttagcataattttagatgcctgtgaaatagtactgcacttacataaagtgagacattgtgaaaaggcaaatttgtatatgtagagaaagaatagtagtaactgtttcatagcaaacttcaggactttgagatgttgaaattacattatttaattacagacttcctctttctaagattttgtgaattggttgaatagttctatacaaatgaagtatggaggtgtgtatgtttatatgtatataacaaaatattttcattgtgaccactctgaagtaagagcaatgggaatggcat

SEQ ID NO: 151379 - DNA, 9368 bp, Homo sapiens
  Payload ID: 9807
  Gene Symbol: MALT1
  Gene Name: MALT1 paracaspase
  Uniprot ID: Q9UDY8
  ENST ID: ENST00000348428
  CDS Start-End: 259-2733
cgaggctccgtgccccgccccccgggtgccccgcccctttgcgcggctggcgcggccagcaggccaggctcccctcggcaaacctgtctaattggggcggggagcggagcttcctcctctgagggccgtgccgcgctgccagatttgttcttccgcccctgcctccgcggctcggaggcgagcggaaggtgccccggggccgaggcccgtgacggggcgggcgggagccccggcagtccggggtcgccggcgagggccatgtcgctgttgggggacccgctacaggccctgccgccctcggccgcccccacggggccgctgctcgcccctccggccggcgcgaccctcaaccgcctgcgggagccgctgctgcggaggctcagcgagctcctggatcaggcgcccgagggccggggctggaggagactggcggagctggcggggagtcgcgggcgcctccgcctcagttgcctagacctggagcagtgttctcttaaggtactggagcctgaaggaagccccagcctgtgtctgctgaagttaatgggtgaaaaaggttgcacagtcacagaattgagtgatttcctgcaggctatggaacacactgaagttcttcagcttctcagccccccaggaataaagattactgtaaacccagagtcaaaggcagtcttggctggacagtttgtgaaactgtgttgccgggcaactggacatccttttgttcaatatcagtggttcaaaatgaataaagagattccaaatggaaatacatcagagcttatttttaatgcagtgcatgtaaaagatgcaggcttttatgtctgtcgagttaataacaatttcacctttgaattcagccagtggtcacagctggatgtttgcgacatcccagagagcttccagagaagtgttgatggcgtctctgaatccaagttgcaaatctgtgttgaaccaacttcccaaaagctgatgccaggcagcacattggttttacagtgtgttgctgttggaagccctattcctcactaccagtggttcaaaaatgaattaccattaacacatgagaccaaaaagctatacatggtgccttatgtggatttggaacaccaaggaacctactggtgtcatgtatataatgatcgagacagtcaagatagcaagaaggtagaaatcatcataggaagaacagatgaggcagtggagtgcactgaagatgaattaaataatcttggtcatcctgataataaagagcaaacaactgaccagcctttggcgaaggacaaggttgcccttttgataggaaatatgaattaccgggagcaccccaagctcaaagctcctttggtggatgtgtacgaattgactaacttactgagacagctggacttcaaagtggtttcactgttggatcttactgaatatgagatgcgtaatgctgtggatgagtttttactccttttagacaagggagtatatgggttattatattatgcaggacatggttatgaaaattttgggaacagcttcatggtccccgttgatgctccaaatccatataggtctgaaaattgtctgtgtgtacaaaatatactgaaattgatgcaagaaaaagaaactggacttaatgtgttcttattggatatgtgtaggaaaagaaatgactacgatgataccattccaatcttggatgcactaaaagtcaccgccaatattgtgtttggatatgccacgtgtcaaggagcagaagcttttgaaatccagcattctggattggcaaatggaatctttatgaaatttttaaaagacagattattagaagataagaaaatcactgtgttactggatgaagttgcagaagatatgggtaagtgtcaccttaccaaaggcaaacaggctctagagattcgaagtagtttatctgagaagagagcacttactgatccaatacagggaacagaatattctgctgaatctcttgtgcggaatctacagtgggccaaggctcatgaacttccagaaagtatgtgtcttaagtttgactgtggtgttcagattcaattaggatttgcagctgagttttccaatgtcatgatcatctatacaagtatagtttacaaaccaccggagataataatgtgtgatgcctacgttactgattttccacttgatctagatattgatccaaaagatgcaaataaaggcacacctgaagaaactggcagctacttggtatcaaaggatcttcccaagcattgcctctataccagactcagttcactgcaaaaattaaaggaacatctagtcttcacagtatgtttatcatatcagtactcaggattggaagatactgtagaggacaagcaggaagtgaatgttgggaaacctctcattgctaaattagacatgcatcgaggtttgggaaggaagacttgctttcaaacttgtcttatgtctaatggtccttaccagagttctgcagccacctcaggaggagcagggcattatcactcattgcaagacccattccatggtgtttaccattcacatcctggtaatccaagtaatgttacaccagcagatagctgtcattgcagccggactccagatgcatttatttcaagtttcgctcaccatgcttcatgtcattttagtagaagtaatgtgccagtagagacaactgatgaaataccatttagtttctctgacaggctcagaatttctgaaaaatgacctccttgtttttgaaagttagcataattttagatgcctgtgaaatagtactgcacttacataaagtgagacattgtgaaaaggcaaatttgtatatgtagagaaagaatagtagtaactgtttcatagcaaacttcaggactttgagatgttgaaattacattatttaattacagacttcctctttctaagattttgtgaattggttgaatagttctatacaaatgaagtatggaggtgtgtatgtttatatgtatataacaaaatattttcattgtgaccactctgaagtaagagcaatgggaatggcattattgtagaataagtcattgtatttttaacaccagaaagaaccttgccgatcaccaggcataacctaattttatccatggaagaaacacagaaaggcatctaagttagagctggcaccagaactgagacctccagaaatctattccagtattttttccactacacaactgccttcctgacaggttctgagataagtgttatgtttgtagatagagtgaaatatatttatatatatataaatatatacagatacatatctgtgtattatctcaaggaatgtacaaactttagtttttgattataaggacttcactgcaagttttagttaagaggtttgtatataaatctgttatagaacaggctgaaatttcttgttcataagattatgaaaccacatgagaagtgataaaatgtttgttaaagctagatagaggttaagaatcaagatataatggataattttcatagctgcctatcagaatttcccaaatatttagcatcttccttgataatatgtattttcttcttgaatttcactggcctaatgagataatactcttatctttggctctacctaaaagttggttaaaaatgcaattggcattaacaaggaaaaatactgaattagtaattttaaaagtctcacaaagaaaatcccaggcctagatggctgcattgttgaattctgccaaacattaaaattagcactaattttttgcacactgtttctaaaagtaggagaggaaagaacacttcccaacttactctaggtcagtattaccctgatactagactagacatcacaagaaaactataagccaatattccttattaatacaaacacaaaaatcattaacaaaaatattagcaaactgaatccagcaacctataaaaaggattctatatcatgaccaagtggaatttatcccaggaattcaaggttggttcaacatctaaaaatcaaataagctaatatacagtcagttctcattattcacagtaattatgttctacagaatattctcccataaacactgaattaaatatggaacaactgcttttaggagaaagtgtatttgtgtatatgtgtgtatacatatgtttatctcacacacattatgagcttgaattcttaattcatcctagcaaattctaccttattttacagaagtgaaagtgaggtatcagaagtgttaagtgacatgcctgaggcacccccctaacaggtgtcagagctgaaattcaaaccccatccagctggccccggagccagagcttcttgtactacacagaattgcccctgccatttccaccctccagtcatttctctatgagactgaagcaggaaggcagagcatcatcttgttcagcctcagctgggaacatgtgtactgggtgactcaaatttttcacccatttacacatatccacaaatgactgcaaaagtgccacggatatcaatttgagggttataaattttagcaagttggtaaattcacaaatacataaccttgaataatgaggatcaactgtaccatatttaataaagcacaaaacccacacagattgtcttattacagcatttgataaaatccaaaactctttcataaaaacactcaacaaacttaggaataaaaggaatcttcctagatatgataaatataacatctatgaaaagcccacacctaacattatacttcatggtgatagactgaaggctgaatgttttccccttaagattgggaagaaggacaaggatgttcactcggcactacttctattcagcattgtacttgaagttctagccacagcagttaggttaggaattcaaggtttgttcaacatctaaaaatcaaataagctaataaagaaaagaggtttatactgcaaaagaagtgaaactatatgtattcacagttgatacatagttgtatatagaaaatgctaaagaatccataaaaagtaataaatgagttcaacaggttgcaggatacaagatcagttttatttctctactaacagcaaacattctgaaaatgagaataaagaaatcctatatacagtagcatcaagaataaaactccaacacgtttaaagaaattaagatccagataaatggaaagacatccatgttcatggattggaagactgaatattggtaagatggcaatgctgcccaaattagtctacatattcaacaattcctatcaaaatcctagctgtattttttgcagaaattgacaaactggtaaaattggtagggaaacgcaggggacccagaatagccaaaaaaccttggaaaagaacaaagttggaagacgtaccaatttcaaaaagtgctaccaagctacaataagacagtgtaggcatatggatagacatatcgatcagaggaatggaactgaacatccagaaataaacccatacatttctggtcaacttgttttcaacaaggatgccaataccatcaatagagaaggagtggtcttttcaacaaacggtgctgggacaactaactggtagctacgtgcacagcaaaaggatccctaccttcctaccacattacaaattctaactcaaaatggatcatagacctcaatataagagtttaaactcttagaagaaaacagaagtaaatctttgtgatgttgggcttaggaatggtttcttagacataataccaaaagcacaagcaacaaaggcaaacagtagataaatgggacttcatcaaaattaactttagcgccttaaaggacaccattaagaaagtgaagttaaccctcagaatgggagaaaaatttttgaaaaatcatgtatctgataaaaaaacaaacaaacatgcaggtgctcagctgtggttaccaccgagcagcactgtccagtgaacttgctgtgatgatgggatgcttggtatccgcactcccagtgtgatagcctttagcctcatggggttgttgagcagttgaaataatagctagtgtgaggaactgaacataaaattttagttttaggatgggtgtggtggctcacgcctataatctcagcactttgggaggccaatgaaggcggatcacttgagcccaggagttcaagaccagcttgaccaagatggcaaaaccctgtctctattaaaaatacaaaaaaattagctgggcatggtggcacacacctgtaatcccagctactagggaggctgaggcaggagaatcgtacttcccctttatactcttctgtatatttgatttttttttttttaagacagagtcctggctctgtcgcccaggctggagtgcagcgacatagtctcagctcactgcagcatccgtggaggctgaaacaggagaatcgcatgaattttttaaaaaatctaaacatgtaattttaaaacgggcttaagaagaatgataacagttttggtcttcttttttatcaaccatgcttttattttacttgaatctcgtgccaattgctttgtaatattaaagtaggatttacacaagtggaatttagaaaagatgataatctatcaaatctgtcaataccaattagaatgtaataaagaaattaggatagtggaggtttgagcaagtaaaggctcacccaaattcaaagccaatacttgatgctgagaggggatattttctggaaggtaatttttaaaaattaaagtcacaattataaattgtatatttcctaataaaagaaatctcaactcatgggacaatttgaatttaaaacactattgttcctcattcagtgatgaacaagtcaaaacgtttcagaaaagaaagcctttaaagaagaatcctggcacagaaaaggtccatttagacattgccttcttcccccatctctaatgcctcttttcaaatctctgacttgcacatgaagtaacagtgaggtgtcctgtgcagcagtcgcaattttttgacttgtcaaattgaagaaattcaattatgtagccagagcttagatcactgacatgtatactggcataagcttttttttgtttgtttttaattttattagaagtgggatctcattttgttgcccatgctggtctcaaacacctgtcttcaagtgatcctcctgcctcagcagcatcagtttaatatctagataaaatctgatgtatgtaattttacttttaagggtttttttccaaacagacgtcctgacaatgttgtttcctattccttgaacattcacctgacgcttatatactgtcattacttttatctgtcaactgatgtcagctactcaatttacacattacttttgtgcatttcatcctgtttctcagtttgacattgtcattcaaattcagagtttgacactgaaaccctgggcatggtggctcacacctgtaatcccagcacttcgggagactgcggtaagcagatcatttgaacccaggagtttgagactagccttggcaacatggtgaaaccccatctctaccaaaaaaaaaaaaaaaaaaaaagcaaaaacaaaaattaactgggcatagttgcacacacctgtagtcccagctactcaggaggctgaagtgggacgatcgcttgagcccagaaggcagaggttacggtgagtagagattgtgccactgcactccagcctggacgacagggcaagacgctgtctcaaaaataaaatattagtaaagaagagtacaatcagaatatgaaaatgtgtaaatgtgcatattctctttttttctaatttggtagcattaaaaatacttaagcatcaaagtttggctttatgaagaaggagtctgagacacctcaggtttcagcccttactaatagcgtggctcaaagagcgttaacttgcctgtgcttctgtttccttatctgtaaaatggggatgatgctgtaacatcaaagagcttataatactttccagagctggcagtactaaataagaccattcctctaaagtgccagcattttgaaaagcatcaacccatcaaccttgtgctttaaatctggcattcttaaagctatacctgtaggcagtatagagtgtttttttttatttgtttttttgttgttgtcttttgagtctcactctgtctcccaggctgtagtgcagtggcacgtcttggttcgccgcaacctccgcctcccaggttcaagcgattctcgtgcctcagccccccgcatagctggcattacaggcacacaccaccacgcccagctaatttttgtagttttagtagtatctactaaaataaacagggtttcaccatgttggccaggctggtctcaaactcctgacctcaagtgatctgcctgcctcggcctcccaaagtgctgggattacaggcgtgagtcaccatgcccggccggcagtgtatatcttctaaagttgcaatttttgttcactccagaatcacttttcaaaaagcatgcagatttaatgccaccagtttgtgttatgtatctatcccgcaaaacagctctaaaggtgatttactaaaagattaacagcatttatctctggtgggataatttttctttgcttgtttacctgtgtcttgcagattttacacagtgaacaatgactgtataattttaaaatacagatatgcacaattgtgtaatgtaaatatgctcagcttcaatacatttaagaacacatttttaacttttcgtaaggagtcttcagtttaaaagtacagtgtcattacagagtgcttattctgttacaaaattagtaaagctgattctgcctctaaatctgaagtaattcccactttttttcatgcttgagtttagttgataaatagcattttagatactaaaaatgattggatgagtatttctacattaataagttgctaattaggcaccagggtagcagatagaatgcctttctgtgtgctaggtttaaacattttacacacagtcttatttaaaacagccttgcagtttatagatgaactgattgttaggctaaccagaggtgttactataccctccaggataacccagctagtaagggcagagccaggatgattcagacccagaccagagccgggtgttttgtccacagtactgctgctgcttataccgtaacgggaaaagtacacaacagtgtcttaatatttcattcttccatgaaaaacacttttaaaatattgaaacattataggagcagaagtacatctctaaatatacttttaggtcacattgaaaacatttccaaaggatttgacctgaagttaatgttgctacattatgctcaatacagcaggctgttctgctagggaaattgttaatattttaaaaatattttcctaagctttagctttacca

SEQ ID NO: 151380 - DNA, 565 bp, Homo sapiens
  Payload ID: 9807
  Gene Symbol: MALT1
  Gene Name: MALT1 paracaspase
  ENST ID: ENST00000591792
  CDS Start-End: 207-565
agaggacttaaaatgcaaaagaaagggatgtggacactgctctgggagacctaaggaaggctgggaagaagcgcaggcgaggtgatgaatgcagagggtggggtgcaggaattcatgaacattttgcaagttgcctagacctggagcagtgttctcttaaggtactggagcctgaaggaagccccagcctgtgtctgctgaagttaatgggtgaaaaaggttgcacagtcacagaattgagtgatttcctgcaggctatggaacacactgaagttcttcagcttctcagccccccaggaataaagattactgtaaacccagagtcaaaggcagtcttggctggacagtttgtgaaactgtgttgccgggcaactggacatccttttgttcaatatcagtggttcaaaatgaataaagagattccaaatggaaatacatcagagcttatttttaatgcagtgcatgtaaaagatgcaggcttttatgtctgtcgagttaataacaatttcacctttgaattcagccagtggtcacagctggatgtttgcgacatcccagagagctt

SEQ ID NO: 151381 - DNA, 582 bp, Homo sapiens
  Payload ID: 9808
  Gene Symbol: MGAM
  Gene Name: maltase-glucoamylase
  ENST ID: ENST00000497673
  CDS Start-End: 154-582
attgctaagccatccttcagacagagagggagcggctgcaagaggtaatgagcaacatggatagacctggaggctattttttctgcgtgaaatgacccagaaacagaaagtaaaaaactgcatgttctcacttatacacgagagataaacaagatggcaagaaagaagctgaaaaaatttactactttggagattgtgctcagtgttcttctgcttgtgttgtttatcatcagtattgttctaattgtgcttttagccaaagagtcactgaaatcaacagccccagatcctgggacaactggtaccccagatcctgggacaactggtaccccagatcctggaacaactggtaccacacatgctaggacaacgggtcccccagatcctggaacaactggtaccactcctgtttctgctgaatgtccagtggtaaatgaattggaacgaattaattgcatccctgaccagccgccaacaaaggccacatgtgaccaacgtggctgttgctggaatccccagggagctgtaagtgttccctggtgctactattccaagaatcatagctaccatgtagagggcaac

SEQ ID NO: 151382 - DNA, 9172 bp, Homo sapiens
  Payload ID: 9808
  Gene Symbol: MGAM
  Gene Name: maltase-glucoamylase
  ENST ID: ENST00000475668
  CDS Start-End: 55-8316
attgctaagccatccttcagacagagagggagcggctgcaagaggtaatgagagatggcaagaaagaagctgaaaaaatttactactttggagattgtgctcagtgttcttctgcttgtgttgtttatcatcagtattgttctaattgtgcttttagccaaagagtcactgaaatcaacagccccagatcctgggacaactggtaccccagatcctgggacaactggtaccccagatcctggaacaactggtaccacacatgctaggacaacgggtcccccagatcctggaacaactggtaccactcctgtttctgctgaatgtccagtggtaaatgaattggaacgaattaattgcatccctgaccagccgccaacaaaggccacatgtgaccaacgtggctgttgctggaatccccagggagctgtaagtgttccctggtgctactattccaagaatcatagctaccatgtagagggcaaccttgtcaacacaaatgcaggattcacagcccggttgaaaaatctgccttcttcaccagtgtttggaagcaatgttgacaatgttcttctcacagcagaatatcagacatctaatcgtttccactttaagttgactgaccaaaccaataacaggtttgaagtgccccacgaacacgtgcagtccttcagtggaaatgctgctgcttctttgacctaccaagttgaaatctccagacagccatttagcatcaaagtgaccagaagaagcaacaatcgtgttttgtttgactcgagcattgggcccctactgtttgctgaccagttcttgcagctctccactcgactgcctagcactaacgtgtatggcctgggagagcatgtgcaccagcagtatcggcatgatatgaattggaagacctggcccatatttaacagagacacaactcccaatggaaacggaactaatttgtatggtgcgcagacattcttcttgtgccttgaagatgctagtggattgtcctttggggtgtttctgatgaacagcaatgccatggaggttgtccttcagcctgcgccagccatcacttaccgcaccattgggggcattctcgacttctatgtgttcttgggaaacactccagagcaagttgttcaagaatatctagagctcattgggcggccagcccttccctcctactgggcgcttggatttcacctcagtcgttacgaatatggaaccttagacaacatgagggaagtcgtggagagaaatcgcgcagcacagctcccttatgatgttcagcatgctgatattgattatatggatgagagaagggacttcacttatgattcagtggattttaaaggcttccctgaatttgtcaacgagttacacaataatggacagaagcttgtcatcattgtggatccagccatctccaacaactcttcctcaagtaaaccctatggcccatatgacaggggttcagatatgaagatatgggtgaatagttcagatggagtgactccactcattggggaggtctggcctggacaaactgtgtttcctgattataccaatcccaactgtgctgtttggtggacaaaggaatttgagctttttcacaatcaagtagagtttgatggaatctggattgatatgaatgaagtctccaactttgttgatggttcggtctcaggatgttccacaaacaacctaaataatcccccattcactcccagaatcctggatgggtacctgttctgcaagactctctgtatggatgcagtgcagcactggggcaagcagtatgacattcacaatctgtatggctactccatggcggtcgccacagcagaagctgccaagactgtgttccctaataagagaagcttcattctgacccgttctacctttgcgggctctggcaagtttgcagcacattggttaggagacaacactgccacctgggatgacctgagatggtccatccctggcgtgcttgagttcaacctttttggcatcccaatggtgggtcctgacatatgtggctttgctttggacacccctgaggagctctgtaggcggtggatgcagttgggtgcattttatccgttttctagaaatcacaatggccaaggctacaaggaccaggatcctgcctcctttggagctgactccctgctgttgaattcctccaggcactaccttaacatccgctatactctattgccctacctatacaccctcttcttccgtgctcacagccgaggggacacggtggccaggccccttttgcatgagttctacgaggacaacagcacttgggatgtgcaccaacagttcttatgggggcccggcctcctcatcactccagttctggatgaaggtgcagagaaagtgatggcatatgtgcctgatgctgtctggtatgactacgagactgggagccaagtgagatggaggaagcaaaaagtcgagatggaacttcctggagacaaaattggacttcaccttcgaggaggctacatcttccccacacagcagccaaatacaaccactctggccagtcgaaagaaccctcttggtcttatcattgccctagatgagaacaaagaagcaaaaggagaacttttctgggataatggggaaacgaaggatactgtggccaataaagtgtatcttttatgtgagttttctgtcactcaaaaccgcttggaggtgaatatttcacaatcaacctacaaggaccccaataatttagcatttaatgagattaaaattcttgggacggaggaacctagcaatgttacagtgaaacacaatggtgtcccaagtcagacttctcctacagtcacttatgattctaacctgaaggttgccattatcacagatattgatcttctcctgggagaagcatacacagtggaatggagcataaagataagggatgaagaaaaaatagactgttaccctgatgagaatggtgcttctgccgaaaactgcactgcccgtggctgtatctgggaggcatccaattcttctggagtccctttttgctattttgtcaacgacctatactctgtcagtgatgttcagtataattcccatggggccacagctgacatctccttaaagtcttccgtttatgccaatgccttcccctccacacccgtgaacccccttcgcctggatgtcacttaccataagaatgaaatgctgcagttcaagatttatgatcccaacaagaatcggtatgaagttccagtccctctgaacatacccagcatgccatccagcacccctgagggtcaactctatgatgtgctcattaagaagaatccatttgggattgaaattcgccggaagagtacaggcactataatttgggactctcagctccttggctttaccttcagtgacatgtttatccgcatctccacccgccttccctccaagtacctctatggctttggggaaactgagcacaggtcctataggagagacttggagtggcacacttgggggatgttctcccgagaccagcccccagggtacaagaagaattcctatggtgtccacccctactacatggggctggaggaggacggcagtgcccatggagtgctcctgctgaacagcaatgccatggatgtgacgttccagcccctgcctgccttgacataccgcaccacagggggagttctggacttttatgtgttcttggggccgactccagagcttgtcacccagcagtacactgagttgattggccggcctgtgatggtaccttactggtctttggggttccagctgtgtcgctatggctaccagaatgactctgagatcgccagcttgtatgatgagatggtggctgcccagatcccttatgatgtgcagtactcagacatcgactacatggagcggcagctggacttcaccctcagccccaagtttgctgggtttccagctctgatcaatcgcatgaaggctgatgggatgcgggtcatcctcattctggatccagccatttctggcaatgagacacagccttatcctgccttcactcggggcgtggaggatgacgtcttcatcaaatacccaaatgatggagacattgtctggggaaaggtctggcctgattttcctgatgttgttgtgaatgggtctctagactgggacagccaagtggagctatatcgagcttatgtggccttcccagactttttccgtaattcaactgccaagtggtggaagagggaaatagaagaactatacaacaatccacagaatccagagaggagcttgaagtttgatggcatgtggattgatatgaatgaaccatcaagcttcgtgaatggggcagtttctccaggctgcagggacgcctctctgaaccaccctccctacatgccacatttggagtccagggacaggggcctgagcagcaagaccctttgtatggagagtcagcagatcctcccagacggctccctggtgcagcactacaacgtgcacaacctgtatgggtggtcccagaccagacccacatacgaagccgtgcaggaggtgacgggacagcgaggggtcgtcatcacccgctccacatttccctcttctggccgctgggcaggacattggctgggagacaacacggccgcatgggatcagctgaagaagtctatcattggcatgatggagttcagcctctttggcatatcctatacgggagcagatatctgtgggttctttcaagacgctgagtacgagatgtgtgttcgctggatgcagctgggggccttttaccccttctcaagaaaccacaataccattgggaccaggagacaagaccctgtgtcctgggatgctgcttttgtgaatatttccagaaatgtcctgcagaccagatacaccctgttgccatatctgtataccttgatgcaaaaggcccacacggagggcgtcactgttgtgcggcctctgctccatgagtttgtgtcagaccaggtgacatgggacatagacagtcagttcctgctgggcccagccttcctggtcagccctgtcctggagcgcaatgccagaaatgtcactgcatatttccctagagcccgttggtacgattactacacgggtgtggatattaatgcaagaggagagtggaagaccttgccagcccctcttgaccacattaatcttcatgtccgtgggggctacatcctgccctggcaagagcctgcactgaacacccacttaagtcgaaagaaccctcttggtcttattattgccctagatgaaaacaaagaagcaaaaggagaacttttctgggatgatgggcaaacaaaggatactgtggccaagaaagtatatcttttatgtgagttttctgtcactcaaaaccacttggaggtgactatttcacaatcaacctacaaggaccccaataatttagcattcaatgagattaaaattcttgggatggaggaacctagcaatgttacggtgaaacacaatggtgtcccaagtcagacttctcctacagtcacttatgattctaacctgaaggtcgccattatcacagacatcaatcttttcctgggagaagcatacacagtggagtggagcataaagataagggatgaagaaaaaatagactgttaccctgatgagaatggtgattctgcagaaaactgcactgcccgtggctgtatctgggaggcatccaattcttctggagtccctttttgctattttgtcaacgacctatactctgtcagtgatgttcagtataactcccatggggccacagctgacatctccttaaagtcttctgttcatgccaatgccttcccttccacacccgtgaacccccttcgcctggatgtcacttaccataagaatgaaatgctacagttcaagatttatgatcccaacaacaatcggtatgaagttccagtccctctgaacatacccagcgtgccatccagcacccctgagggtcaactctatgatgtcctcattaagaagaatccatttgggattgaaattcgccggaagagtacaggcactataatttgggactctcagctccttggcttcaccttcaatgacatgtttatccgcatctccacccgccttccctccaagtacctctatggctttggggagactgagcacacgtcctacaggagagacttggagtggcacacttgggggatgttctcccgagaccagcccccagggtacaagaagaattcctatggtgtccacccctactacatggggctagaggaggatggcagtgcccatggagtgctcctgctgaacagcaatgccatggatgtgacgttccagcccctgcctgccttgacataccgtaccacagggggagttctggacttttatgtgttcttggggccaactccagagcttgtcacccagcagtacactgagttgattggccggcctgtgatggtaccttactggtctttggggttccagctgtgtcgctatggctaccagaacgactctgagatctccagcttgtatgatgagatggtggctgcccagatcccttatgacgtgcagtactcagacatcgactacatggagcggcagctggacttcaccctcagccccaagtttgccgggtttccagctctgatcaatcgcatgaaggctgatgggatgcgggtcatcctcattctggatccagccatttctggcaatgagacacagccctatcctgccttcactcggggcgtggaggatgacgtcttcatcaagtacccaaatgatggagacattgtctggggaaaggtctggcctgattttcctgatgttgttgtgaatgggtctctagactgggacagtcaagtggagctatatcgagcttatgtggccttcccagactttttccgtaattcaactgccaagtggtggaagagggaaatagaagaactatacaacaatccacagaatccagagaggagcttgaagtttgatggcatgtggattgatatgaatgaaccatcaagcttcgtgaatggggcagtttctccaggctgcagggatgcctctctgaaccaccctccctacatgccgtatttggagtccagggacaggggcctgagcagcaagaccctgtgcatggagagtcagcagatcctcccagacggctccccggtgcagcactacaatgtgcacaacctgtacgggtggtcccagaccagacccacatacgaagccgtgcaggaggtgacaggacagcgaggggtcgtcatcacccgctccacatttccctcttctggccgctgggcaggacattggctgggagacaacacagccgcgtgggatcagctgaagaagtctatcattggcatgatggagttcagcctcttcggcatatcctatacgggagcagatatctgtgggttctttcaagatgctgaatatgagatgtgtgttcgctggatgcagctgggggccttttaccccttctcaagaaaccacaacaccattgggaccaggagacaagaccctgtgtcctgggatgttgcttttgtgaatatttccagaactgtcctgcagaccagatacaccctgttgccatatctgtataccttgatgcataaggcccacacggagggcgtcactgttgtgcggcctctgctccatgagtttgtgtcagaccaggtgacatgggacatagacagtcagttcctgctgggcccagccttcctggtcagccctgtcctggagcgtaatgccagaaatgtcactgcatatttccctagagcccgctggtatgattactacacgggtgtggatattaatgcaagaggagagtggaagaccttgccagcccctcttgaccacattaatcttcatgtccgtgggggctacatcctgccctggcaagagcctgcactgaacacccacttaagccgccagaaattcatgggcttcaaaattgccttggatgatgaaggaactgctgggggctggctcttctgggatgatgggcaaagcattgatacctatgggaaaggactctattacttggccagcttttctgccagccagaatacgatgcaaagccatataattttcaacaattacatcactggtacaaatcctttgaaactgggctacattgaaatctggggagtgggcagtgtccccgttaccagtgtcagcatctctgtgagtggcatggtcataacaccctccttcaacaatgaccccacgacacaggtattaagcatcgatgtgactgacagaaacatcagcctacataattttacttcattgacgtggataagcactctgtgaatttttacagcaagattctaactaactatgaatgactttgaaactacttatacttcatactcataaaaattattgtgtgttgctaatttgttcatacccactattggtgaaatatttctgttaattttgttatatgttttttgtgtgaaccctaaaggttaaaccttagccctgtgggataggcagttagggaggtgtggaaaatctatgcattaccttaatgtctctgtgtggttagtatggtagtgactgttcatcatatgacatttactgaagatgaactgggtccatgatgaagtgtgtgtatgtccacgtttgtaatcatagaatggaccccattcttttgttaaatacacaagagaaagctttctgtgacagttccaggtcttgaagctaatcagcatctcaagaaagtatccagaaagaacatctgctagttggttataggcggtgggaggaataatatacctaattggttataggtggggggagcatgataagcaaagaaaaggcaaacacaaggaaagatcagatgaaacagaagatgatagtaaaagtgatcctaagtaagaacataatgtaaaattgtcagcagcctcatggggaggaaaaaggaagagtcaactcacttgaagaagagggtcttgagaaatccttagcataaagggctactggtgagattgagatctgagcaggcaaagctcaaaagagagtttggaggttaaaaataatttatttttgcagtagtgtgctttgaaatgtgtaaatcttatttctaatgtatacaaccacatttcacataaaaatatgcaatttatatgccagataaaaataaaacaagtgaatttgcaagtga

SEQ ID NO: 151383 - DNA, 790 bp, Homo sapiens
  Payload ID: 9808
  Gene Symbol: MGAM
  Gene Name: maltase-glucoamylase
  ENST ID: ENST00000465654
  CDS Start-End: 236-790
gggttaacactgggaaataaaaacttcccacccacttcttgcaggaggctgtgtggttaaatcctgttacattatacttcagctcttaccatggccttgtcattgggttgaactggagctgtattttagattttgccaacaataacaagcgctgccaagtacttcagctgagatcacccaaataatactctactagcaaaagctttgcgtggcgttctaaccatcagaaactgagatggcaagaaagaagctgaaaaaatttactactttggagattgtgctcagtgttcttctgcttgtgttgtttatcatcagtattgttctaattgtgcttttagccaaagagtcactgaaatcaacagccccagatcctgggacaactggtaccccagatcctgggacaactggtaccccagatcctggaacaactggtaccacacatgctaggacaacgggtcccccagatcctggaacaactggtaccactcctgtttctgctgaatgtccagtggtaaatgaattggaacgaattaattgcatccctgaccagccgccaacaaaggccacatgtgaccaacgtggctgttgctggaatccccagggagctgtaagtgttccctggtgctactattccaagaatcatagctaccatgtagagggcaaccttgtcaacacaaatgcaggattcacagcccggttgaaaaatctgccttcttcaccagtgtttggaagcaatgttgacaatgttcttctcacagcagaatatcagacatctaatcgtttccacttt

SEQ ID NO: 151384 - DNA, 6525 bp, Homo sapiens
  Payload ID: 9808
  Gene Symbol: MGAM
  Gene Name: maltase-glucoamylase
  Uniprot ID: O43451
  ENST ID: ENST00000549489
  CDS Start-End: 96-5669
agatctttggttgctttggtggactgtgctcctctgcttttattgctaagccatccttcagacagagagggagcggctgcaagaggtaatgagagatggcaagaaagaagctgaaaaaatttactactttggagattgtgctcagtgttcttctgcttgtgttgtttatcatcagtattgttctaattgtgcttttagccaaagagtcactgaaatcaacagccccagatcctgggacaactggtaccccagatcctgggacaactggtaccccagatcctggaacaactggtaccacacatgctaggacaacgggtcccccagatcctggaacaactggtaccactcctgtttctgctgaatgtccagtggtaaatgaattggaacgaattaattgcatccctgaccagccgccaacaaaggccacatgtgaccaacgtggctgttgctggaatccccagggagctgtaagtgttccctggtgctactattccaagaatcatagctaccatgtagagggcaaccttgtcaacacaaatgcaggattcacagcccggttgaaaaatctgccttcttcaccagtgtttggaagcaatgttgacaatgttcttctcacagcagaatatcagacatctaatcgtttccactttaagttgactgaccaaaccaataacaggtttgaagtgccccacgaacacgtgcagtccttcagtggaaatgctgctgcttctttgacctaccaagttgaaatctccagacagccatttagcatcaaagtgaccagaagaagcaacaatcgtgttttgtttgactcgagcattgggcccctactgtttgctgaccagttcttgcagctctccactcgactgcctagcactaacgtgtatggcctgggagagcatgtgcaccagcagtatcggcatgatatgaattggaagacctggcccatatttaacagagacacaactcccaatggaaacggaactaatttgtatggtgcgcagacattcttcttgtgccttgaagatgctagtggattgtcctttggggtgtttctgatgaacagcaatgccatggaggttgtccttcagcctgcgccagccatcacttaccgcaccattgggggcattctcgacttctatgtgttcttgggaaacactccagagcaagttgttcaagaatatctagagctcattgggcggccagcccttccctcctactgggcgcttggatttcacctcagtcgttacgaatatggaaccttagacaacatgagggaagtcgtggagagaaatcgcgcagcacagctcccttatgatgttcagcatgctgatattgattatatggatgagagaagggacttcacttatgattcagtggattttaaaggcttccctgaatttgtcaacgagttacacaataatggacagaagcttgtcatcattgtggatccagccatctccaacaactcttcctcaagtaaaccctatggcccatatgacaggggttcagatatgaagatatgggtgaatagttcagatggagtgactccactcattggggaggtctggcctggacaaactgtgtttcctgattataccaatcccaactgtgctgtttggtggacaaaggaatttgagctttttcacaatcaagtagagtttgatggaatctggattgatatgaatgaagtctccaactttgttgatggttcggtctcaggatgttccacaaacaacctaaataatcccccattcactcccagaatcctggatgggtacctgttctgcaagactctctgtatggatgcagtgcagcactggggcaagcagtatgacattcacaatctgtatggctactccatggcggtcgccacagcagaagctgccaagactgtgttccctaataagagaagcttcattctgacccgttctacctttgcgggctctggcaagtttgcagcacattggttaggagacaacactgccacctgggatgacctgagatggtccatccctggcgtgcttgagttcaacctttttggcatcccaatggtgggtcctgacatatgtggctttgctttggacacccctgaggagctctgtaggcggtggatgcagttgggtgcattttatccgttttctagaaatcacaatggccaaggctacaaggaccaggatcctgcctcctttggagctgactccctgctgttgaattcctccaggcactaccttaacatccgctatactctattgccctacctatacaccctcttcttccgtgctcacagccgaggggacacggtggccaggccccttttgcatgagttctacgaggacaacagcacttgggatgtgcaccaacagttcttatgggggcccggcctcctcatcactccagttctggatgaaggtgcagagaaagtgatggcatatgtgcctgatgctgtctggtatgactacgagactgggagccaagtgagatggaggaagcaaaaagtcgagatggaacttcctggagacaaaattggacttcaccttcgaggaggctacatcttccccacacagcagccaaatacaaccactctggccagtcgaaagaaccctcttggtcttatcattgccctagatgagaacaaagaagcaaaaggagaacttttctgggataatggggaaacgaaggatactgtggccaataaagtgtatcttttatgtgagttttctgtcactcaaaaccgcttggaggtgaatatttcacaatcaacctacaaggaccccaataatttagcatttaatgagattaaaattcttgggacggaggaacctagcaatgttacagtgaaacacaatggtgtcccaagtcagacttctcctacagtcacttatgattctaacctgaaggttgccattatcacagatattgatcttctcctgggagaagcatacacagtggaatggagcataaagataagggatgaagaaaaaatagactgttaccctgatgagaatggtgcttctgccgaaaactgcactgcccgtggctgtatctgggaggcatccaattcttctggagtccctttttgctattttgtcaacgacctatactctgtcagtgatgttcagtataattcccatggggccacagctgacatctccttaaagtcttccgtttatgccaatgccttcccctccacacccgtgaacccccttcgcctggatgtcacttaccataagaatgaaatgctgcagttcaagatttatgatcccaacaagaatcggtatgaagttccagtccctctgaacatacccagcatgccatccagcacccctgagggtcaactctatgatgtgctcattaagaagaatccatttgggattgaaattcgccggaagagtacaggcactataatttgggactctcagctccttggctttaccttcagtgacatgtttatccgcatctccacccgccttccctccaagtacctctatggctttggggaaactgagcacaggtcctataggagagacttggagtggcacacttgggggatgttctcccgagaccagcccccagggtacaagaagaattcctatggtgtccacccctactacatggggctggaggaggacggcagtgcccatggagtgctcctgctgaacagcaatgccatggatgtgacgttccagcccctgcctgccttgacataccgcaccacagggggagttctggacttttatgtgttcttggggccgactccagagcttgtcacccagcagtacactgagttgattggccggcctgtgatggtaccttactggtctttggggttccagctgtgtcgctatggctaccagaatgactctgagatcgccagcttgtatgatgagatggtggctgcccagatcccttatgatgtgcagtactcagacatcgactacatggagcggcagctggacttcaccctcagccccaagtttgctgggtttccagctctgatcaatcgcatgaaggctgatgggatgcgggtcatcctcattctggatccagccatttctggcaatgagacacagccttatcctgccttcactcggggcgtggaggatgacgtcttcatcaaatacccaaatgatggagacattgtctggggaaaggtctggcctgattttcctgatgttgttgtgaatgggtctctagactgggacagccaagtggagctatatcgagcttatgtggccttcccagactttttccgtaattcaactgccaagtggtggaagagggaaatagaagaactatacaacaatccacagaatccagagaggagcttgaagtttgatggcatgtggattgatatgaatgaaccatcaagcttcgtgaatggggcagtttctccaggctgcagggacgcctctctgaaccaccctccctacatgccacatttggagtccagggacaggggcctgagcagcaagaccctttgtatggagagtcagcagatcctcccagacggctccctggtgcagcactacaacgtgcacaacctgtatgggtggtcccagaccagacccacatacgaagccgtgcaggaggtgacgggacagcgaggggtcgtcatcacccgctccacatttccctcttctggccgctgggcaggacattggctgggagacaacacggccgcatgggatcagctgaagaagtctatcattggcatgatggagttcagcctcttcggcatatcctatacgggagcagatatctgtgggttctttcaagatgctgaatatgagatgtgtgttcgctggatgcagctgggggccttttaccccttctcaagaaaccacaacaccattgggaccaggagacaagaccctgtgtcctgggatgttgcttttgtgaatatttccagaactgtcctgcagaccagatacaccctgttgccatatctgtataccttgatgcataaggcccacacggagggcgtcactgttgtgcggcctctgctccatgagtttgtgtcagaccaggtgacatgggacatagacagtcagttcctgctgggcccagccttcctggtcagccctgtcctggagcgtaatgccagaaatgtcactgcatatttccctagagcccgctggtatgattactacacgggtgtggatattaatgcaagaggagagtggaagaccttgccagcccctcttgaccacattaatcttcatgtccgtgggggctacatcctgccctggcaagagcctgcactgaacacccacttaagccgccagaaattcatgggcttcaaaattgccttggatgatgaaggaactgctgggggctggctcttctgggatgatgggcaaagcattgatacctatgggaaaggactctattacttggccagcttttctgccagccagaatacgatgcaaagccatataattttcaacaattacatcactggtacaaatcctttgaaactgggctacattgaaatctggggagtgggcagtgtccccgttaccagtgtcagcatctctgtgagtggcatggtcataacaccctccttcaacaatgaccccacgacacaggtattaagcatcgatgtgactgacagaaacatcagcctacataattttacttcattgacgtggataagcactctgtgaatttttacagcaagattctaactaactatgaatgactttgaaactacttatacttcatactcataaaaattattgtgtgttgctaatttgttcatacccactattggtgaaatatttctgttaattttgttatatgttttttgtgtgaaccctaaaggttaaaccttagccctgtgggataggcagttagggaggtgtggaaaatctatgcattaccttaatgtctctgtgtggttagtatggtagtgactgttcatcatatgacatttactgaagatgaactgggtccatgatgaagtgtgtgtatgtccacgtttgtaatcatagaatggaccccattcttttgttaaatacacaagagaaagctttctgtgacagttccaggtcttgaagctaatcagcatctcaagaaagtatccagaaagaacatctgctagttggttataggcggtgggaggaataatatacctaattggttataggtggggggagcatgataagcaaagaaaaggcaaacacaaggaaagatcagatgaaacagaagatgatagtaaaagtgatcctaagtaagaacataatgtaaaattgtcagcagcctcatggggaggaaaaaggaagagtcaactcacttgaagaagagggtcttgagaaatccttagcataaagggctactggtgagattgagatctgagcaggcaaagctcaaaagagagtttggaggttaaaaataatttatttttgcagtagtgtgctttgaaatgtgtaaatcttatttctaatgtatacaaccacatttcacataaaaatatgcaatttatatgccagataaaaataaaacaagtgaatttgcaagtga

SEQ ID NO: 151385 - DNA, 6483 bp, Homo sapiens
  Payload ID: 9808
  Gene Symbol: MGAM
  Gene Name: maltase-glucoamylase
  Uniprot ID: O43451
  ENST ID: ENST00000620571
  CDS Start-End: 55-5628
attgctaagccatccttcagacagagagggagcggctgcaagaggtaatgagagatggcaagaaagaagctgaaaaaatttactactttggagattgtgctcagtgttcttctgcttgtgttgtttatcatcagtattgttctaattgtgcttttagccaaagagtcactgaaatcaacagccccagatcctgggacaactggtaccccagatcctgggacaactggtaccccagatcctggaacaactggtaccacacatgctaggacaacgggtcccccagatcctggaacaactggtaccactcctgtttctgctgaatgtccagtggtaaatgaattggaacgaattaattgcatccctgaccagccgccaacaaaggccacatgtgaccaacgtggctgttgctggaatccccagggagctgtaagtgttccctggtgctactattccaagaatcatagctaccatgtagagggcaaccttgtcaacacaaatgcaggattcacagcccggttgaaaaatctgccttcttcaccagtgtttggaagcaatgttgacaatgttcttctcacagcagaatatcagacatctaatcgtttccactttaagttgactgaccaaaccaataacaggtttgaagtgccccacgaacacgtgcagtccttcagtggaaatgctgctgcttctttgacctaccaagttgaaatctccagacagccatttagcatcaaagtgaccagaagaagcaacaatcgtgttttgtttgactcgagcattgggcccctactgtttgctgaccagttcttgcagctctccactcgactgcctagcactaacgtgtatggcctgggagagcatgtgcaccagcagtatcggcatgatatgaattggaagacctggcccatatttaacagagacacaactcccaatggaaacggaactaatttgtatggtgcgcagacattcttcttgtgccttgaagatgctagtggattgtcctttggggtgtttctgatgaacagcaatgccatggaggttgtccttcagcctgcgccagccatcacttaccgcaccattgggggcattctcgacttctatgtgttcttgggaaacactccagagcaagttgttcaagaatatctagagctcattgggcggccagcccttccctcctactgggcgcttggatttcacctcagtcgttacgaatatggaaccttagacaacatgagggaagtcgtggagagaaatcgcgcagcacagctcccttatgatgttcagcatgctgatattgattatatggatgagagaagggacttcacttatgattcagtggattttaaaggcttccctgaatttgtcaacgagttacacaataatggacagaagcttgtcatcattgtggatccagccatctccaacaactcttcctcaagtaaaccctatggcccatatgacaggggttcagatatgaagatatgggtgaatagttcagatggagtgactccactcattggggaggtctggcctggacaaactgtgtttcctgattataccaatcccaactgtgctgtttggtggacaaaggaatttgagctttttcacaatcaagtagagtttgatggaatctggattgatatgaatgaagtctccaactttgttgatggttcggtctcaggatgttccacaaacaacctaaataatcccccattcactcccagaatcctggatgggtacctgttctgcaagactctctgtatggatgcagtgcagcactggggcaagcagtatgacattcacaatctgtatggctactccatggcggtcgccacagcagaagctgccaagactgtgttccctaataagagaagcttcattctgacccgttctacctttgcgggctctggcaagtttgcagcacattggttaggagacaacactgccacctgggatgacctgagatggtccatccctggcgtgcttgagttcaacctttttggcatcccaatggtgggtcctgacatatgtggctttgctttggacacccctgaggagctctgtaggcggtggatgcagttgggtgcattttatccgttttctagaaatcacaatggccaaggctacaaggaccaggatcctgcctcctttggagctgactccctgctgttgaattcctccaggcactaccttaacatccgctatactctattgccctacctatacaccctcttcttccgtgctcacagccgaggggacacggtggccaggccccttttgcatgagttctacgaggacaacagcacttgggatgtgcaccaacagttcttatgggggcccggcctcctcatcactccagttctggatgaaggtgcagagaaagtgatggcatatgtgcctgatgctgtctggtatgactacgagactgggagccaagtgagatggaggaagcaaaaagtcgagatggaacttcctggagacaaaattggacttcaccttcgaggaggctacatcttccccacacagcagccaaatacaaccactctggccagtcgaaagaaccctcttggtcttatcattgccctagatgagaacaaagaagcaaaaggagaacttttctgggataatggggaaacgaaggatactgtggccaataaagtgtatcttttatgtgagttttctgtcactcaaaaccgcttggaggtgaatatttcacaatcaacctacaaggaccccaataatttagcatttaatgagattaaaattcttgggacggaggaacctagcaatgttacagtgaaacacaatggtgtcccaagtcagacttctcctacagtcacttatgattctaacctgaaggttgccattatcacagatattgatcttctcctgggagaagcatacacagtggaatggagcataaagataagggatgaagaaaaaatagactgttaccctgatgagaatggtgcttctgccgaaaactgcactgcccgtggctgtatctgggaggcatccaattcttctggagtccctttttgctattttgtcaacgacctatactctgtcagtgatgttcagtataattcccatggggccacagctgacatctccttaaagtcttccgtttatgccaatgccttcccctccacacccgtgaacccccttcgcctggatgtcacttaccataagaatgaaatgctgcagttcaagatttatgatcccaacaagaatcggtatgaagttccagtccctctgaacatacccagcatgccatccagcacccctgagggtcaactctatgatgtgctcattaagaagaatccatttgggattgaaattcgccggaagagtacaggcactataatttgggactctcagctccttggctttaccttcagtgacatgtttatccgcatctccacccgccttccctccaagtacctctatggctttggggaaactgagcacaggtcctataggagagacttggagtggcacacttgggggatgttctcccgagaccagcccccagggtacaagaagaattcctatggtgtccacccctactacatggggctggaggaggacggcagtgcccatggagtgctcctgctgaacagcaatgccatggatgtgacgttccagcccctgcctgccttgacataccgcaccacagggggagttctggacttttatgtgttcttggggccgactccagagcttgtcacccagcagtacactgagttgattggccggcctgtgatggtaccttactggtctttggggttccagctgtgtcgctatggctaccagaatgactctgagatcgccagcttgtatgatgagatggtggctgcccagatcccttatgatgtgcagtactcagacatcgactacatggagcggcagctggacttcaccctcagccccaagtttgctgggtttccagctctgatcaatcgcatgaaggctgatgggatgcgggtcatcctcattctggatccagccatttctggcaatgagacacagccttatcctgccttcactcggggcgtggaggatgacgtcttcatcaaatacccaaatgatggagacattgtctggggaaaggtctggcctgattttcctgatgttgttgtgaatgggtctctagactgggacagccaagtggagctatatcgagcttatgtggccttcccagactttttccgtaattcaactgccaagtggtggaagagggaaatagaagaactatacaacaatccacagaatccagagaggagcttgaagtttgatggcatgtggattgatatgaatgaaccatcaagcttcgtgaatggggcagtttctccaggctgcagggacgcctctctgaaccaccctccctacatgccacatttggagtccagggacaggggcctgagcagcaagaccctttgtatggagagtcagcagatcctcccagacggctccctggtgcagcactacaacgtgcacaacctgtatgggtggtcccagaccagacccacatacgaagccgtgcaggaggtgacgggacagcgaggggtcgtcatcacccgctccacatttccctcttctggccgctgggcaggacattggctgggagacaacacggccgcatgggatcagctgaagaagtctatcattggcatgatggagttcagcctctttggcatatcctatacgggagcagatatctgtgggttctttcaagacgctgagtacgagatgtgtgttcgctggatgcagctgggggccttttaccccttctcaagaaaccacaataccattgggaccaggagacaagaccctgtgtcctgggatgttgcttttgtgaatatttccagaactgtcctgcagaccagatacaccctgttgccatatctgtataccttgatgcataaggcccacacggagggcgtcactgttgtgcggcctctgctccatgagtttgtgtcagaccaggtgacatgggacatagacagtcagttcctgctgggcccagccttcctggtcagccctgtcctggagcgtaatgccagaaatgtcactgcatatttccctagagcccgctggtatgattactacacgggtgtggatattaatgcaagaggagagtggaagaccttgccagcccctcttgaccacattaatcttcatgtccgtgggggctacatcctgccctggcaagagcctgcactgaacacccacttaagccgccagaaattcatgggcttcaaaattgccttggatgatgaaggaactgctgggggctggctcttctgggatgatgggcaaagcattgatacctatgggaaaggactctattacttggccagcttttctgccagccagaatacgatgcaaagccatataattttcaacaattacatcactggtacaaatcctttgaaactgggctacattgaaatctggggagtgggcagtgtccccgttaccagtgtcagcatctctgtgagtggcatggtcataacaccctccttcaacaatgaccccacgacacaggtattaagcatcgatgtgactgacagaaacatcagcctacataattttacttcattgacgtggataagcactctgtgaatttttacagcaagattctaactaactatgaatgactttgaaactacttatacttcatactcataaaaattattgtgtgttgctaatttgttcatacccactattggtgaaatatttctgttaattttgttatatgttttttgtgtgaaccctaaaggttaaaccttagccctgtgggataggcagttagggaggtgtggaaaatctatgcattaccttaatgtctctgtgtggttagtatggtagtgactgttcatcatatgacatttactgaagatgaactgggtccatgatgaagtgtgtgtatgtccacgtttgtaatcatagaatggaccccattcttttgttaaatacacaagagaaagctttctgtgacagttccaggtcttgaagctaatcagcatctcaagaaagtatccagaaagaacatctgctagttggttataggcggtgggaggaataatatacctaattggttataggtggggggagcatgataagcaaagaaaaggcaaacacaaggaaagatcagatgaaacagaagatgatagtaaaagtgatcctaagtaagaacataatgtaaaattgtcagcagcctcatggggaggaaaaaggaagagtcaactcacttgaagaagagggtcttgagaaatccttagcataaagggctactggtgagattgagatctgagcaggcaaagctcaaaagagagtttggaggttaaaaataatttatttttgcagtagtgtgctttgaaatgtgtaaatcttatttctaatgtatacaaccacatttcacataaaaatatgcaatttatatgccagataaaaataaaacaagtgaatttgcaagtg

SEQ ID NO: 151386 - DNA, 6894 bp, Homo sapiens
  Payload ID: 9808
  Gene Symbol: MGAM
  Gene Name: maltase-glucoamylase
  ENST ID: ENST00000632195
  CDS Start-End: 1-6038
ttttcaggttctacgaggacaacagcacttgggatgtgcaccaacagttcttatgggggcccggcctcctcatcactccagttctggatgaaggtgcagagaaagtgatggcatatgtgcctgatgctgtctggtatgactacgagactgggagccaagtgagatggaggaagcaaaaagtcgagatggaacttcctggagacaaaattggacttcaccttcgaggaggctacatcttccccacacagcagccaaatacaaccactctggccagtcgaaagaaccctcttggtcttatcattgccctagatgagaacaaagaagcaaaaggagaacttttctgggataatggggaaacgaaggatactgtggccaataaagtgtatcttttatgtgagttttctgtcactcaaaaccgcttggaggtgaatatttcacaatcaacctacaaggaccccaataatttagcatttaatgagattaaaattcttgggacggaggaacctagcaatgttacagtgaaacacaatggtgtcccaagtcagacttctcctacagtcacttatgattctaacctgaaggttgccattatcacagatattgatcttctcctgggagaagcatacacagtggaatggagcataaagataagggatgaagaaaaaatagactgttaccctgatgagaatggtgcttctgccgaaaactgcactgcccgtggctgtatctgggaggcatccaattcttctggagtccctttttgctattttgtcaacgacctatactctgtcagtgatgttcagtataattcccatggggccacagctgacatctccttaaagtcttccgtttatgccaatgccttcccctccacacccgtgaacccccttcgcctggatgtcacttaccataagaatgaaatgctgcagttcaagatttatgatcccaacaagaatcggtatgaagttccagtccctctgaacatacccagcatgccatccagcacccctgagggtcaactctatgatgtgctcattaagaagaatccatttgggattgaaattcgccggaagagtacaggcactataatttgggactctcagctccttggctttaccttcagtgacatgtttatccgcatctccacccgccttccctccaagtacctctatggctttggggaaactgagcacaggtcctataggagagacttggagtggcacacttgggggatgttctcccgagaccagcccccagggtacaagaagaattcctatggtgtccacccctactacatggggctggaggaggacggcagtgcccatggagtgctcctgctgaacagcaatgccatggatgtgacgttccagcccctgcctgccttgacataccgcaccacagggggagttctggacttttatgtgttcttggggccgactccagagcttgtcacccagcagtacactgagttgattggccggcctgtgatggtaccttactggtctttggggttccagctgtgtcgctatggctaccagaatgactctgagatcgccagcttgtatgatgagatggtggctgcccagatcccttatgatgtgcagtactcagacatcgactacatggagcggcagctggacttcaccctcagccccaagtttgctgggtttccagctctgatcaatcgcatgaaggctgatgggatgcgggtcatcctcattctggatccagccatttctggcaatgagacacagccttatcctgccttcactcggggcgtggaggatgacgtcttcatcaaatacccaaatgatggagacattgtctggggaaaggtctggcctgattttcctgatgttgttgtgaatgggtctctagactgggacagccaagtggagctatatcgagcttatgtggccttcccagactttttccgtaattcaactgccaagtggtggaagagggaaatagaagaactatacaacaatccacagaatccagagaggagcttgaagtttgatggcatgtggattgatatgaatgaaccatcaagcttcgtgaatggggcagtttctccaggctgcagggacgcctctctgaaccaccctccctacatgccacatttggagtccagggacaggggcctgagcagcaagaccctttgtatggagagtcagcagatcctcccagacggctccctggtgcagcactacaacgtgcacaacctgtatgggtggtcccagaccagacccacatacgaagccgtgcaggaggtgacgggacagcgaggggtcgtcatcacccgctccacatttccctcttctggccgctgggcaggacattggctgggagacaacacggccgcatgggatcagctgaagaagtctatcattggcatgatggagttcagcctctttggcatatcctatacgggagcagatatctgtgggttctttcaagacgctgagtacgagatgtgtgttcgctggatgcagctgggggccttttaccccttctcaagaaaccacaataccattgggaccaggagacaagaccctgtgtcctgggatgctgcttttgtgaatatttccagaaatgtcctgcagaccagatacaccctgttgccatatctgtataccttgatgcaaaaggcccacacggagggcgtcactgttgtgcggcctctgctccatgagtttgtgtcagaccaggtgacatgggacatagacagtcagttcctgctgggcccagccttcctggtcagccctgtcctggagcgcaatgccagaaatgtcactgcatatttccctagagcccgttggtacgattactacacgggtgtggatattaatgcaagaggagagtggaagaccttgccagcccctcttgaccacattaatcttcatgtccgtgggggctacatcctgccctggcaagagcctgcactgaacacccacttaagtcgaaagaaccctcttggtcttattattgccctagatgaaaacaaagaagcaaaaggagaacttttctgggatgatgggcaaacaaaggatactgtggccaagaaagtatatcttttatgtgagttttctgtcactcaaaaccacttggaggtgactatttcacaatcaacctacaaggaccccaataatttagcattcaatgagattaaaattcttgggatggaggaacctagcaatgttacggtgaaacacaatggtgtcccaagtcagacttctcctacagtcacttatgattctaacctgaaggtcgccattatcacagacatcaatcttttcctgggagaagcatacacagtggagtggagcataaagataagggatgaagaaaaaatagactgttaccctgatgagaatggtgattctgcagaaaactgcactgcccgtggctgtatctgggaggcatccaattcttctggagtccctttttgctattttgtcaacgacctatactctgtcagtgatgttcagtataactcccatggggccacagctgacatctccttaaagtcttctgttcatgccaatgccttcccttccacacccgtgaacccccttcgcctggatgtcacttaccataagaatgaaatgctacagttcaagatttatgatcccaacaacaatcggtatgaagttccagtccctctgaacatacccagcgtgccatccagcacccctgagggtcaactctatgatgtcctcattaagaagaatccatttgggattgaaattcgccggaagagtacaggcactataatttgggactctcagctccttggcttcaccttcaatgacatgtttatccgcatctccacccgccttccctccaagtacctctatggctttggggagactgagcacacgtcctacaggagagacttggagtggcacacttgggggatgttctcccgagaccagcccccagggtacaagaagaattcctatggtgtccacccctactacatggggctagaggaggatggcagtgcccatggagtgctcctgctgaacagcaatgccatggatgtgacgttccagcccctgcctgccttgacataccgtaccacagggggagttctggacttttatgtgttcttggggccaactccagagcttgtcacccagcagtacactgagttgattggccggcctgtgatggtaccttactggtctttggggttccagctgtgtcgctatggctaccagaacgactctgagatctccagcttgtatgatgagatggtggctgcccagatcccttatgacgtgcagtactcagacatcgactacatggagcggcagctggacttcaccctcagccccaagtttgccgggtttccagctctgatcaatcgcatgaaggctgatgggatgcgggtcatcctcattctggatccagccatttctggcaatgagacacagccctatcctgccttcactcggggcgtggaggatgacgtcttcatcaagtacccaaatgatggagacattgtctggggaaaggtctggcctgattttcctgatgttgttgtgaatgggtctctagactgggacagtcaagtggagctatatcgagcttatgtggccttcccagactttttccgtaattcaactgccaagtggtggaagagggaaatagaagaactatacaacaatccacagaatccagagaggagcttgaagtttgatggcatgtggattgatatgaatgaaccatcaagcttcgtgaatggggcagtttctccaggctgcagggatgcctctctgaaccaccctccctacatgccgtatttggagtccagggacaggggcctgagcagcaagaccctgtgcatggagagtcagcagatcctcccagacggctccccggtgcagcactacaatgtgcacaacctgtacgggtggtcccagaccagacccacatacgaagccgtgcaggaggtgacaggacagcgaggggtcgtcatcacccgctccacatttccctcttctggccgctgggcaggacattggctgggagacaacacagccgcgtgggatcagctgaagaagtctatcattggcatgatggagttcagcctcttcggcatatcctatacgggagcagatatctgtgggttctttcaagatgctgaatatgagatgtgtgttcgctggatgcagctgggggccttttaccccttctcaagaaaccacaacaccattgggaccaggagacaagaccctgtgtcctgggatgttgcttttgtgaatatttccagaactgtcctgcagaccagatacaccctgttgccatatctgtataccttgatgcataaggcccacacggagggcgtcactgttgtgcggcctctgctccatgagtttgtgtcagaccaggtgacatgggacatagacagtcagttcctgctgggcccagccttcctggtcagccctgtcctggagcgtaatgccagaaatgtcactgcatatttccctagagcccgctggtatgattactacacgggtgtggatattaatgcaagaggagagtggaagaccttgccagcccctcttgaccacattaatcttcatgtccgtgggggctacatcctgccctggcaagagcctgcactgaacacccacttaagccgccagaaattcatgggcttcaaaattgccttggatgatgaaggaactgctgggggctggctcttctgggatgatgggcaaagcattgatacctatgggaaaggactctattacttggccagcttttctgccagccagaatacgatgcaaagccatataattttcaacaattacatcactggtacaaatcctttgaaactgggctacattgaaatctggggagtgggcagtgtccccgttaccagtgtcagcatctctgtgagtggcatggtcataacaccctccttcaacaatgaccccacgacacaggtattaagcatcgatgtgactgacagaaacatcagcctacataattttacttcattgacgtggataagcactctgtgaatttttacagcaagattctaactaactatgaatgactttgaaactacttatacttcatactcataaaaattattgtgtgttgctaatttgttcatacccactattggtgaaatatttctgttaattttgttatatgttttttgtgtgaaccctaaaggttaaaccttagccctgtgggataggcagttagggaggtgtggaaaatctatgcattaccttaatgtctctgtgtggttagtatggtagtgactgttcatcatatgacatttactgaagatgaactgggtccatgatgaagtgtgtgtatgtccacgtttgtaatcatagaatggaccccattcttttgttaaatacacaagagaaagctttctgtgacagttccaggtcttgaagctaatcagcatctcaagaaagtatccagaaagaacatctgctagttggttataggcggtgggaggaataatatacctaattggttataggtggggggagcatgataagcaaagaaaaggcaaacacaaggaaagatcagatgaaacagaagatgatagtaaaagtgatcctaagtaagaacataatgtaaaattgtcagcagcctcatggggaggaaaaaggaagagtcaactcacttgaagaagagggtcttgagaaatccttagcataaagggctactggtgagattgagatctgagcaggcaaagctcaaaagagagtttggaggttaaaaataatttatttttgcagtagtgtgctttgaaatgtgtaaatcttatttctaatgtatacaaccacatttcacataaaaatatgcaatttatatgccagataaaaataaaacaagtgaatttgcaagtga

SEQ ID NO: 151387 - DNA, 4199 bp, Homo sapiens
  Payload ID: 9808
  Gene Symbol: MGAM
  Gene Name: maltase-glucoamylase
  ENST ID: ENST00000631981
  CDS Start-End: 1-3343
gttctacgaggacaacagcacttgggatgtgcaccaacagttcttatgggggcccggcctcctcatcactccagttctggatgaaggtgcagagaaagtgatggcatatgtgcctgatgctgtctggtatgactacgagactgggagccaagtgagatggaggaagcaaaaagtcgagatggaacttcctggagacaaaattggacttcaccttcgaggaggctacatcttccccacacagcagccaaatacaaccactctggccagtcgaaagaaccctcttggtcttatcattgccctagatgagaacaaagaagcaaaaggagaacttttctgggataatggggaaacgaaggatactgtggccaataaagtgtatcttttatgtgagttttctgtcactcaaaaccgcttggaggtgaatatttcacaatcaacctacaaggaccccaataatttagcatttaatgagattaaaattcttgggacggaggaacctagcaatgttacagtgaaacacaatggtgtcccaagtcagacttctcctacagtcacttatgattctaacctgaaggttgccattatcacagatattgatcttctcctgggagaagcatacacagtggaatggagcataaagataagggatgaagaaaaaatagactgttaccctgatgagaatggtgcttctgccgaaaactgcactgcccgtggctgtatctgggaggcatccaattcttctggagtccctttttgctattttgtcaacgacctatactctgtcagtgatgttcagtataattcccatggggccacagctgacatctccttaaagtcttccgtttatgccaatgccttcccctccacacccgtgaacccccttcgcctggatgtcacttaccataagaatgaaatgctgcagttcaagatttatgatcccaacaagaatcggtatgaagttccagtccctctgaacatacccagcatgccatccagcacccctgagggtcaactctatgatgtgctcattaagaagaatccatttgggattgaaattcgccggaagagtacaggcactataatttgggactctcagctccttggctttaccttcagtgacatgtttatccgcatctccacccgccttccctccaagtacctctatggctttggggaaactgagcacaggtcctataggagagacttggagtggcacacttgggggatgttctcccgagaccagcccccagggtacaagaagaattcctatggtgtccacccctactacatggggctggaggaggacggcagtgcccatggagtgctcctgctgaacagcaatgccatggatgtgacgttccagcccctgcctgccttgacataccgcaccacagggggagttctggacttttatgtgttcttggggccgactccagagcttgtcacccagcagtacactgagttgattggccggcctgtgatggtaccttactggtctttggggttccagctgtgtcgctatggctaccagaatgactctgagatcgccagcttgtatgatgagatggtggctgcccagatcccttatgatgtgcagtactcagacatcgactacatggagcggcagctggacttcaccctcagccccaagtttgctgggtttccagctctgatcaatcgcatgaaggctgatgggatgcgggtcatcctcattctggatccagccatttctggcaatgagacacagccttatcctgccttcactcggggcgtggaggatgacgtcttcatcaaatacccaaatgatggagacattgtctggggaaaggtctggcctgattttcctgatgttgttgtgaatgggtctctagactgggacagccaagtggagctatatcgagcttatgtggccttcccagactttttccgtaattcaactgccaagtggtggaagagggaaatagaagaactatacaacaatccacagaatccagagaggagcttgaagtttgatggcatgtggattgatatgaatgaaccatcaagcttcgtgaatggggcagtttctccaggctgcagggacgcctctctgaaccaccctccctacatgccacatttggagtccagggacaggggcctgagcagcaagaccctttgtatggagagtcagcagatcctcccagacggctccctggtgcagcactacaacgtgcacaacctgtatgggtggtcccagaccagacccacatacgaagccgtgcaggaggtgacgggacagcgaggggtcgtcatcacccgctccacatttccctcttctggccgctgggcaggacattggctgggagacaacacggccgcatgggatcagctgaagaagtctatcattggcatgatggagttcagcctcttcggcatatcctatacgggagcagatatctgtgggttctttcaagatgctgaatatgagatgtgtgttcgctggatgcagctgggggccttttaccccttctcaagaaaccacaacaccattgggaccaggagacaagaccctgtgtcctgggatgttgcttttgtgaatatttccagaactgtcctgcagaccagatacaccctgttgccatatctgtataccttgatgcataaggcccacacggagggcgtcactgttgtgcggcctctgctccatgagtttgtgtcagaccaggtgacatgggacatagacagtcagttcctgctgggcccagccttcctggtcagccctgtcctggagcgtaatgccagaaatgtcactgcatatttccctagagcccgctggtatgattactacacgggtgtggatattaatgcaagaggagagtggaagaccttgccagcccctcttgaccacattaatcttcatgtccgtgggggctacatcctgccctggcaagagcctgcactgaacacccacttaagccgccagaaattcatgggcttcaaaattgccttggatgatgaaggaactgctgggggctggctcttctgggatgatgggcaaagcattgatacctatgggaaaggactctattacttggccagcttttctgccagccagaatacgatgcaaagccatataattttcaacaattacatcactggtacaaatcctttgaaactgggctacattgaaatctggggagtgggcagtgtccccgttaccagtgtcagcatctctgtgagtggcatggtcataacaccctccttcaacaatgaccccacgacacaggtattaagcatcgatgtgactgacagaaacatcagcctacataattttacttcattgacgtggataagcactctgtgaatttttacagcaagattctaactaactatgaatgactttgaaactacttatacttcatactcataaaaattattgtgtgttgctaatttgttcatacccactattggtgaaatatttctgttaattttgttatatgttttttgtgtgaaccctaaaggttaaaccttagccctgtgggataggcagttagggaggtgtggaaaatctatgcattaccttaatgtctctgtgtggttagtatggtagtgactgttcatcatatgacatttactgaagatgaactgggtccatgatgaagtgtgtgtatgtccacgtttgtaatcatagaatggaccccattcttttgttaaatacacaagagaaagctttctgtgacagttccaggtcttgaagctaatcagcatctcaagaaagtatccagaaagaacatctgctagttggttataggcggtgggaggaataatatacctaattggttataggtggggggagcatgataagcaaagaaaaggcaaacacaaggaaagatcagatgaaacagaagatgatagtaaaagtgatcctaagtaagaacataatgtaaaattgtcagcagcctcatggggaggaaaaaggaagagtcaactcacttgaagaagagggtcttgagaaatccttagcataaagggctactggtgagattgagatctgagcaggcaaagctcaaaagagagtttggaggttaaaaataatttatttttgcagtagtgtgctttgaaatgtgtaaatcttatttctaatgtatacaaccacatttcacataaaaatatgcaatttatatgccagataaaaataaaacaagtgaatttgcaagtga

SEQ ID NO: 151388 - DNA, 7867 bp, Homo sapiens
  Payload ID: 9809
  Gene Symbol: MGAM2
  Gene Name: maltase-glucoamylase 2 (putative)
  Uniprot ID: Q2M2H8
  ENST ID: ENST00000477922
  CDS Start-End: 55-7602
tccctatgaattgctgagggagagatacagcatagaaaaaaacaaggtgatgcgatggcgaggaagctcagtgtattggaagtccttctgatcatcttctgcttaattgtggtgaccatagatatcctcttgctgcttcttgtgttggaggaaacttcagatacttcatttactccagagtgcccagagattccccagtcggaaaggatagactgcacacctgaccaggaggtgaccgaggatatctgcagatggcaatataagtgctgctggtcgcctgtggcagatgccaatgtccctaggtgcttcttcccctggaactggggctatgaagccagcaatggccatacaaatacaagcacaggatttactgcccagttgaaaaggttgccatcaccatctctgtttggaaatgatgtcgccaccacccttttcacagctgaatatcagacatccaatcggtttcattttaagatcactgactttaataacatacgctatgaagtttcccatgaaaatattaacctggttgatgggattgctgatgcctccaatttgagctattacgtggaggttactgataaacctttcagcatcaaaataatgaggacaagcaacagaagagtcttgttggacacgagcatcgggcccctccagtttgcccagcagtacctgcaactgtctttccgactgcccagtgccaatgtgtatgggctgggagagcatgtgcaccagcagtaccgccacaatatgacctggaagacttggcccatcttcacccgggacgctacccccaccgagggcatgattaatctgtatggagctcatacattcttcttgtgccttgaagatgccaggggctcctcttttggagtatttctgatgaacagtaatgccatggaggttacccttcagccagctcctgcgatcacttatcgcacgattggaggcattcttgacttttacgtattcctaggaaacactccagaacaagtggttcaggaatacttggagcttgttggacggccattcttccctccctattggagtcttgggttccagcttagtcgcagggactatggtggcatcaataaattgaaagaagttgtaagccgaaatcgtttagctgagataccatatgatgtccagtactctgacatagactacatggatggaaagaaggatttcactgttgatgaagtcgcttactctggtctcccagattttgtcaaggagttacatgacaatggacagaaatatcttattattatgaatcctggcatctccaaaaactctaactacgagccctataataatggaagcctaaagagagtgtggatcttggggagcaatggctttgctgttggggagggatatccgggaccgacagtctttcccgattataccaatccagtatgcactgagtggtggacagatcaggtcgctaaatttcatgatcatctggagtttgatggagtgtggattgaaatgaatgaagtatctagcttactccaagcttctaataaccagtgtgaatccaacaacttgaactttcctccttttcttcctagagttctggatcacttactttttgcaagaactctctgcatggacacggagtttcatgggggccttcattatgacatccacagcttgtatggccactccatggcaagaaccacaaacttagccctggagaccatcttcatgaataataggagcttcatcttatcccgttctacttttgctggatctggcaaatttgctgctcattggctgggggacaatgcggccacatgggatgacctccgatggtctatccccactatccttgagttcaacctgtttggcatccccatggtaggtgccaacatctgtggttataacaacaatgtcacagaggagctctgcagaaggtggatgcagcttggagcattttatccactaccaaggaatcacaatgggcctgggttcagggaccaggatcccgctgcctttggtgttgattccctgctgctgaaatcctccagacattatctgaacatccgctacaccttgctgccctatctctatacccttttctaccatgctcacacccggggagagacggtagcaaggccccttgtacatgagttctaccaggactcagccacgtgggatgtgcatgagcagttcttatggggacctggactcctcatcacgcctgttttatatgaaggtgtggacgaagtgaaagcatacatacctgatgccacctggtatgactatgagacaggagtggccatctcatggaggaaacagttggtgaatatgcttctcccaggtgacaagataggacttcatctgcgagggggctacatatttcccactcagaagccaaacacaaccacagaagccagccggaggaattccctgggactcatcatcgccttggactataagagagaagcaaagggggagctgtactgggatgacggtgtatctaaagatgctgtgactgaaaagaagtatattctatatgatttctctgttacctctaaccatctacaagcaaagattataaataataattatatggacactgacaacctcatgttcacagatatcacaatcttgggaatggacaaacagccagctaattttatcgtcctactgaataatgttgccacctccagtccaagcgttgtctacaatgcttccacaaaggtggtaaccatcactgatctccaaggactggtactgggacaagaattctctattaggtggaatcttcctgtcagtgacctggagaagttcaactgctaccctgatgatccaacagcctctgaggagagttgtaggcagcgggggtgtctttgggaggacacatctactcctggagtgcccacctgttactatgacaccatccctaattatgttgctagtgatattcagtacctgaacaccagcatcactgcagacctttccctcccgatggcccctgagtcagctgctgctgccgcctctgattctctctctgcaaagatcagcttcctccacctgaaagtgatctatcacacagcaaccatgctgcaggtcaagatctatgaccccactaataaaaggtatgaggttccagtaccactgaacacccctccccaaccagttggtgaccctgaaaaccgtctgtatgatgtcaggattcagaacaatccttttggaatccagattcaacgcaaaaactccagcactgtgatttgggattctcaactccctggcttcatcttcaatgacatgtttctctccatttctacgcgtctgccgtcccagtacatctatggctttggggaaactgagcacacgactttcagaagaaacatgaactggaacacatggggaatgtttgctcatgatgagccacctgcgtacaagaagaattcctatggtgtccacccttactacatggcactggaggaggatggtagtgcccatggagtgctcctgctaaatagcaatgccatggatgtgacattacagcccactcctgctctgacataccgcaccacaggagggattttggacttctacattgttttggggccaacccctgaacttgtaactcagcaatacacagagttgattggtcggccagcaatgattccatactgggccttgggattccatctgagtcgctatggataccagaatgatgctgaaatctccagtttgtatgatgcaatggtggcagcccagattccctatgacgtccagcatgtagacatcgattacatgaaccggaagctggatttcaccctcagtgccaactttcaaaacctcagtcttctgattgagcaaatgaagaaaaatggcatgagatttattctcattttggacccagccatttctggcaatgagacacagtatctcccattcattagaggacaggaaaataacgtgttcatcaaatggcctgacaccaatgacattgtctggggaaaggtttggccagatctgcctaatgtaattgtagatggatcccttgaccatgaaactcaggttaagctttacagggcctacgttgcctttcctgacttctttcgtaatagcacagctgcgtggtggaagaaagagatagaagagctctatgcaaaccctcgagagccagagaagagcttgaagtttgatggattgtggattgatatgaatgagccatcaaattttgtggatggatctgtcaggggctgcagcaatgaaatgctaaataacccaccctatatgccatatttggaatctagggacaagggcctgagcagcaagactctgtgcatggagagtcagcagatcctgccggacagctcccccgtggagcactacaacgtgcacaacctgtacgggtggtcccagaccagacccacatacgaagctgtgcaggaggtgacaggacagcgaggggtcatcatcacccgctccacatttccctcttctggacgctggggaggacaccggttgggaaacaacacagctgcatgggaccagctggggaaatctatcattggcatgatggagttcagtctctttggaataccttatacaggagcagatatctgtgggttctttggagatgctgaatatgagatgtgtgttcgctggatgcaactgggggcattttatccattttccagaaaccacaacaacatcgggacaaggagacaagatcctgtggcctggaattcaacctttgagatgttgtccagaaaagtcctagagaccagatataccctgcttccttatctctatactctgatgcataaagctcacgttgagggcagcacagttgtccggccccttctccatgagtttacggatgacaggacaacatgggatatagaccgtcagttcatgttgggccctgctatcttaatcagccctgtgttggaaactagcacatttgagatctctgcttattttccgagagcccgttggtatgactatagcacgggaactagcagcacatcaacaggtcagaggaaaatcctgaaggctccccttgaccacatcaaccttcatgtcagaggaggctacatcctgccctggcaagagcctgctatgaacactcactccagtcgacaaaattttatgggattgattgttgctttggatgacaatgggacagctgaaggccaggtgttctgggatgatggacaaagcattgatacctatgaaaatggaaattattttttggcaaactttatagcagctcagaacatcctgcaaatccagaccatacacaataagtatttgagtgactcgaatccactaaaagttgggtatattagaatctggggtgtgaatacctatgtgacacaagtcagtttcacctatgacaaccggcaatttatggagacaaatttcaagagtgaaccttataatcagatactaactattcaattgactgacaagactatcaacctggaaaagttaactgaggttacttggattgatggtggtcctgtacttcctactccaactaagacaagtaccatcccaatgagttctcatccttctccatctactaccaatgccaccagttctgagacaatcaccagttctgccagtgcaaatactaccactggcactactgatactgttcctatcacaaccacatctttcccaagtactactagtgttacaactaatactactgttcctgatacaacttctcctttccctacaagtactactaatgctagcactaatgctactgttcctatcacaaccacacctttcccaacaagtactattggtgttacaactaatgctactgttcccaatacaactgcccctttcccaacaaatgctagtactgctagcactaatgctactgttcctatcacaaccacatgttttgcaacaagtactattggtgttacaactaatgctactgttcccgatacaactgcccctttcccaacaaatactactactgctagcactaatgctactattcctatcacaaccacaccttttgcaacaagtactattagtgttacaactagtactactgttcctgatacaactgctcctttccctacaagtactactagtgctagcactaatgctacccctgttcctatcacaaccacactttttgcaacaagtactattggtgttacaactggtactactgttcctgatacaactgctcctttccctacaagtactactagtactagcactagtgctactgttcctattacaaccacaccttcccctacaaatactgctgatgctaacactagtaatactgttcctaataccactatgccttctcctacaagtagtactactgtgagtactattgctaccgttcccatttcagtgactccttctctgacaagtactgctgatgccaccattagtactactgtacttattgccactacttcttctctaacaggtactactgatgttagcactagtactactattaataatataagtactcctgttcaaacaaatactactaatgctagcactagtactaatgttgctaatataactgctacctctcatacaagtactgatgatactgttcctaataatactgttccagttacagctattccttctcttgcaaatactggtgttgacactactagcaacagtttttccattatgaccacttctttctctgaaagtactaatgctatgaacactactgttattatggcaactacttctcctacaagtactgatgttgctagcacaaataatgatgcttctatgacaaattttcttttagctacaatgtctgctggtaatataactagtaatagtatttccataacaactacttcttttggtaatagtgttccttttgtgactactccttctccaagtactgatgctactactacaagtaataatactaatcctggcatgactacttattaccagacttctcctaccattcctacccatactcttacttctattcctagctctattacttctattttgagcatgtttccaacaagtaatacattcactactgataaaattactaattttactacccctacaaatgcaaacaccattattttcaacactcttgatacaaaaagtaccatggtaatagatgctacggtcactactaccagcaccaaagataataccatgagtccagatacaacagttacttccatagacaaattcaccacacacatcacacagttcgctactccccattctgctactactacaacactggccttaagccacacctcattagctcctacaaatctttctaatctaggcaccatggatattactgatgcagataactccagcagtgttacaggtaacacgacacacatttctgtttcaaatctcacaacagcctcagtcacaataacagccactggtctagattcacaaactccccatatggtaataaattctgtggctacttatttacctattactgcaactagtgctaccacagatactacaaatattacaaaatatgctttaaatactaccactcctgatagtacagtacatacctctgctactgcacctacttatattgcaaatgccataaatgctactcaagttccatgattactactcaaggcaggatagttacctcagataacgcctacaaacaactattacagatatagaaaatcagttacgagacactctatctatcttatgctacttaagttttcacggatattagtactctagccataaaagacacagctactccaaacactctcgtcattgcagacatgtttaggaaggtttacaaaccttataggtttcaccaaagaagctgtgggtacttattttgcaaccatagtatgtgctcttattcttttaa

SEQ ID NO: 151389 - DNA, 1591 bp, Homo sapiens
  Payload ID: 9809
  Gene Symbol: MGAM2
  Gene Name: maltase-glucoamylase 2 (putative)
  Uniprot ID: Q2M2H8
  ENST ID: ENST00000550469
  CDS Start-End: 60-1508
agtgctccctatgaattgctgagggagagatacagcatagaaaaaaacaaggtgatgcgatggcgaggaagctcagtgtattggaagtccttctgatcatcttctgcttaattgtggtgaccatagatatcctcttgctgcttcttgtgttggaggaaacttcagatacttcatttactccagagtgcccagagattccccagtcggaaaggatagactgcacacctgaccaggaggtgaccgaggatatctgcagatggcaatataagtgctgctggtcgcctgtggcagatgccaatgtccctaggtgcttcttcccctggaactggggctatgaagccagcaatggccatacaaatacaagcacaggatttactgcccagttgaaaaggttgccatcaccatctctgtttggaaatgatgtcgccaccacccttttcacagctgaatatcagacatccaatcggtttcattttaagatcactgactttaataacatacgctatgaagtttcccatgaaaatattaacctggttgatgggattgctgatgcctccaatttgagctattacgtggaggttactgataaacctttcagcatcaaaataatgaggacaagcaacagaagagtcttgttggacacgagcatcgggcccctccagtttgcccagcagtacctgcaactgtctttccgactgcccagtgccaatgtgtatgggctgggagagcatgtgcaccagcagtaccgccacaatatgacctggaagacttggcccatcttcacccgggacgctacccccaccgagggcatgattaatctgtatggagctcatacattcttcttgtgccttgaagatgccaggggctcctcttttggagtatttctgatgaacagtaatgccatggaggttacccttcagccagctcctgcgatcacttatcgcacgattggaggcattcttgacttttacgtattcctaggaaacactccagaacaagtggttcaggaatacttggagcttgttggacggccattcttccctccctattggagtcttgggttccagcttagtcgcagggactatggtggcatcaataaattgaaagaagttgtaagccgaaatcgtttagctgagataccatatgatgtccagtactctgacatagactacatggatggaaagaaggatttcactgttgatgaagtcgcttactctggtctcccagattttgtcaaggagttacatgacaatggacagaaatatcttattattatgaatcctggcatctccaaaaactctaactacgagccctataataatggaagcctaaagagagtgtggatcttggggagcaatggctttgctgttggggagggatatccgggaccgacagtctttcccgattataccaatccagtatgcactgagtggtggacagatcaggtcgctaaatttcatgatcatctggagtttgatggagtgtggattgtaagttattattcctgactcaaatttcctttggaaacagataacgccaaattttcagatgagttttgaccttgatgtcaaataaatgtcaataaaaaata

SEQ ID NO: 151390 - DNA, 1591 bp, Homo sapiens; identical to SEQ ID NO: 151389
  Payload ID: 9809
  Gene Symbol: MGAM2
  Gene Name: maltase-glucoamylase 2 (putative)
  Uniprot ID: Q2M2H8
  ENST ID: ENST00000622623
  CDS Start-End: 60-1508

SEQ ID NO: 151391 - DNA, 7867 bp, Homo sapiens; identical to SEQ ID NO: 151388
  Payload ID: 9809
  Gene Symbol: MGAM2
  Gene Name: maltase-glucoamylase 2 (putative)
  Uniprot ID: Q2M2H8
  ENST ID: ENST00000632823
  CDS Start-End: 55-7602

SEQ ID NO: 151392 - DNA, 1761 bp, Homo sapiens
  Payload ID: 9810
  Gene Symbol: MALRD1
  Gene Name: MAM and LDL receptor class A domain containing 1
  ENST ID: ENST00000377265
  CDS Start-End: 1-1522
agaatgcccaagaggaaggtcagctctgctgaaggggccgccacaggaaaagcctaacaggaggtcagcgctgttgtcagtgggagagatctctgagctttgtccggaaatcactgattttttgtgccgggacaagaagtgcattgcatcccaccttctttgtgactataagccagactgctctgataggtctgatgaagctcactgtgcacattatacaagcacaacaggaagctgcaattttgaaacaagttcaggaaactggaccacagcctgcagtcttactcaagactctgaggatgacttggactgggccattggcagcagaattcctgccaaagcattaattccagactctgatcacacgccaggtagtggtcagcacttcctgtacgtcaactcatctggctccaaggaaggatccgttgccagaattactacttccaaatccttcccagcaagccttggaatgtgtactgttcggttctggttctacatgattgatcccaggagtatgggaatattaaaggtgtataccattgaagaatcggggctaaacatcctggtgtggtcagtgattggaaataaaagaacgggatggacatatggctctgtgcctctctccagtaacagtccgtttaaggtggcatttgaagctgatttggatggaaatgaggacatctttattgctcttgatgacatctcttttaccccagagtgtgtgactggaggtcctgtcccagtgcagccatcaccctgtgaagctgatcagttttcttgtatctacacactccaatgtgtccctctctcagggaaatgtgatggacatgaagactgcatagatggatctgatgaaatggattgtcctctcagccccacccctccactctgtagtaacatggagttcccgtgctctacagacgagtgtataccttccctcctgctatgcgatggagtgcccgactgccactttaatgaagatgagctcatctgctccaacaaaagctgttctaatggagctctggtgtgtgcctcctccaacagctgtatcccagcccaccagcgctgtgatggttttgccgactgcatggatttccagcttgatgagtccagctgctccgaatgtccattaaattactgcagaaatggtgggacttgtgtagtggagaaaaatggtcctatgtgtcgatgtagacaaggctggaaaggaaatcgatgccatatcaagtttaatcctcctgctacagacttcacatacgctcagaataatacatggactctcctgggtattggattagcattcctgatgactcacatcacagttgcagtcttgtgttttcttgcaaacagaaaggtaccaataaggaaaaccgagggaagtggtaactgtgcctttgtcaatccagtttacgggaactggagcaacccagagaaaacagagagttctgtctattccttctcaaacccattatatggcacaacatcaggaagcctggagaccctgtcacatcatctcaaatagcagcatcgagaccaagtctgatccaacatgtgtagtttctagaaaattgaagtctccacaatctgatagaaactcatcttctacaatggtaaaaagagaaaggattgtaaatgccagtgtaattataacatttatgaatgaattttcttgcagaatatagagaatgtttatatggaatcagaatcagtaccttatcttcactgaacatctgaatattttaataaaatttctatttaatc

SEQ ID NO: 151393 - DNA, 4461 bp, Homo sapiens
  Payload ID: 9810
  Gene Symbol: MALRD1
  Gene Name: MAM and LDL receptor class A domain containing 1
  ENST ID: ENST00000377266
  CDS Start-End: 1-4461
cctcgggatcatagtctcaacgcatctcaagggcattttatgttcattctgaagaaaagcagcagcttgtggcaagttgctaagcttcagagcccaactttcagccagacaggacctggatgcatactttccttctggttctataactatggcctgtcagtgggagcagctgagctgcagctacatatggaaaattctcatgactcaacagtgatttggagagtattatacaatcagggcaaacaatggttggaggcaaccattcagctagggcgcctttcgcagcccttccatttgtcactagataaagtcagtctgggcatttatgatggggtctcagctattgatgacatccgatttgaaaattgtactctccctcttcctgctgagagctgtgaagggctggatcatttctggtgtcgccacaccagggcttgcatagaaaagcttcggttatgtgatctggtggatgactgtggtgatcgtactgatgaagtcaactgtgcacctgagctgcagtgtaactttgaaactggaatctgtaactgggaacaagatgcaaaagatgactttgattggaccaggagccagggtccaactccaacacttaacacagggccaatgaaagataacactctgggcacagctaaaggacactatctctacatagaatcttcagagccacaggcttttcaagacagtgctgccttactcagcccaatccttaatgccactgatacaaaaggctgcaccttccgcttctattaccacatgtttggaaagcgcatttataggttggcaatctaccaacgaatctggagtgactcaaggggacagctgctgtggcagatatttgggaatcaaggcaacagatggattaggaaacacctcaacatttccagcaggcagccctttcagatattggtggaggcttcagtgggagatggcttcactggagatattgcgattgatgatctgtcatttatggactgcaccctctaccctggtaatttgccagcagacctcccaactccaccagaaacgtcagttcctgtaacattacctccacacaactgcacagacaatgaatttatctgcaggtctgatggtcactgcattgaaaaaatgcagaaatgtgattttaaatatgactgccctgacaaatcagatgaagcatcctgtgttatggaagtttgcagctttgagaaaagaagcctgtgtaaatggtatcaaccaatcccagtacatttgcttcaagattcaaacacattcaggtgggggcttgggaacgggatcagcattcatcatggggaagaaaaccacaggccatcagtggatcatacacaaaataccactgatggctggtacctgtatgctgacagttctaatgggaaatttggtgacacggctgacattctcactcctatcatttcactcacgggaccaaaatgtaccttggtgttctggacacatatgaatggggccaccgttggttctctccaggtgctcatcaagaaagataacgttacttctaaattgtgggctcaaactggacagcaaggtgcacagtggaagagagcagaagtgtttttaggcattcgttcacatacacagattgtcttcagagccaaacgtggtatcagttacataggagatgtagcagtggatgatatttccttccaagattgctcccctttgcttagcccagagagaaagtgtactgatcatgaattcatgtgtgctaataagcactgcattgccaaagacaagctgtgtgattttgtgaatgattgtgctgataattcagatgagactactttcatttgccgtacctccagtgggcgctgtgatttcgaatttgatctttgttcctggaagcaggagaaagatgaggactttgactggaacctgaaagctagcagcatccctgcagcaggcacagagccagcagcagatcacactttgggaaattcatctggtcattacatctttataaagagtttgtttcctcagcagcccatgagagctgccagaatttcaagtccagttataagtaagagaagcaaaaactgcaagattatttttcattatcacatgtatggaaatggcattggggcactcaccttaatgcaggtgtcagtcacaaaccaaacgaaggttctacttaacctcactgtagaacaaggcaatttctggcggagagaagaactgtcactgtttggtgatgaagacttccaactcaaatttgaaggtagagttgggaaaggtcagcgtggagacattgcacttgatgacattgtgcttacagaaaattgtctatcactccatgattccgtgcaagaagaactggcagtgcctcttccaacaggtttctgcccacttggctatagggaatgtcataatggaaaatgctataggctggaacaaagctgtaacttcgtagataactgtggagataatactgatgaaaatgagtgtggtagctcctgtacttttgaaaaaggctggtgtggctggcaaaactcccaggctgacaactttgattgggttttaggggttggctctcatcaaagcttaagacctcccaaagaccacacacttggaaatgaaaatgctatcttgttgatgcgacggcataaatatcccatcagatcagttaatctgcatactgtgaagcacgtgctaaaagcacagacagttggaaattgttctgtcagcaagctagaggcgaggctattagattttctttctgttccaaatgaaaatacttttggcagctcagatcatacgaattggcacttcatgtatctggaagctactgcagtgggccttcggggtgacaaagcacacttcaggagtaccatgtggcgagaatccagtgcagcctgcaccatgagcttctggtatttcgtatctgcaaaggccacaggatccattcagattctcatcaagcgggggcggaggagaaggcgggctcccaatccggttctatccggttctcccaccatcccccgccaggggtctcagcagctcggagggtggaggggcggcagcgccaggcaccgcgcacgcgcctttccggagccagaatgcccaagaggaaggtcagctctgctgaaggggccgccacaggaaaagcctaacaggaggtcagcgctgttgtcagtgggagagatctctgagctttgtccggaaatcactgattttttgtgccgggacaagaagtgcattgcatcccaccttctttgtgactataagccagactgctctgataggtctgatgaagctcactgtgcacattatacaagcacaacaggaagctgcaattttgaaacaagttcaggaaactggaccacagcctgcagtcttactcaagactctgaggatgacttggactgggccattggcagcagaattcctgccaaagcattaattccagactctgatcacacgccaggtagtggtcagcacttcctgtacgtcaactcatctggctccaaggaaggatccgttgccagaattactacttccaaatccttcccagcaagccttggaatgtgtactgttcggttctggttctacatgattgatcccaggagtatgggaatattaaaggtgtataccattgaagaatcggggctaaacatcctggtgtggtcagtgattggaaataaaagaacgggatggacatatggctctgtgcctctctccagtaacagtccgtttaaggtggcatttgaagctgatttggatggaaatgaggacatctttattgctcttgatgacatctcttttaccccagagtgtgtgactggaggtcctgtcccagtgcagccatcaccctgtgaagctgatcagttttcttgtatctacacactccaatgtgtccctctctcagggaaatgtgatggacatgaagactgcatagatggatctgatgaaatggattgtcctctcagccccacccctccactctgtagtaacatggagttcccgtgctctacagacgagtgtataccttccctcctgctatgcgatggagtgcccgactgccactttaatgaagatgagctcatctgctccaacaaaagctgttctaatggagctctggtgtgtgcctcctccaacagctgtatcccagcccaccagcgctgtgatggttttgccgactgcatggatttccagcttgatgagtccagctgctccgatacatggactctcctgggtattggattagcattcctgatgactcacatcacagttgcagtcttgtgttttcttgcaaacagaaaggtaccaataaggaaaaccgagggaagtggtaactgtgcctttgtcaatccagtttacgggaactggagcaacccagagaaaacagagagttctgtctattccttctcaaacccattatatggcacaacatcaggaagcctggagaccctgtcacatcatctcaaatag

SEQ ID NO: 151394 - DNA, 407 bp, Homo sapiens
  Payload ID: 9810
  Gene Symbol: MALRD1
  Gene Name: MAM and LDL receptor class A domain containing 1
  ENST ID: ENST00000418367
  CDS Start-End: 1-201
aatacattcatgaaaataagtgtgctggctagacaacatgtctctcaaaagtttctaacaaacaataacctgaaaatgtactatgagttctgtctattccttctcaaacccattatatggcacaacatcaggaagcctggagaccctgtcacatcatctcaaatagcagcatcgagaccaagtctgatccaacatgtgtagtttctagaaaattgaagtctccacaatctgatagaaactcatcttctacaatggtaaaaagagaaaggattgtaaatgccagtgtaattataacatttatgaatgaattttcttgcagaatatagagaatgtttatatggaatcagaatcagtaccttatcttcactgaacatctgaatattttaataaaatttctatttaatcaa

SEQ ID NO: 151395 - DNA, 774 bp, Homo sapiens
  Payload ID: 9810
  Gene Symbol: MALRD1
  Gene Name: MAM and LDL receptor class A domain containing 1
  ENST ID: ENST00000441070
  CDS Start-End: 1-774
ctcaaatttgaaggtagagttgggaaaggtcagcgtggagacattgcacttgatgacattgtgcttacagaaaattgtctatcactccatgattccgtgcaagaagaactggcagtgcctcttccaacaggtttctgcccacttggctatagggaatgtcataatggaaaatgctataggctggaacaaagctgtaacttcgtagataactgtggagataatactgatgaaaatgagtgtggtagctcctgtacttttgaaaaaggctggtgtggctggcaaaactcccaggctgacaactttgattgggttttaggggttggctctcatcaaagcttaagacctcccaaagaccacacacttggaaatgaaaatgggcacttcatgtatctggaagctactgcagtgggccttcggggtgacaaagcacacttcaggagtaccatgtggcgagaatccagtgcagcctgcaccatgagcttctggtatttcgtatctgcaaaggccacaggatccattcagattctcatcaagacagagaaaggactatcaaaagtatggcaagaaagtaagcagaaccctggtaatcattggcaaaaggctgacatcctgctaggaaagttaaggaattttgaagtcatatttcaaggtatcagaacaagggacctgggaggaggagctgcaattgatgatattgaatttaaaaactgcacaactgtgggagagatctctgagctttgtccggaaatcactgattttttgtgccgggacaag

SEQ ID NO: 151396 - DNA, 6880 bp, Homo sapiens
  Payload ID: 9810
  Gene Symbol: MALRD1
  Gene Name: MAM and LDL receptor class A domain containing 1
  Uniprot ID: Q5VYJ5
  ENST ID: ENST00000454679
  CDS Start-End: 169-6639
gcaaattaactgcctggggagtaatttgttagagttgcagatagttaccaatagtatccagttataagaagcaaatctgggaaaggaagaatagagaaataaaagaatgtttccaatgatggacttacttattacaactgcttgatctctaatagacaataccaagtaatgctcttcttcctggacagaatgttggcattccccatgaatgaaactttttgttgcctttggattgcctgtgttttcaattctacactggctcagcaagggacagaaagctttcagtgtgacaatggagtctccttgcctcctgacagcatttgtgacttcacagatcagtgtggggatagcagtgatgaacggcactgtttgaattatgaaagatgtgattttgaggatggtctctgtcatatgactcaagatcagagtctgcaacctagttggacaaagagaagtgggatgattggtctatcacctccattttatgatcacaatggtgatgtgtctgctcacttcctctcactggtttccagagtggattctatttcctcaagtttaagaagcagagttttccttccaacaaatgatcaacatgactgccagattacattttattacttctcctgccaagtgagtggcaaattaatggttgggcttcaaactgcatgtggaggtcctattcagcatttatggcaaaacacagctgcactcccaaatcagtgggagagaaatgtcatcaaaatccagagttcacagagatttcaggttgtttttgaaggtcaaatggcttcaacgtatgaacaggatgaagtcattgctattgatgatatatctttcagttcaggctgcttgcctgccaatgatggaattttactgtgtcaagaagcattgaatgctgagcgggagctatgccatccagatacagatctctgcagatttgatgctacagatgaagagttgagattgtgtcaggcctgtgggtttgaatttgacatgtgtgagtggacgtcagaagcatctgctggccaaatttcctggatgcgcacaaaagcgagagagatccctgcattcgaatccacacctcagcaggatcaaggaggtgatgatgaaggttattatgtatgggtaggcgctaagcatggtttcactcttaaccatttagacagcagggcttacctaaatagctctgtgtgtcattgcctgggcaagagctgtcatcttcaattctattatgcaatggaaagcagtgtcctgagagtaagactgtataataataaggaagaagaaatattttggacatacaacatatcaactcacagccaatgggtgaaagcagatgtgttaataccagaagatctgaagacatttaagattatttttgaagggactcttttgagccagagaagttttattgcccttgatcacctctgggtctatgcctgtggacagacccaatccagaaagctttgctctgcagacgaattcccttgcactagtggccagtgcatcgccaaagaatctgtctgtgactctcggcaggactgctccgatgagagtgatgaagacccagcaacttgctcaaagcatctcacctgtgactttgagtcgggtttctgcggttgggagccatttctcacagaagattcacactggaagctgatgaaaggattgaataatggagagcaccactttcctgcagctgatcacacagcaaacataaatcatggatcgtttatttatttggaggcacagcgctcccccggggtggccaagcttggaagtcctgttcttacaaaattgctcactgcctctaccccatgtcaggtgcagttttggtatcatttgtctcaacattcaaatctctcagtttttacaagaacgtctctagatggaaacttgcaaaagcagggcaaaataatcagattctccgaatctcagtggagccacgcaaaaattgatctcattgcagaagcgggagaatctactctaccttttcagttaattttggaagctactgttttgtcgtcaaatgctaccgttgctctagatgacatcagtgtgtcccaggaatgtgaaatttcctataaatcactaccaaggaccagtacacaaagcaagttttccaagtgtgactttgaagcaaacagctgtgattggtttgaagcaattagtggtgaccattttgactggatacggagctctcagagtgaactttctgctgattttgagcaccaggctccacctcgggatcatagtctcaacgcatctcaagggcattttatgttcattctgaagaaaagcagcagcttgtggcaagttgctaagcttcagagcccaactttcagccagacaggacctggatgcatactttccttctggttctataactatggcctgtcagtgggagcagctgagctgcagctacatatggaaaattctcatgactcaacagtgatttggagagtattatacaatcagggcaaacaatggttggaggcaaccattcagctagggcgcctttcgcagcccttccatttgtcactagataaagtcagtctgggcatttatgatggggtctcagctattgatgacatccgatttgaaaattgtactctccctcttcctgctgagagctgtgaagggctggatcatttctggtgtcgccacaccagggcttgcatagaaaagcttcggttatgtgatctggtggatgactgtggtgatcgtactgatgaagtcaactgtgcacctgagctgcagtgtaactttgaaactggaatctgtaactgggaacaagatgcaaaagatgactttgattggaccaggagccagggtccaactccaacacttaacacagggccaatgaaagataacactctgggcacagctaaaggacactatctctacatagaatcttcagagccacaggcttttcaagacagtgctgccttactcagcccaatccttaatgccactgatacaaaaggctgcaccttccgcttctattaccacatgtttggaaagcgcatttataggttggcaatctaccaacgaatctggagtgactcaaggggacagctgctgtggcagatatttgggaatcaaggcaacagatggattaggaaacacctcaacatttccagcaggcagccctttcagatattggtggaggcttcagtgggagatggcttcactggagatattgcgattgatgatctgtcatttatggactgcaccctctaccctggtaatttgccagcagacctcccaactccaccagaaacgtcagttcctgtaacattacctccacacaactgcacagacaatgaatttatctgcaggtctgatggtcactgcattgaaaaaatgcagaaatgtgattttaaatatgactgccctgacaaatcagatgaagcatcctgtgttatggaagtttgcagctttgagaaaagaagcctgtgtaaatggtatcaaccaatcccagtacatttgcttcaagattcaaacacattcaggtgggggcttgggaacgggatcagcattcatcatggggaagaaaaccacaggccatcagtggatcatacacaaaataccactgatggctggtacctgtatgctgacagttctaatgggaaatttggtgacacggctgacattctcactcctatcatttcactcacgggaccaaaatgtaccttggtgttctggacacatatgaatggggccaccgttggttctctccaggtgctcatcaagaaagataacgttacttctaaattgtgggctcaaactggacagcaaggtgcacagtggaagagagcagaagtgtttttaggcattcgttcacatacacagattgtcttcagagccaaacgtggtatcagttacataggagatgtagcagtggatgatatttccttccaagattgctcccctttgcttagcccagagagaaagtgtactgatcatgaattcatgtgtgctaataagcactgcattgccaaagacaagctgtgtgattttgtgaatgattgtgctgataattcagatgagactactttcatttgccgtacctccagtgggcgctgtgatttcgaatttgatctttgttcctggaagcaggagaaagatgaggactttgactggaacctgaaagctagcagcatccctgcagcaggcacagagccagcagcagatcacactttgggaaattcatctggtcattacatctttataaagagtttgtttcctcagcagcccatgagagctgccagaatttcaagtccagttataagtaagagaagcaaaaactgcaagattatttttcattatcacatgtatggaaatggcattggggcactcaccttaatgcaggtgtcagtcacaaaccaaacgaaggttctacttaacctcactgtagaacaaggcaatttctggcggagagaagaactgtcactgtttggtgatgaagacttccaactcaaatttgaaggtagagttgggaaaggtcagcgtggagacattgcacttgatgacattgtgcttacagaaaattgtctatcactccatgattccgtgcaagaagaactggcagtgcctcttccaacaggtttctgcccacttggctatagggaatgtcataatggaaaatgctataggctggaacaaagctgtaacttcgtagataactgtggagataatactgatgaaaatgagtgtggtagctcctgtacttttgaaaaaggctggtgtggctggcaaaactcccaggctgacaactttgattgggttttaggggttggctctcatcaaagcttaagacctcccaaagaccacacacttggaaatgaaaatgggcacttcatgtatctggaagctactgcagtgggccttcggggtgacaaagcacacttcaggagtaccatgtggcgagaatccagtgcagcctgcaccatgagcttctggtatttcgtatctgcaaaggccacaggatccattcagattctcatcaagacagagaaaggactatcaaaagtatggcaagaaagtaagcagaaccctggtaatcattggcaaaaggctgacatcctgctaggaaagttaaggaattttgaagtcatatttcaaggtatcagaacaagggacctgggaggaggagctgcaattgatgatattgaatttaaaaactgcacaactgtgggagagatctctgagctttgtccggaaatcactgattttttgtgccgggacaagaagtgcattgcatcccaccttctttgtgactataagccagactgctctgataggtctgatgaagctcactgtgcacattatacaagcacaacaggaagctgcaattttgaaacaagttcaggaaactggaccacagcctgcagtcttactcaagactctgaggatgacttggactgggccattggcagcagaattcctgccaaagcattaattccagactctgatcacacgccaggtagtggtcagcacttcctgtacgtcaactcatctggctccaaggaaggatccgttgccagaattactacttccaaatccttcccagcaagccttggaatgtgtactgttcggttctggttctacatgattgatcccaggagtatgggaatattaaaggtgtataccattgaagaatcggggctaaacatcctggtgtggtcagtgattggaaataaaagaacgggatggacatatggctctgtgcctctctccagtaacagtccgtttaaggtggcatttgaagctgatttggatggaaatgaggacatctttattgctcttgatgacatctcttttaccccagagtgtgtgactggaggtcctgtcccagtgcagccatcaccctgtgaagctgatcagttttcttgtatctacacactccaatgtgtccctctctcagggaaatgtgatggacatgaagactgcatagatggatctgatgaaatggattgtcctctcagccccacccctccactctgtagtaacatggagttcccgtgctctacagacgagtgtataccttccctcctgctatgcgatggagtgcccgactgccactttaatgaagatgagctcatctgctccaacaaaagctgttctaatggagctctggtgtgtgcctcctccaacagctgtatcccagcccaccagcgctgtgatggttttgccgactgcatggatttccagcttgatgagtccagctgctccgaatgtccattaaattactgcagaaatggtgggacttgtgtagtggagaaaaatggtcctatgtgtcgatgtagacaaggctggaaaggaaatcgatgccatatcaagtttaatcctcctgctacagacttcacatacgctcagaataatacatggactctcctgggtattggattagcattcctgatgactcacatcacagttgcagtcttgtgttttcttgcaaacagaaaggtaccaataaggaaaaccgagggaagtggtaactgtgcctttgtcaatccagtttacgggaactggagcaacccagagaaaacagagagttctgtctattccttctcaaacccattatatggcacaacatcaggaagcctggagaccctgtcacatcatctcaaatagcagcatcgagaccaagtctgatccaacatgtgtagtttctagaaaattgaagtctccacaatctgatagaaactcatcttctacaatggtaaaaagagaaaggattgtaaatgccagtgtaattataacatttatgaatgaattttcttgcagaatatagagaatgtttatatggaatcagaatcagtaccttatcttcactgaacatctgaatattttaataaaatttctatttaatcaa

SEQ ID NO: 151397 - DNA, 3616 bp, Homo sapiens
  Payload ID: 9811
  Gene Symbol: MAMDC2
  Gene Name: MAM domain containing 2
  Uniprot ID: Q7Z304
  ENST ID: ENST00000377182
  CDS Start-End: 618-2678
aaattttcctccaggctgtccttggagaattccaccctctttcattctggggagaagaagttaaaattagggccagccctgcgggactgacatgccagatgcagggaagctgtccccagaaataagcgagttcccaccgcggctgggcggggcgggagcctcgggtcccaacccagcggagggactcctggaaggcctgccccttccaagtgtctgcaagggctctggtcccaagctttaaaatcctgagcgaaggcactgcgggccgacctctcctctcccagccagtcgtggctggcctttcaaagtgtgcagttgtctcctccctgtccagccccatcgtcgcccaggaccagctgggccgcggtctgacctgaggctgctgctcagcgccggggcgctggcgctctccattcgagcaccttccagcataccgctcggctccgggagccgctctgcaaagttgggcagctcagagcgcaagctttgcctctcgacttctccctccttgggtccccggcgcccccgcctcccacgatccctttcactaggagcagccagtcccagcgggctggcaacttgcaccccttcctagtcatcctccctgaaacgcgaccatgctgttaaggggcgtcctcctggcgttgcaagccctgcagctcgccggtgccctcgacctgcccgctgggtcctgtgcctttgaagagagcacttgcggctttgactccgtgttggcctctctgccgtggattttaaatgaggaaggccattacatttatgtggatacctcctttggcaagcagggggagaaagctgtgctgctaagtcctgacttacaggctgaggaatggagctgcctccgtttggtctaccagataaccacatcttcggagtctctgtcagatcccagccagctgaacctctacatgagatttgaagatgaaagctttgatcgcttgctttggtcagctaaggaaccttcagacagctggctcatagccagcttggatttgcaaaacagttccaagaaattcaagattttaatagaaggtgtactaggacagggaaacacagccagcatcgcactatttgaaatcaagatgacaaccggctactgtattgaatgtgactttgaagaaaatcatctctgtggctttgtgaaccgctggaatcccaatgtgaactggtttgttggaggaggaagtattcggaatgtccactccattctcccacaggatcacaccttcaagagtgaactgggccactacatgtacgtggactcagtttatgtgaagcacttccaggaggtggcacagctcatctccccgttgaccacggcccccatggctggctgcctgtcattttattaccagatccagcaggggaatgacaatgtcttttccctttacactcgggatgtggctggcctttacgaggaaatctggaaagcagacaggccagggaatgctgcctggaaccttgcggaggtcgagttcagtgctccttaccccatggaggttatttttgaagttgctttcaatggtcccaagggaggttatgttgccctggatgatatttcattctctcctgttcactgccagaatcagacagaacttctgttcagtgccgtggaagccagctgcaattttgagcaagatctctgcaacttttaccaagataaagaaggtccaggttggacccgagtgaaagtaaaaccaaacatgtatcgggctggagaccacactacaggcttagggtattacctgctagccaacacaaagttcacatctcagcctggctacattggaaggctctatgggccctccctaccaggaaacttgcagtattgtctgcgttttcattatgccatctatggatttttaaaaatgagtgacaccctagcagtttacatctttgaagagaaccatgtggttcaagagaagatctggtctgtgttggagtccccaaggggtgtttggatgcaagctgaaatcacctttaagaagcccatgcctaccaaggtggttttcatgagcctatgcaaaagtttctgggactgtgggcttgtagccctggatgacattacaatacaattgggaagctgctcatcttcagagaaacttccacctccacctggagagtgtactttcgagcaagatgaatgtacatttactcaggagaaaagaaaccggagcagctggcacaggaggaggggagaaactcccacttcctacacaggaccaaagggagatcacactactggggtaggctactacatgtacattgaggcctcccatatggtgtatggacaaaaagcacgcctcttgtccaggcctctgcgaggagtctctggaaaacactgcttgacctttttctaccacatgtatggagggggcactggcctgctgagtgtttatctgaaaaaggaagaagacagtgaagagtccctcttatggaggagaagaggtgaacagagcatttcctggctacgagcactgattgaatacagctgtgagaggcaacaccagataatttttgaagccattcgaggagtatcaataagaagtgatattgccattgatgatgttaaatttcaggcaggaccctgtggagaaatggaagatacaactcaacaatcatcaggatattctgaggacttaaatgaaattgagtattaagaaatgatctgcattggatttactagacgaaaaccatacctctcttcaatcaaaatgaaaacaaagcaaatgaatactggacagtcttaacaattttataagttataaaatgactttagagcaccctccttcattacttttgcaaaaacatactgactcagggctctttttttctttttgcatatgacaactgttactagaaatacaggctactggttttgcatagatcattcatcttaattttggtaccagttaaaaatacaaatgtactatattgtagtcattttaaagtacacaaagggcacaatcaaaatgagatgcactcatttaaatctgcattcagtgaatgtattgggagaaaaataggtcttgcaggtttccttttgaattttaagtatcataaatatttttaaagtaaataatacggggtgtcagtaatatctgcagaatgaatgcagtctttcatgctaatgagttagtctggaaaaataaagtcttattttctatgttttattcatagaaatggagtattaatttttaatattttcaccatatgtgataacaaaggatctttcatgaatgtccaagggtaagtcagtattaattaatgctgtattacaaggcaatgctaccttctttattccccctttgaactacctttgaagtcactatgagcacatggatagaaatttaacttttttttgtaaagcaagcttaaaatgtttatgtatacatacccagcaacttttataaatgtgttaaacaattttactgatttttataataaatattttggtaagattttgaataatatgaattcaggcagatatactaaactgcttttatttacttgtttagaaaattgtatatatatgtttgtgtatcctaacagctgctatgaaattataaaattacctaataaaaataatttgaaaatc

SEQ ID NO: 151398 - DNA, 2265 bp, Homo sapiens
  Payload ID: 9811
  Gene Symbol: MAMDC2
  Gene Name: MAM domain containing 2
  ENST ID: ENST00000617216
  CDS Start-End: 618-2265
aaattttcctccaggctgtccttggagaattccaccctctttcattctggggagaagaagttaaaattagggccagccctgcgggactgacatgccagatgcagggaagctgtccccagaaataagcgagttcccaccgcggctgggcggggcgggagcctcgggtcccaacccagcggagggactcctggaaggcctgccccttccaagtgtctgcaagggctctggtcccaagctttaaaatcctgagcgaaggcactgcgggccgacctctcctctcccagccagtcgtggctggcctttcaaagtgtgcagttgtctcctccctgtccagccccatcgtcgcccaggaccagctgggccgcggtctgacctgaggctgctgctcagcgccggggcgctggcgctctccattcgagcaccttccagcataccgctcggctccgggagccgctctgcaaagttgggcagctcagagcgcaagctttgcctctcgacttctccctccttgggtccccggcgcccccgcctcccacgatccctttcactaggagcagccagtcccagcgggctggcaacttgcaccccttcctagtcatcctccctgaaacgcgaccatgctgttaaggggcgtcctcctggcgttgcaagccctgcagctcgccggtgccctcgacctgcccgctgggtcctgtgcctttgaagagagcacttgcggctttgactccgtgttggcctctctgccgtggattttaaatgaggaaggccattacatttatgtggatacctcctttggcaagcagggggagaaagctgtgctgctaagtcctgacttacaggctgaggaatggagctgcctccgtttggtctaccagataaccacatcttcggagtctctgtcagatcccagccagctgaacctctacatgagatttgaagatgaaagctttgatcgcttgctttggtcagctaaggaaccttcagacagctggctcatagccagcttggatttgcaaaacagttccaagaaattcaagattttaatagaaggtgtactaggacagggaaacacagccagcatcgcactatttgaaatcaagatgacaaccggctactgtattgaatgtgactttgaagaaaatcatctctgtggctttgtgaaccgctggaatcccaatgtgaactggtttgttggaggaggaagtattcggaatgtccactccattctcccacaggatcacaccttcaagagtgaactgggccactacatgtacgtggactcagtttatgtgaagcacttccaggaggtggcacagctcatctccccgttgaccacggcccccatggctggctgcctgtcattttattaccagatccagcaggggaatgacaatgtcttttccctttacactcgggatgtggctggcctttacgaggaaatctggaaagcagacaggccagggaatgctgcctggaaccttgcggaggtcgagttcagtgctccttaccccatggaggttatttttgaagttgctttcaatggtcccaagggaggttatgttgccctggatgatatttcattctctcctgttcactgccagaatcagacagaacttctgttcagtgccgtggaagccagctgcaattttgagcaagatctctgcaacttttaccaagatgaaggtccaggttggacccgagtgaaagtaaaaccaaacatgtatcgggctggagaccacactacaggcttagggtattacctgctagccaacacaaagttcacatctcagcctggctacattggaaggctctatgggccctccctaccaggaaacttgcagtattgtctgcgttttcattatgccatctatggatttttaaaaatgagtgacaccctagcagtttacatctttgaagagaaccatgtggttcaagagaagatctggtctgtgttggagtccccaaggggtgtttggatgcaagctgaaatcacctttaagaagcccatgcctaccaaggtggttttcatgagcctatgcaaaagtttctgggactgtgggcttgtagccctggatgacattacaatacaattgggaagctgctcatcttcagagaaacttccacctccacctggagagtgtactttcgagcaagatgaatgtacatttactcaggagaaaagaaaccggagcagctggcacaggaggaggggagaaactcccacttcctacacaggaccaaagggagatcacactactggggtag

SEQ ID NO: 151399 - DNA, 3658 bp, Homo sapiens
  Payload ID: 9812
  Gene Symbol: MAMDC4
  Gene Name: MAM domain containing 4
  Uniprot ID: Q6UXC1
  ENST ID: ENST00000317446
  CDS Start-End: 51-3464
ggaacttcccaggcaccctgtgtggccgcactgctccctctggcccaaccatgcctctgtccagccacctgctgcccgccttggtcctgttcctggcagggtcctcaggctgggcctgggtccccaaccactgcaggagccctggccaggccgtgtgcaacttcgtgtgtgactgcagggactgctcagatgaggcccagtgtggttaccacggggcctcgcccaccctgggcgcccccttcgcctgtgacttcgagcaggacccctgcggctggcgggacattagtacctcaggctacagctggctccgagacagggcaggggccgcactggagggtcctgggcctcactcagaccacacactgggcaccgacttgggctggtacatggccgttggaacccaccgagggaaagaggcatccaccgcagccctgcgctcgccaaccctgcgagaggcagcctcctcttgcaagctgaggctctggtaccacgcggcctctggagatgtggctgaactgcgggtggagctgacccatggcgcagagaccctgaccctgtggcagagcacagggccctggggccctggctggcaggagttggcagtgaccacaggccgcatccggggtgacttccgagtgaccttctctgccacccgaaatgccacccacaggggcgctgtggctctagatgacctagagttctgggactgtggtctgcccaccccccaggccaactgtcccccgggacaccaccactgccagaacaaggtctgcgtggagccccagcagctgtgcgacggggaagacaactgcggggacctgtctgatgagaacccactcacctgtggccgccacatagccaccgactttgagacaggcctgggcccatggaaccgctcggaaggctggtcccggaaccaccgcgctggtggtcctgagcgcccctcctggccacgccgtgaccacagccggaacagtgcacagggctccttcctggtctccgtggccgagcctggcacccctgctatactctccagccccgaattccaagcctcaggcacctccaactgctcgctggtcttctatcagtacctgagtgggtctgaggctggctgcctccagctgttcctgcagactctggggcccggcgccccccgggcccccgtcctgctgcggaggcgccgaggggagctggggaccgcctgggtccgagaccgtgttgacatccagagcgcctaccccttccagatcctcctggccgggcagacaggcccggggggcgtcgtgggtctggacgacctcatcctgtctgaccactgcagaccagtctcggaggtgtccaccctgcagccgctgcctcctgggccccgggccccagccccccagcccctgccgcccagctcgcggctccaggattcctgcaagcaggggcatcttgcctgcggggacctgtgtgtgcccccggaacaactgtgtgacttcgaggagcagtgcgcagggggcgaggacgagcaggcctgtggcaccacagactttgagtcccccgaggctgggggctgggaggacgccagcgtggggcggctgcagtggcggcgtgtctcagcccaggagagccaggggtccagtgcagctgctgctgggcacttcctgtctctgcagcgggcctgggggcagctaggcgctgaggcccgggtcctcacacccctccttggcccttctggccccagctgtgaactccacctggcttattatttacagagccagccccgagaggtctcctgtaactttgagcgggacacatgcagctggtacccaggccacctctcagacacacactggcgctgggtggagagccgcggccctgaccacgaccacaccacaggccaaggccactttgtgctcctggaccccacagaccccctggcctggggccacagtgcccacctgctctccaggccccaggtgccagcagcacccacggagtgtctcagcttctggtaccacctccatgggccccagattgggactctgcgcctagccatgagacgggaaggggaggagacacacctgtggtcgcggtcaggcacccagggcaaccgctggcacgaggcctgggccaccctttcccaccagcctggctcccatgcccagtaccagctgctgttcgagggcctccgggacggataccacggcaccatggcgctggacgatgtggccgtgcggccgggcccctgctgggcccctaattactgctcctttgaggactcagactgcggcttctcccctggaggccaaggtctctggaggcggcaggccaatgcctcgggccatgctgcctggggccccccaacagaccataccactgagacagcccaagggcactacatggtggtggacacaagcccagacgcactaccccggggccagacggcctccctgacctccaaggagcacaggcccctggcccagcctgcttgtctgaccttctggtaccacgggagcctccgcagcccaggcaccctgcgggtctacctggaggagcgcgggaggcaccaggtgctcagcctcagtgcccacggcgggcttgcctggcgcctgggcagcatggacgtgcaggccgagcgagcctggagggtggtgtttgaggcagtggccgcaggcgtggcacactcctacgtggctctggatgatctgctcctccaggacgggccctgccctcagccaggttcctgtgattttgagtctggcctgtgtggctggagccacctggcctggcccggcctgggcggatacagctgggactggggcgggggagccaccccctctcgttacccccagccccctgtggaccacaccctgggcacagaggcaggccactttgccttctttgaaactggcgtgctgggccccgggggccgggccgcctggctgcgcagcgagcctctgccggccaccccagcctcctgcctccgcttctggtaccacatgggttttcctgagcacttctacaagggggagctgaaggtactgctgcacagtgctcagggccagctggctgtgtggggcgcaggcgggcatcggcggcaccagtggctggaggcccaggtggaggtagccagtgccaaggagttccagatcgtgtttgaagccactctgggcggccagccagccctggggcccattgccctggatgacgtggagtatctggctgggcagcattgccagcagcctgcccccagcccggggaacacagccgcacccgggtctgtgccagctgtggttggcagtgccctcctattgctcatgctcctggtgctgctgggacttgggggacggcgctggctgcagaagaaggggagctgccccttccagagcaacacagaggccacagcccctggctttgacaacatccttttcaatgcggatggtgtcaccctcccggcatctgtcaccagtgatccgtagaccaccccagacaaggccccgcttcctcacgtgacatccagcacttggtcagaccctagccagggaccggacacctgccccgcccaggctgggacaggctgcaggtctcaggatatgctgaggcctgggcgttccctgccctgtgctgactctgttgctctgtgaataaacaccctggcccatgagggcagccc

SEQ ID NO: 151400 - DNA, 3895 bp, Homo sapiens
  Payload ID: 9812
  Gene Symbol: MAMDC4
  Gene Name: MAM domain containing 4
  Uniprot ID: Q6UXC1
  ENST ID: ENST00000445819
  CDS Start-End: 51-3701
ggaacttcccaggcaccctgtgtggccgcactgctccctctggcccaaccatgcctctgtccagccacctgctgcccgccttggtcctgttcctggcagggtcctcaggctgggcctgggtccccaaccactgcaggagccctggccaggccgtgtgcaacttcgtgtgtgactgcagggactgctcagatgaggcccagtgtggttaccacggggcctcgcccaccctgggcgcccccttcgcctgtgacttcgagcaggacccctgcggctggcgggacattagtacctcaggctacagctggctccgagacagggcaggggccgcactggagggtcctgggcctcactcagaccacacactgggcaccgacttgggctggtacatggccgttggaacccaccgagggaaagaggcatccaccgcagccctgcgctcgccaaccctgcgagaggcagcctcctcttgcaagctgaggctctggtaccacgcggcctctggagatgtggctgaactgcgggtggagctgacccatggcgcagagaccctgaccctgtggcagagcacagggccctggggccctggctggcaggagttggcagtgaccacaggccgcatccggggtgacttccgagtgaccttctctgccacccgaaatgccacccacaggggcgctgtggctctagatgacctagagttctgggactgtggtctgcccaccccccaggccaactgtcccccgggacaccaccactgccagaacaaggtctgcgtggagccccagcagctgtgcgacggggaagacaactgcggggacctgtctgatgagaacccactcacctgtggccgccacatagccaccgactttgagacaggcctgggcccatggaaccgctcggaaggctggtcccggaaccaccgcgctggtggtcctgagcgcccctcctggccacgccgtgaccacagccggaacagtgcacagggctccttcctggtctccgtggccgagcctggcacccctgctatactctccagccccgaattccaagcctcaggcacctccaactgctcgctggtcttctatcagtacctgagtgggtctgaggctggctgcctccagctgttcctgcagactctggggcccggcgccccccgggcccccgtcctgctgcggaggcgccgaggggagctggggaccgcctgggtccgagaccgtgttgacatccagagcgcctaccccttccagatcctcctggccgggcagacaggcccggggggcgtcgtgggtctggacgacctcatcctgtctgaccactgcagaccagtctcggaggtgtccaccctgcagccgctgcctcctgggccccgggccccagccccccagcccctgccgcccagctcgcggctccaggattcctgcaagcaggggcatcttgcctgcggggacctgtgtgtgcccccggaacaactgtgtgacttcgaggagcagtgcgcagggggcgaggacgagcaggcctgtggcaccacagactttgagtcccccgaggctgggggctgggaggacgccagcgtggggcggctgcagtggcggcgtgtctcagcccaggagagccaggggtccagtgcagctgctgctgggcacttcctgtctctgcagcgggcctgggggcagctaggcgctgaggcccgggtcctcacacccctccttggcccttctggccccagctgtgaactccacctggcttattatttacagagccagccccgaggcttcctggcactagttgtggtggacaacggctcccgggagctggcatggcaggccctgagcagcagtgcaggcatctggaaggtggacaaggtccttctaggggcccgccgccggcccttccggctggagtttgtcggtttggtggacttggatggccctgaccagcagggagctggggtggacaacgtgaccctgagggactgtagccccacagtgaccaccgagagagacagagaggtctcctgtaactttgagcgggacacatgcagctggtacccaggccacctctcagacacacactggcgctgggtggagagccgcggccctgaccacgaccacaccacaggccaaggccactttgtgctcctggaccccacagaccccctggcctggggccacagtgcccacctgctctccaggccccaggtgccagcagcacccacggagtgtctcagcttctggtaccacctccatgggccccagattgggactctgcgcctagccatgagacgggaaggggaggagacacacctgtggtcgcggtcaggcacccagggcaaccgctggcacgaggcctgggccaccctttcccaccagcctggctcccatgcccagtaccagctgctgttcgagggcctccgggacggataccacggcaccatggcgctggacgatgtggccgtgcggccgggcccctgctgggcccctaattactgctcctttgaggactcagactgcggcttctcccctggaggccaaggtctctggaggcggcaggccaatgcctcgggccatgctgcctggggccccccaacagaccataccactgagacagcccaagggcactacatggtggtggacacaagcccagacgcactaccccggggccagacggcctccctgacctccaaggagcacaggcccctggcccagcctgcttgtctgaccttctggtaccacgggagcctccgcagcccaggcaccctgcgggtctacctggaggagcgcgggaggcaccaggtgctcagcctcagtgcccacggcgggcttgcctggcgcctgggcagcatggacgtgcaggccgagcgagcctggagggtggtgtttgaggcagtggccgcaggcgtggcacactcctacgtggctctggatgatctgctcctccaggacgggccctgccctcagccaggttcctgtgattttgagtctggcctgtgtggctggagccacctggcctggcccggcctgggcggatacagctgggactggggcgggggagccaccccctctcgttacccccagccccctgtggaccacaccctgggcacagaggcaggccactttgccttctttgaaactggcgtgctgggccccgggggccgggccgcctggctgcgcagcgagcctctgccggccaccccagcctcctgcctccgcttctggtaccacatgggttttcctgagcacttctacaagggggagctgaaggtactgctgcacagtgctcagggccagctggctgtgtggggcgcaggcgggcatcggcggcaccagtggctggaggcccaggtggaggtagccagtgccaaggagttccagatcgtgtttgaagccactctgggcggccagccagccctggggcccattgccctggatgacgtggagtatctggctgggcagcattgccagcagcctgcccccagcccggggaacacagccgcacccgggtctgtgccagctgtggttggcagtgccctcctattgctcatgctcctggtgctgctgggacttgggggacggcgctggctgcagaagaaggggagctgccccttccagagcaacacagaggccacagcccctggctttgacaacatccttttcaatgcggatggtgtcaccctcccggcatctgtcaccagtgatccgtagaccaccccagacaaggccccgcttcctcacgtgacatccagcacttggtcagaccctagccagggaccggacacctgccccgcccaggctgggacaggctgcaggtctcaggatatgctgaggcctgggcgttccctgccctgtgctgactctgttgctctgtgaataaacaccctggcccatgagggcagccc

SEQ ID NO: 151401 - DNA, 2603 bp, Homo sapiens
  Payload ID: 9812
  Gene Symbol: MAMDC4
  Gene Name: MAM domain containing 4
  ENST ID: ENST00000479475
  CDS Start-End: 1-711
ctcagcttctggtaccacctccatgggccccagattgggactctgcgcctagccatgagacgggaaggggaggagacacacctgtggtcgcggtcaggcacccagggcaaccgctggcacgaggcctgggccaccctttcccaccagcctggctcccatgcccagtaccagctgctgttcgagggcctccgggacggataccacggcaccatggcgctggacgatgtggccgtgcggccgggcccctgctgggcccctaattactgctcctttgaggactcagactgcggcttctcccctggaggccaaggtctctggaggcggcaggccaatgcctcgggccatgctgcctggggccccccaacagaccataccactgagacagcccaagggcactacatggtggtggacacaagcccagacgcactaccccggggccagacggcctccctgacctccaaggagcacaggcccctggcccagcctgcttgtctgaccttctggtaccacgggagcctccgcagcccaggcaccctgcgggtctacctggaggagcgcgggaggcaccaggtgctcagcctcagtgcccacggcgggcttgcctggcgcctgggcagcatggacgtgcaggccgagcgagcctggagggtgagtgcagggtggggtgcccctccccctccccctcccccgagggctgcctggacccgctgaggctgccctgccctgcacccgccaggtggtgtttgaggcagtggccgcaggcgtggcacactcctacgtggctctggatgatctgctcctccaggacgggccctgccctcagccaggtgggagccctgccgtggcctcggccctgctctggggtgcctgcctagccctttcccttcgtagtcgtggtgcccagggcttgggccgtggggcagcaccactcacccacccatgtcctgcaggttcctgtgattttgagtctggcctgtgtggctggagccacctggcctggcccggcctgggcggatacagctgggactggggcgggggagccaccccctctcgttacccccagccccctgtggaccacaccctgggcacagaggcaggccactttgccttctttgaaactggcgtgctgggccccgggggccgggccgcctggctgcgcagcgagcctctgccggccaccccagcctcctgcctccgcttctggtaccacatgggttttcctgagcacttctgtgagtccggctgggccaatgggtgcctgggcaacgggggcagcaggggtccaggagcagaggtggggaggtggcctccccagcccgcccctggttaggcgtgcaggagccccaggaccccaggcctgacacgccctggccctgctctcagacaagggggagctgaaggtactgctgcacagtgctcagggccagctggctgtgtggggcgcaggcgggcatcggcggcaccagtggctggaggcccaggtggaggtagccagtgccaaggagttccagatcgtgtttgaagccactctgggcggccagccagccctggggcccattgccctggatgacgtggagtatctggctgggcagcattgccagcagcctgcccccagcccgggtgagccctgggctgcagtggaggcacggaggagggcccaaggggccagcctggctcggggtttgccaggcttaccagtgtgtggtcccaggagctgcgagcatgctgcacccagacaggacaagagagctgccaggcccaggccctgtgccctcctcactctgccctgctcacccctggggccgctgcctgggctgggctgtccctggggtgcagcctctggggcctgccctgcctggctgtggcctctgtgctccctgtgcccacacccagggcaaggtccatcctggaggaaccgccagccgggtcagggcagccactgactgctctcacttggtgagggaaagaatctcgcctggggccatgagccccaccaagtctgcagacagcagctgcctgtctgccaggccccatccttgtggtagcagaaccaataccctctgcctttgaaataggggtgaaccccaggagccagcagaggctgagggaccatgcagccccaggcttcctccttagccccagatgtgggggctgctttggagggctcacatgtccctatggcccacagggaacacagccgcacccgggtctgtgccagctgtggttggcagtgccctcctattgctcatgctcctggtgctgctgggacttgggggacggcgctggctgcagaagaaggggagctgccccttccagagcaacacagaggccacagcccctggctttgacaacatccttttcaatgcggatggtgtcaccctcccggcatctgtcaccagtgatccgtagaccaccccagacaaggccccgcttcctcacgtgacatccagcacttggtcagaccctagccagggaccggacacctgccccgcccaggctgggacaggctgcaggtctcaggatatgctgaggcctgggcgttccctgccctgtgctgactctgttgctctgtgaataaacaccctggcccatgagggcagccc

SEQ ID NO: 151402 - DNA, 478 bp, Homo sapiens
  Payload ID: 9813
  Gene Symbol: MDGA1
  Gene Name: MAM domain containing glycosylphosphatidylinositol anchor 1
  ENST ID: ENST00000418178
  CDS Start-End: 1-478
tgaaccagcacaatgcggtggtcaaggccatcccggtccggcgtgtggagaaggggcagctgctggagtacatcctgaccgatctccgtgtgccccacagctatgaggtccgcctcacaccctataccaccttcggggctggtgacatggcctcccgcatcatccactacacagagcacaacacctgccactttgaggatgagaagatctgtggctatacccaggacctgacagacaactttgactggacgcggcagaatgccctcacccagaaccccaaacgctcccccaacactggtccccccaccgacataagtggcacccctgagggctactacatgttcatcgagacatcgaggcctcgggagctgggggaccgtgcaaggttagtgagtcccctctacaatgccagcgccaagttctactgtgtctccttcttctaccacatgtacgggaaacacatcggctccctcaacct

SEQ ID NO: 151403 - DNA, 10736 bp, Homo sapiens
  Payload ID: 9813
  Gene Symbol: MDGA1
  Gene Name: MAM domain containing glycosylphosphatidylinositol anchor 1
  Uniprot ID: Q8NFP4
  ENST ID: ENST00000434837
  CDS Start-End: 1180-4047
ggagagcgagagaccgaacgaggagacgcgaggaggagggaggaggaagagagggagggaggcgggaggagcgcggaatgaaaagctcggaggggcgaaaaagcagcacagcaaagcccaagttgctgagcgagcggagcgctcccgcggcccggagccgagcggccgccgcgccccggagcccggcccggccccgcccgctctgggcccccgcaggccaaggccgccgggcgggggcggggacgaccaacttggggcgcggcgtagccccgctctcccgagagctcggagcccgggagggctacggccgcggccagacggcgggagaggagcgcggcgagcggaggcggcgagcggcgcccgcgccgcagccccggcctgggcgagagcgcgaatatttttcaaaagactcaaactttcctcctttccccgttttctggggcccttcttgcctggaattgctctccagattcccgcggggcgccgggctgctattcttcccccgggtttatcggcggctcggctaacttcacggacccggggacccgcggcgctcgtccctcggccgaacccagcccgcgctgctccccggatcaggagggccgggcccggggctgcttcgccgccgcgagtgctttcagcccggccccctggagtcgggccgctgagcccacggcagcggccgcaggactggaaacagcagattgattaactcgagcggagccccggcctccccgactccgctccgctgaggggcggccccagtgcggggaaacgacaagtttgtcagtcgtccgtggcctgttggatcgaagcgccgcctccgccgccgagaggtccccggcgcctagcatcccgcgcggacggccctgggtacccggggcggctcggcggccgggctcctcgggtcggggcgctggctgctgtgccgggcgcgccgaggcacccggggctgggccagcgccccctgcgtccccacgcgggcagcggccccgccggaggagaaacacgggtcgccgccacctccgcctcttcagtctcctggtcttcgtcgccgctctctctctcacctctcagggaaagggggggacataggggcgtcgcggggccccggcgaatgcgccccccgccgcctctcgggctgcgccgcctcgcggggatgaagcaccggccgtgaagatggaggtgacctgccttctacttctggcgctgatccccttccactgccggggacaaggagtctacgctccagcccaggcgcagatcgtgcatgcgggccaggcatgtgtggtgaaagaggacaatatcagcgagcgtgtctacaccatccgggagggggacaccctcatgctgcagtgccttgtaacagggcaccctcgaccccaggtacggtggaccaagacggcaggtagcgcctcggacaagttccaggagacatcggtgttcaacgagacgctgcgcatcgagcgtattgcacgcacgcagggcggccgctactactgcaaggctgagaacggcgtgggggtgccggccatcaagtccatccgcgtggacgtgcagtacctggatgagccaatgctgacggtgcaccagacggtgagcgatgtgcgaggcaacttctaccaggagaagacggtgttcctgcgctgtactgtcaactccaacccgcctgcccgcttcatctggaagcggggttccgataccctatcccacagccaggacaatggggttgacatctatgagcccctctacactcagggggagaccaaggtcctgaagctgaagaacctgcggccccaggactatgccagctacacctgccaggtgtctgtgcgtaacgtgtgcggcatcccagacaaggccatcaccttccggctcaccaacaccacggcaccaccagccctgaagctgtctgtgaacgaaactctggtggtgaaccctggggagaatgtgacggtgcagtgtctgctgacaggcggtgatcccctcccccagctgcagtggtcccatgggcctggcccactgcccctgggtgctctggcccagggtggcaccctcagcatcccttcagtgcaggcccgggactctggctactacaactgcacagccaccaacaatgtgggcaaccctgccaagaagactgtcaacctgctggtgcgatccatgaagaacgctacattccagatcactcctgacgtgatcaaagagagtgagaacatccagctgggccaggacctgaagctatcgtgccacgtggatgcagtgccccaggagaaggtgacctaccagtggttcaagaatggcaagccggcacgcatgtccaagcggctgctggtgacccgcaatgatcctgagctgcccgcagtcaccagcagcctagagctcattgacctgcacttcagtgactatggcacctacctgtgcatggcttctttcccaggggcacccgtgcccgacctcagcgtcgaggtcaacatctcctctgagacagtgccgcccaccatcagtgtgcccaagggtagggccgtggtgaccgtgcgcgagggatcgcctgccgagctgcaatgcgaggtgcggggcaagccgcggccgccagtgctctggtcccgcgtggacaaggaggctgcactgctgccctcggggctgcccctggaggagactccggacgggaagctgcggctggagcgagtgagccgagacatgagcgggacctaccgctgccagacggcccgctataatggcttcaacgtgcgcccccgtgaggcccaggtgcagctgaacgtgcagttcccgccggaggtggagcccagttcccaggacgtgcgccaggcgctgggccggcccgtgctcctgcgctgctcgctgctgcgaggcagcccccagcgcatcgcctcggctgtgtggcgtttcaaagggcagctgctgccgccgccgcctgttgttcccgccgccgccgaggcgccggatcacgcggagctgcgcctcgacgccgtaactcgcgacagcagcggcagctacgagtgcagcgtctccaacgatgtgggctcggctgcctgcctcttccaggtctccgccaaagcctacagcccggagttttacttcgacacccccaaccccacccgcagccacaagctgtccaagaactactcctacgtgctgcagtggactcagagggagcccgacgctgtcgaccctgtgctcaactacagactcagcatccgccagttgaaccagcacaatgcggtggtcaaggccatcccggtccggcgtgtggagaaggggcagctgctggagtacatcctgaccgatctccgtgtgccccacagctatgaggtccgcctcacaccctataccaccttcggggctggtgacatggcctcccgcatcatccactacacagagcccatcaactctccgaacctttcagacaacacctgccactttgaggatgagaagatctgtggctatacccaggacctgacagacaactttgactggacgcggcagaatgccctcacccagaaccccaaacgctcccccaacactggtccccccaccgacataagtggcacccctgagggctactacatgttcatcgagacatcgaggcctcgggagctgggggaccgtgcaaggttagtgagtcccctctacaatgccagcgccaagttctactgtgtctccttcttctaccacatgtacgggaaacacatcggctccctcaacctcctggtgcggtcccggaacaaaggggctctggacacgcacgcctggtctctcagtggcaataagggcaatgtgtggcagcaggcccatgtgcccatcagccccagtgggcccttccagattatttttgagggggttcgaggcccgggctacctgggggatattgccatagatgacgtcacactgaagaagggggagtgtccccggaagcagacggatcccaataaagtggtggtgatgccgggcagtggagccccctgccagtccagcccacagctgtgggggcccatggccatcttcctcttggcgttgcagagatgatgagagctgtgtggccacccccccaaccttgcccccggcacaccaaagtgtccacattgtaccaaagactgacccccgccagctggggtgcccaggggcagggccggcccgccagggagggggcctgcattggctgcaaggatgagcagagaacaaggacagaggccaggcactgaggccctggagacagctgttccacttgcacacacgcacacactcatgctcacacacacagagatatattaaagcacaagtttctatctgacctgccagcaccttctttactgcaaagacaggggacttgcctgaatggcatccgccaacccagggacctcggcgcaacataggccttgtccttgctgcactcgtggtgtgcttctgactttaccctgtcccctaagtcaaggccgaactccagcctggtggctttgccagaagggagccagaagtggggcagacatggagcccctcccttggtcagactctgggactcctgagatgggagaggcagggatcagaggacgaacaggtgggactttgcgagctctgtgactgtcccacgtccaggagacaaggaaggtagggcacctgctgcacacgattctgtccagagtgagcactggatggtggagaccataggtcaccccagattccttgacctatttctgggacaccatatttccctcctcagtgtgcaccctttgaagggacccagcacagggtcttgggcctgggcagtctgaagactgataacttccccactccaccctacaagcagtgggactcctgagaacacggttctctcctagcctcagcccccagctgggtctcagaggagctgggggagcggtggccagcccattttctggggtgaggcttgacttggagaaaggcagaagagacgtcccgcttctgtgatttggtgcccccatatcagacaatgaatttggaagtggagaggggccttcatttcttatctacttggcatgaaagggtgccctggataggagggtgtgtacagggcaaaatgccaaaaagcactgtctagttgaaagttcccttctccacccaggggcagtgaaggaggaggggcttatagagctgggattggtggagggagcaggtgccagtcccctcactctctgggagctgtgaaagggatccctgtccttgggtcctgggttaggcacctgagattgacatgatgggatctagatctttcctccttgacatcacctgagcccccacctagccatccatgggagagagaaggcccagccccttctagaatgactctttaggcatgcgtgcatatgtgtgtatgtgtttgtgcccgtctgtgtctaggtaccaccgtgggtacattgttgggcaggagtgtgtgcaaacacaggtctgtgtgtgcaatctcacatatctgcctgtgagactggattgagacccattcgtttctatgaatgtccgtgtacgtcagcgtgtgtgtccaccttcctgagtgatgtgttcgcttgtagggtgctggctgaatagactctgtccagccctgttctgtagtctcaagctgcctgcgatggcctgaaattccacctttcatcccctatggatgacggagagcttacagatgaccctattgaatgcaagcacctttggtgaggagcatcacagggctccttctggagcatttggtggggacagctgcagagaagaggcctggaactcgggcagcactgcagtgccaggaggcaggcggggaaccgaggcaaaggctgcccatctccccctgccaggcctgtgtgatcattatcaccaacagctggtgggtggccgggccaggatgcagcggggccttctgatgcccaatcagcacggctgccttcctgacccagtcaaggcctctgtctgaaatgagtcgctccaggttctcagcatacacttccatcgcgtctgtcgggtattgttccttaactgtcccatctgtgcagagtccattgccccaactagactgtgagctcctcctctgagccttccaagtcccccctccaccttcgccacctcccgctcgtgcccagcacaagtgagcctggtgtggaaaccactccattgcccggtggaatggattctgtaatcagtggttcctggccttgcctgcagaatagaaccaccagagtcctttaaaaagtattgctgcttggttcccacctcagaggttctgagttaattggactggagcgcagtcggacatcaagaaatgttgaaaagctccttgggttctcctgacagcaggaaccactggcctggcaccacctgggtgcttcctctgtgccctcgctggggtaggcattggagcaccagagatgaatagccccaagtgctccctctttggggttcccaaggcaccctgtgcctgcttccctcagaggaccttccaatccatttgccccgcaaccctggctgctccgacaggggagacttgtctcccttgttcccctcaggatccatagagtggacagtaaaggtgctcagtacatgttggctgagctgaactgcatacatgtggcccccaggttcctggtctttatggacgaagggcacaaggtggaggggggatggggggatgctgctggaggtctcagtgggtgcagacagccctgccttgaggatggcttgacctgggattgacaaaatgtgtctgctgaaatgctgaggtccccacgtgtgaatgggtgaggctgatgtggatgtctgtgtgtgccagcaggtgggtgggggatgtgggtgtcagtgtatgccagtgggcactgtaaatgtctaggcatgtgctggtctctgtgtgtttgtgtgttcctcagcaggaatgagtgtctttgtgtatcacctggtgacttgtcagtgtctgtgtctgtgtgtgcctgtgagccagcatctctgtatcagtgttgctcatgctgtgtctttgtgcgccatggtgtgtcagtgtctgtgtgttgatgggtggcccatgagtgacccccgccaggggagaccaggctggctggatccagcacatctccccagtggcagcctcgccctctgggtcagggtgactgaggcattttgtggccttaaaacggggtgttcagggtcagccctcagggtgctggggcccttccatcccttgtccccttcaggttggtgaaaaggactccgggggccaggtgctgtatagcagcttatggaagtctcagctgggctatcctgcccttgggagcacagacaggctcctagggtgctgagtgaagcctgaagaccaagccccctcctcctggaatgctccttccacccctacctctcagagatgggcctgacacctctttctcattcattctccttttccctgtgctctgggaaagcccctggctcaggctgtcagagtgaggatggacctcaaaagtttgatcccctcgtgcagatgaagaagctgaagcccagagtggggaaggggagtggcccaaggtcacacagctagtttgagtagagccagtcttgggagagccaagtactacagccctgggggtgtcacaccgcttgtcactgcccctgaggtctcctgccaaacaactgcagggagtttggctaacagtcctgtgtccagggtgccggtggggatgttatagatgttgctgggatcctgccctcggctccaaattctggcctctcatcccaggctgcagacccttctgccccatgacaggcctgggtgccacacagaggtggccaccctcccaccacagtgtctgcagctgctgcccttctcccaggcccccagacagaagagaccctgtttcccctcctctcccctgtgacttcacaagagcttgggctaggagtgaaggtcagcatgttctcatgtgctcatcctcttggtttccccaaagaccgggagggtcacggatggggcgtgcagaatccttgtgttttttctcgctgggcagcttgaggggctggggagtattcccagggtctttgctctggagagtccctgcagagccactggctgaggttgggttcagggttcagcggagtcctccatgcttccaaaggccgggaagcacccgcctctctatcgagtcagtgctgtgcgtgtgtgtctgagaatgtgtgtgatgtgtggagtgtgcgtgtgtttgtgtgtgtgtgtgtgtgtgttggggcagaaggaccactctttcctggggatcccttgacccttataactagaagggaccttagggagcatctaagctggtgcccccattgtacaggcgaggtccagagggatggcatctgcccaccccaccccttgccctcttgttgcctgcactcatttcccagggaccctcctaggataggactgccctccttcctggccccctcccgccatcctcccagccacccacataatcaccatctcagcccaactctggtggccctctaggtctccatgcattcttcctgccctagagtagccagctcaccaaggcctttatccccagcccaggagaagggtcagggagggaaggggctgcaccagccctgagacctcaaagacttgggagaaaagccaaaactcctcatgcccaggcccacatgtctgaccaccccagcccaccccgccaccaaggtaaaagcacaacaggagacccccttattaatgggtgaaatgattggggttgtttttttagtcacacagccccatcctcacccctttgccttgctgtctgtctccaccccagcctctgttccccatttgcctctctttcacctccaagcccccaaatgtaacctctagttgcggacgcggttgttctatcaataaagctgcagtgttctagcgctcagcgtcagccgtgtgtgttggcagggcagagtgggccagggtcggggccggggcactggagggctcctctcagctccctgggggcagcctttcttctctttggcacctgtcgacagggatcctgctctgtggcctggacagtgaggacctgcatcctggtctgctcccagtgaacttgtgtgcatttgttcattcagcaaataccaaccaaacactgcctttgtggaagcccctgtttaatgggagagatggacagtaagctaataatgacaccaagacatatataatgatgtgtacagtgagggctgggaagggaaattggtgctatgaaagaaggtatgaagagggttcttatttgggttggggcttcggggaagacttctctaagagacatttaggagagacagaatgattggagttagcctgttgggattgggagaggcttctgagcagagggaacagaatatgcaaaggccaacagggcccaaaaacttagaaggctcaaggaaggggagtaagggcaaaggaggaggactaaagttggtatggtggttgaaatgccattttcccttctcggcacccaaccctaccatccctcctacacgcttggagtcccttccctcttaatctctattctggccctacagaccccaccctgcaccctacttggggctgcctcccttattcaccaccagctagctgcatccttgccctaagatcaagttatgccaacctttccctttaccccagacctctcagaattctagaatttcagagctaggaggtccttaaaggtcacttatttcaaacatctactcatatattgtaggtgagatgggcttgccaaggtcatggggataggcagtgatgagcatttgcaaagtgaccccaaatcaagggtgtggatgtcatgatatggactacatcatatcaggcaaatgacaggaagtgtctttcaggttacttggttacaatgattcaggtaggtcgattgggcagtttcacttccatgttccagatggggaaactgaagctcagattacaagaccaagggctccctctccctaccacctaagttttattggctctcatgttgggtaacttcttgctggcacacctggcctttcttttctaatggaagaggaagggtctaagggactcaccactgctgtaggttggctccctgagcacaggaagagaaatccgctcaagctcactcaagtacaggtgcattattgtgaggacaaacacagtgagggggatgggcactcagaaatccaaacaggagttgcaacagggatggttttcctgaaccagatgggcattttggattcaaggtagctctaggatcatcatctacagaagtttctggtgcttctgtattcttctggtgcttctgtattctacctgtggtagaataaagatggctgcaaatcccatgttatccttcctgtagagaggcagagtctaattcccttcctcttgaatctgggttgctcttagtgccttgtttgtgcaatagaatgtgacatgctgagttgaagatgccttggagcttcagctcaggcctcttggaacgttctctctggaagccctgaactgccacctaggatgtcctctgagttgctctgagaccgtcatgctggaggggctctggctgaccatcccagctgagtccagccttccagccatctccaccaaagcaccagaagatatgggagtgcagctgcctcagaccttccagaccagcctaactgccacctgaattgctcggccaagctctgtccaaattcctgacccatcgtcatgggatataataaaatagttgttttaa

SEQ ID NO: 151404 - DNA, 594 bp, Homo sapiens
  Payload ID: 9813
  Gene Symbol: MDGA1
  Gene Name: MAM domain containing glycosylphosphatidylinositol anchor 1
  ENST ID: ENST00000515437
  CDS Start-End: 207-594
agtctccccgcttgttagctgctgcgattgtctgcgctcccacgggccgacctaaaacaattcttgcgcacacgctgagataaataacggcgacaggtggagcagctccagcccaggcgcagatcgtgcatgcgggccaggcatgtgtggtgaaagaggacaatatcagcgagcgtgtctacaccatccgggagggggacaccctcatgctgcagtgccttgtaacagggcaccctcgaccccaggtacggtggaccaagacggcaggtagcgcctcggacaagttccaggagacatcggtgttcaacgagacgctgcgcatcgagcgtattgcacgcacgcagggcggccgctactactgcaaggctgagaacggcgtgggggtgccggccatcaagtccatccgcgtggacgtgcagtacctggatgagccaatgctgacggtgcaccagacggtgagcgatgtgcgaggcaacttctaccaggagaagacggtgttcctgcgctgtactgtcaactccaacccgcctgcccgcttcatctggaagcggggttccgataccctatcccacagccaggacaatggggttgaca

SEQ ID NO: 151405 - DNA, 3021 bp, Homo sapiens
  Payload ID: 9813
  Gene Symbol: MDGA1
  Gene Name: MAM domain containing glycosylphosphatidylinositol anchor 1
  Uniprot ID: Q8NFP4
  ENST ID: ENST00000505425
  CDS Start-End: 1-2922
atggaggtgacctgccttctacttctggcgctgatccccttccactgccggggacaaggagtctacgctccagcccaggcgcagatcgtgcatgcgggccaggcatgtgtggtgaaagaggacaatatcagcgagcgtgtctacaccatccgggagggggacaccctcatgctgcagtgccttgtaacagggcaccctcgaccccaggtacggtggaccaagacggcaggtagcgcctcggacaagttccaggagacatcggtgttcaacgagacgctgcgcatcgagcgtattgcacgcacgcagggcggccgctactactgcaaggctgagaacggcgtgggggtgccggccatcaagtccatccgcgtggacgtgcagtacctggatgagccaatgctgacggtgcaccagacggtgagcgatgtgcgaggcaacttctaccaggagaagacggtgttcctgcgctgtactgtcaactccaacccgcctgcccgcttcatctggaagcggggttccgataccctatcccacagccaggacaatggggttgacatctatgagcccctctacactcagggggagaccaaggtcctgaagctgaagaacctgcggccccaggactatgccagctacacctgccaggtgtctgtgcgtaacgtgtgcggcatcccagacaaggccatcaccttccggctcaccaacaccacggcaccaccagccctgaagctgtctgtgaacgaaactctggtggtgaaccctggggagaatgtgacggtgcagtgtctgctgacaggcggtgatcccctcccccagctgcagtggtcccatgggcctggcccactgcccctgggtgctctggcccagggtggcaccctcagcatcccttcagtgcaggcccgggactctggctactacaactgcacagccaccaacaatgtgggcaaccctgccaagaagactgtcaacctgctggtgcgatccatgaagaacgctacattccagatcactcctgacgtgatcaaagagagtgagaacatccagctgggccaggacctgaagctatcgtgccacgtggatgcagtgccccaggagaaggtgacctaccagtggttcaagaatggcaagccggcacgcatgtccaagcggctgctggtgacccgcaatgatcctgagctgcccgcagtcaccagcagcctagagctcattgacctgcacttcagtgactatggcacctacctgtgcatggcttctttcccaggggcacccgtgcccgacctcagcgtcgaggtcaacatctcctctgagacagtgccgcccaccatcagtgtgcccaagggtagggccgtggtgaccgtgcgcgagggatcgcctgccgagctgcaatgcgaggtgcggggcaagccgcggccgccagtgctctggtcccgcgtggacaaggaggctgcactgctgccctcggggctgcccctggaggagactccggacgggaagctgcggctggagcgagtgagccgagacatgagcgggacctaccgctgccagacggcccgctataatggcttcaacgtgcgcccccgtgaggcccaggtgcagctgaacgtgcagttcccgccggaggtggagcccagttcccaggacgtgcgccaggcgctgggccggcccgtgctcctgcgctgctcgctgctgcgaggcagcccccagcgcatcgcctcggctgtgtggcgtttcaaagggcagctgctgccgccgccgcctgttgttcccgccgccgccgaggcgccggatcacgcggagctgcgcctcgacgccgtaactcgcgacagcagcggcagctacgagtgcagcgtctccaacgatgtgggctcggctgcctgcctcttccaggtctccgccaaagcctacagcccggagttttacttcgacacccccaaccccacccgcagccacaagctgtccaagaactactcctacgtgctgcagtggactcagagggagcccgacgctgtcgaccctgtgctcaactacagactcagcatccgccagttgaaccagcacaatgcggtggtcaaggccatcccggtccggcgtgtggagaaggggcagctgctggagtacatcctgaccgatctccgtgtgccccacagctatgaggtccgcctcacaccctataccaccttcggggctggtgacatggcctcccgcatcatccactacacagagcccatcaactctccgaacctttcagacaacacctgccactttgaggatgagaagatctgtggctatacccaggacctgacagacaactttgactggacgcggcagaatgccctcacccagaaccccaaacgctcccccaacactggtccccccaccgacataagtggcacccctgagggctactacatgttcatcgagacatcgaggcctcgggagctgggggaccgtgcaaggttagtgagtcccctctacaatgccagcgccaagttctactgtgtctccttcttctaccacatgtacgggaaacacatcggctccctcaacctcctggtgcggtcccggaacaaaggggctctggacacgcacgcctggtctctcagtggcaataagggcaatgtgtggcagcaggcccatgtgcccatcagccccagtgggcccttccagattatttttgagggggttcgaggcccgggctacctgggggatattgccatagatgacgtcacactgaagaagggggagtgtccccggaagcagacggatcccaataaaggtgcaagacgggaaggaggtgggggagctgaatctggagggagctgtgcgtggcgggggttcctgtctgttgagggagggtgtttgggtctgaataggggttcagaatgtctgagtgatgggaatcatgtggctctgactgtgtgaaggtgtgccccacactcactcaggctgtgtacttgtgtaaacaatgagaagcctggcccccaccctcgtgatgagcatactgacctgttcacggtatca

SEQ ID NO: 151406 - DNA, 582 bp, Homo sapiens
  Payload ID: 9813
  Gene Symbol: MDGA1
  Gene Name: MAM domain containing glycosylphosphatidylinositol anchor 1
  ENST ID: ENST00000502298
  CDS Start-End: 1-262
ccacaagctgtccaagaactactcctacgtgctgcagtggactcagagggagcccgacgctgtcgaccctgtgctcaactacagactcagcatccgccagttgaaccagcacaatgcggtggtcaaggccatcccggtccggcgtgtggagaaggggcagctgctggagtacatcctgaccgatctccgtgtgccccacagctatgagacaacacctgccactttgaggatgagaagatctgtggctatacccaggacctgacagacaactttgactggacgcggcagaatgccctcacccagaaccccaaacgctcccccaacactggtccccccaccgacataagtggcacccctgagggctactacatgttcatcgagacatcgaggcctcgggagctgggggaccgtgcaaggttagtgagtcccctctacaatgccagcgccaagttctactgtgtctccttcttctaccacatgtacgggaaacacatcggtggtgaaggttgcagtgagctgagattgtaccattgcactccatcctgggcagcaagagcaaaactccatttcaaaaaaaaaaaa

SEQ ID NO: 151407 - DNA, 542 bp, Homo sapiens
  Payload ID: 9813
  Gene Symbol: MDGA1
  Gene Name: MAM domain containing glycosylphosphatidylinositol anchor 1
  ENST ID: ENST00000508399
  CDS Start-End: 312-542
actgtccctttcctgagttcctggcccgcctggttctgtcctagaggtcctgggaggattctttcctgggctcagtggggtcaggcctctgaggaatggcctggggagatctgggctgacccctcccagatacactcaggagggagccccagacttcttctggccttggcacctcttctctaaacctcctcctccatcctctcctgccagctccagcccaggcgcagatcgtgcatgcgggccaggcatgtgtggtgaaagaggacaatatcagcgagcgtgtctacaccatccgggagggggacaccctcatgctgcagtgccttgtaacagggcaccctcgaccccaggtacggtggaccaagacggcaggtagcgcctcggacaagttccaggagacatcggtgttcaacgagacgctgcgcatcgagcgtattgcacgcacgcagggcggccgctactactgcaaggctgagaacggcgtgggggtgccggccatcaagtccatccgcgtggacgtgcagtacctggatgagccaatg

SEQ ID NO: 151408 - DNA, 2965 bp, Homo sapiens
  Payload ID: 9814
  Gene Symbol: MDGA2
  Gene Name: MAM domain containing glycosylphosphatidylinositol anchor 2
  Uniprot ID: Q7Z553
  ENST ID: ENST00000357362
  CDS Start-End: 636-2819
tcgagcatctggttattcaagctcctcccacggttcgtattgtgcactcaggcttggcctgtaacattgaagaggagcgctactccgaaagggtctacactatccgggaaggagaaacccttgagttgacttgtctagtcacaggacatccacgtccacagatcaggtggaccaaaacagcaggaagtgcctctgacagattccaagactcaagtgtcttcaatgagactttgaggattacaaatattcagcgacaccaaggaggccggtattactgtaaagcagagaatggcttggggtctccagcgataaagtcaatcagagtggatgtatactatttggatgatccagtagtaactgttcatcaaagtataggtgaagctaaagaacaattttactatgagagaacagtgttcctccggtgtgttgccaattccaatcctcctgttcggtatagctggagacgtggccaggaggtcttgctgcaaggatctgataaaggagttgagatttatgaaccattctttacccagggtgaaacaaagatcttaaaactaaagaatcttcgacctcaggactatgctaattatagctgcattgcttcagtgaggaatgtatgtaatattcctgataagatggtgtcgtttagactgtccaataaaacagcatcaccgtcaattaaactcttggtggatgatcctatagttgtaaatcctggagaggccataacattagtatgtgttacaacaggaggagagcctgcaccttctctcacctgggtcaggtcctttgggactctgcctgaaaagactgttttgaatggaggaactttgaccatacctgccatcacctcagatgatgctggtacttacagctgcattgccaataataatgtgggaaaccctgcaaaaaagtccaccaacatcattgtgagagcattaaaaaaaggacgattttggatcacaccagatccttatcacaaagatgacaacatccagattggccgtgaggtgaaaatatcttgccaagtagaagctgttccttctgaggagctaacatttagttggtttaaaaatggtcgtccattaagaagttctgagcggatggtcattacacagactgatcctgatgtctctccgggaacaacaaacttggacatcattgatttaaaattcacggattttgggacgtacacatgtgtagcatctctgaagggaggaggaatatctgatatcagtatcgatgttaatatatccagcagcacagttccacccaatctgactgttccacaggaaaaatcaccattggtcaccagagaaggagacacaatagaactgcaatgtcaagtaactggcaaacctaaaccaatcatcctttggtctagagcggataaagaagttgcaatgcctgatggatcaatgcaaatggagagttatgatggaacactgaggattgtgaatgtatctagggaaatgtcaggaatgtacagatgtcagaccagccaatacaatggatttaacgtgaaaccaagggaagccttggtgcagctcatcgttcagtatccccctgcagtggaaccagcattcttggaaatccggcaaggacaggatcgaagtgtcactatgagttgcagagtactgagagcctatccaatacgggtgctgacctatgagtggcgcttgggcaataaattattacggacgggtcaatttgactctcaggaatacacagagtacgctgtgaagagtctttccaatgaaaactatggggtttataactgtagcatcataaatgaagctggagctgggagatgcagctttcttgttacaggaaaggcctatgctccagaattctattatgatacctacaatccagtatggcagaacagacaccgtgtttattcttacagtctacagtggacacagatgaatcctgatgcagtggatcggattgttgcataccggttgggcatcaggcaggctggacagcagcgctggtgggagcaggagattaaaataaatgggaatattcaaaagggagaattaattacatataacttgacagagctaattaaaccagaagcttatgaagtccgactgactcctctcaccaaatttggtgaaggagattcaacaattcgtgtgatcaaatatagtgctcctgtaaatcctcatttgagagaatttcattgtggatttgaagatggtaatatttgtttgttcactcaagatgatacagataattttgactggacaaagcaaagtacagcaacaagaaatacaaaatatactcctaatacaggacctaatgctgaccgtagtggctccaaagaaggtttttatatgtacattgagacatcacgacccagattggaaggcgaaaaggctcgacttctcagccctgttttcagcatagctcccaaaaacccttatggacccacaaacactgcatattgtttcagcttcttttatcacatgtatggacaacatataggtgtcttaaatgtttatctacgtttgaaagggcaaacaacaatagagaatccactgtggtcttcaagtgggaataaaggacaaagatggaatgaggctcatgttaatatatacccaattacttcatttcagctcatttttgaaggtatccgaggtcctggaatagaaggtgacattgctattgatgatgtatcaattgcagaaggagaatgtgcaaaacaagacctagcaactaagaattccgttgatggtgctgttgggattttggttcatatatggctttttcccattatcgtcctcatctctatcttaagtcctcgaaggtgaccttatcctggcagaggctataaaagattcaccaggcactggcatgaagaaagagtctttgtaaatggacattgaacaaacaaactaccaaagattcctccactgactactgactcaaaaataaaataataaaaacaaattttttt

SEQ ID NO: 151409 - DNA, 5075 bp, Homo sapiens
  Payload ID: 9814
  Gene Symbol: MDGA2
  Gene Name: MAM domain containing glycosylphosphatidylinositol anchor 2
  Uniprot ID: Q7Z553
  ENST ID: ENST00000399232
  CDS Start-End: 366-3236
acttcgcctcgcagctccccttcccatcaccgccccctgctcctccccggcgtctgcgattttcccaggcacccggtgtgagtgcggcgtgcgtgtgagtgtgtgtcagggtattgtgttgtgggagagtgtgtgagtgtgtgtgagtgtgtgtgtgcatgagtgtgtggagtgcggggctcctgcgctccgctcgccgccgccgccggggaaggacagacggacggcgcttcctccttcggcgagcggttcccgggcacctcggcttggcccgggcgcgagtggagcgcgcctggctggccgccggcctcctgaaggtcccgttgcgtaccccctgggctggatatgttcatgttcacgtgaagatggatttactgtacggtctcgtgtggctgctgacagtcctcctggaggggatctctggccaaggagtgtacgctcctcccacggttcgtattgtgcactcaggcttggcctgtaacattgaagaggagcgctactccgaaagggtctacactatccgggaaggagaaacccttgagttgacttgtctagtcacaggacatccacgtccacagatcaggtggaccaaaacagcaggaagtgcctctgacagattccaagactcaagtgtcttcaatgagactttgaggattacaaatattcagcgacaccaaggaggccggtattactgtaaagcagagaatggcttggggtctccagcgataaagtcaatcagagtggatgtatactatttggatgatccagtagtaactgttcatcaaagtataggtgaagctaaagaacaattttactatgagagaacagtgttcctccggtgtgttgccaattccaatcctcctgttcggtatagctggagacgtggccaggaggtcttgctgcaaggatctgataaaggagttgagatttatgaaccattctttacccagggtgaaacaaagatcttaaaactaaagaatcttcgacctcaggactatgctaattatagctgcattgcttcagtgaggaatgtatgtaatattcctgataagatggtgtcgtttagactgtccaataaaacagcatcaccgtcaattaaactcttggtggatgatcctatagttgtaaatcctggagaggccataacattagtatgtgttacaacaggaggagagcctgcaccttctctcacctgggtcaggtcctttgggactctgcctgaaaagactgttttgaatggaggaactttgaccatacctgccatcacctcagatgatgctggtacttacagctgcattgccaataataatgtgggaaaccctgcaaaaaagtccaccaacatcattgtgagagcattaaaaaaaggacgattttggatcacaccagatccttatcacaaagatgacaacatccagattggccgtgaggtgaaaatatcttgccaagtagaagctgttccttctgaggagctaacatttagttggtttaaaaatggtcgtccattaagaagttctgagcggatggtcattacacagactgatcctgatgtctctccgggaacaacaaacttggacatcattgatttaaaattcacggattttgggacgtacacatgtgtagcatctctgaagggaggaggaatatctgatatcagtatcgatgttaatatatccagcagcacagttccacccaatctgactgttccacaggaaaaatcaccattggtcaccagagaaggagacacaatagaactgcaatgtcaagtaactggcaaacctaaaccaatcatcctttggtctagagcggataaagaagttgcaatgcctgatggatcaatgcaaatggagagttatgatggaacactgaggattgtgaatgtatctagggaaatgtcaggaatgtacagatgtcagaccagccaatacaatggatttaacgtgaaaccaagggaagccttggtgcagctcatcgttcagtatccccctgcagtggaaccagcattcttggaaatccggcaaggacaggatcgaagtgtcactatgagttgcagagtactgagagcctatccaatacgggtgctgacctatgagtggcgcttgggcaataaattattacggacgggtcaatttgactctcaggaatacacagagtacgctgtgaagagtctttccaatgaaaactatggggtttataactgtagcatcataaatgaagctggagctgggagatgcagctttcttgttacaggaaaggcctatgctccagaattctattatgatacctacaatccagtatggcagaacagacaccgtgtttattcttacagtctacagtggacacagatgaatcctgatgcagtggatcggattgttgcataccggttgggcatcaggcaggctggacagcagcgctggtgggagcaggagattaaaataaatgggaatattcaaaagggagaattaattacatataacttgacagagctaattaaaccagaagcttatgaagtccgactgactcctctcaccaaatttggtgaaggagattcaacaattcgtgtgatcaaatatagtgctcctgtaaatcctcatttgagagaatttcattgtggatttgaagatggtaatatttgtttgttcactcaagatgatacagataattttgactggacaaagcaaagtacagcaacaagaaatacaaaatatactcctaatacaggacctaatgctgaccgtagtggctccaaagaaggtttttatatgtacattgagacatcacgacccagattggaaggcgaaaaggctcgacttctcagccctgttttcagcatagctcccaaaaacccttatggacccacaaacactgcatattgtttcagcttcttttatcacatgtatggacaacatataggtgtcttaaatgtttatctacgtttgaaagggcaaacaacaatagagaatccactgtggtcttcaagtgggaataaaggacaaagatggaatgaggctcatgttaatatatacccaattacttcatttcagctcatttttgaaggtatccgaggtcctggaatagaaggtgacattgctattgatgatgtatcaattgcagaaggagaatgtgcaaaacaagacctagcaactaagaattccgttgatggtgctgttgggattttggttcatatatggctttttcccattatcgtcctcatctctatcttaagtcctcgaaggtgaccttatcctggcagaggctataaaagattcaccaggcactggcatgaagaaagagtctttgtaaatggacattgaacaaacaaactaccaaagattcctccactgactactgactcaaaaataaaataataaaaacaaatttttttaagcactggggataaaaagacatcatggaagtataacttattccagactaaacataaaagataatcttgacctgagtagagaagagaccttcaggtgcttttgtggctaaaaagattacagcgtcatctggttgaactctggaaaaaaaaaaaaaaatgaaaaaaagaaaaaaaaaagagctatagaaatccttgtcaaagcacaaagtcatggctggttttgtttcaaatgaatagtttgcttgttaccatggaaacctaatggcctgccaacaaaaacctcactgtaaacagggtacgtgaagagctggcatttattttccttacgagaaggttttcgtagagaattaaataaatgtaggcccttttacctttggctgttacccttccttgaaaataacccgaactcagaattatttaaagcattcatgtttctccccaccttatccccatcccacctttattattattatttttctcccatggctaagctagataactgtatgctgtctctttttgcatgcactactatccaggatggtaaacctgggcttacatgttacacaggcttatcggagtttgcttgcggccacttgaacacccaaactacgtcatctgttccaatgaagaaaccaaaccaccatcttttataaattgccatggaaaccaagtgccttcaatgaaacaagcctgaataattttcaactcagaagcttgcactgctaagagtggtttgtgtaaaactattttataaacaaactacagagcctaaatgtgcaaattacaggcaagacaacaaagccgcttctgaagaagaaaggaccgaagctgctgcgtaagcccatgcagacaagatatttgttgtttaacctcctagacagccatggcctttcggcttattgtccattagaaaatcacttccattgagaccagacatggagcaacactttttttcttccaggttattaaatgggtcaaccagagcaaaaggttattaagaatacttagtgcagaaggtggtaaaacacaaaagtgatttttttactctaacctccatttgaaatgaaattggccctagctttagagggaacaagaaaatgtttgggattgcagtgcatactaactctacagtggaactgggcctgaaaaatctggctttattctaaactctgagggtaatatgcctctgccctttagtcagactctgtgcaaattgtgaaatattattttattattttaccaagattataaaaacacttttacaaaaaaacaaaaacctgtaaaaataattttgagctacctgacgacaaatcatatctttaaccagccagttttccaatgcattgtaaatttcacttaaacctgttggttatgaaaatttgaagatcattttccttaaattatctcagcttttaacttcatttaaaaagacttttgtctaagaagaatattattattatatgttctttcaacaccccaggattaaaaaaactgattatgcaagcaattggaatataagtattaaattatagcatttgcaaatattaatataaaagcacaacaaaatgtagtggaaaatgacaaagcttgttttttaaaacaattctgtagaaatgtttgtgcaaattcagtaattcaacttaaaatataattttacagctatgttcaataaagcctctttccaggtaaggta

SEQ ID NO: 151410 - DNA, 5110 bp, Homo sapiens
  Payload ID: 9814
  Gene Symbol: MDGA2
  Gene Name: MAM domain containing glycosylphosphatidylinositol anchor 2
  ENST ID: ENST00000426342
  CDS Start-End: 328-2808
gactcgacagctcctcccacggttcgtattgtgcactcaggcttggcctgtaacattgaagaggagcgctactccgaaagggtctacactatccgggaaggagaaacccttgagttgacttgtctagtcacaggacatccacgtccacagatcaggtggaccaaaacagcaggaagtgcctctgacagattccaagactcaagtgtcttcaatgagactttgaggattacaaatattcagcgacaccaaggaggccggtattactgtaaagcagagaatggcttggggtctccagcgataaagtcaatcagagtggatgtatactatttggatgatccagtagtaactgttcatcaaagtataggtgaagctaaagaacaattttactatgagagaacagtgttcctccggtgtgttgccaattccaatcctcctgttcggtatagctggagacgtggccaggaggtcttgctgcaaggatctgataaaggagttgagatttatgaaccattctttacccagggtgaaacaaagatcttaaaactaaagaatcttcgacctcaggactatgctaattatagctgcattgcttcagtgaggaatgtatgtaatattcctgataagatggtgtcgtttagactgtccaataaaacagcatcaccgtcaattaaactcttggtggatgatcctatagttgtaaatcctggagaggccataacattagtatgtgttacaacaggaggagagcctgcaccttctctcacctgggtcaggtcctttgggactctgcctgaaaagactgttttgaatggaggaactttgaccatacctgccatcacctcagatgatgctggtacttacagctgcattgccaataataatgtgggaaaccctgcaaaaaagtccaccaacatcattgtgagagcattaaaaaaaggacgattttggatcacaccagatccttatcacaaagatgacaacatccagattggccgtgaggtgaaaatatcttgccaagtagaagctgttccttctgaggagctaacatttagttggtttaaaaatggtcgtccattaagaagttctgagcggatggtcattacacagactgatcctgatgtctctccgggaacaacaaacttggacatcattgatttaaaattcacggattttgggacgtacacatgtgtagcatctctgaagggaggaggaatatctgatatcagtatcgatgttaatatatccagcagcacagttccacccaatctgactgttccacaggaaaaatcaccattggtcaccagagaaggagacacaatagaactgcaatgtcaagtaactggcaaacctaaaccaatcatcctttggtctagagcggataaagaagttgcaatgcctgatggatcaatgcaaatggagagttatgatggaacactgaggattgtgaatgtatctagggaaatgtcaggaatgtacagatgtcagaccagccaatacaatggatttaacgtgaaaccaagggaagccttggtgcagctcatcgttcagtatccccctgcagtggaaccagcattcttggaaatccggcaaggacaggatcgaagtgtcactatgagttgcagagtactgagagcctatccaatacgggtgctgacctatgagtggcgcttgggcaataaattattacggacgggtcaatttgactctcaggaatacacagagtacgctgtgaagagtctttccaatgaaaactatggggtttataactgtagcatcataaatgaagctggagctgggagatgcagctttcttgttacaggaaaggcctatgctccagaattctattatgatacctacaatccagtatggcagaacagacaccgtgtttattcttacagtctacagtggacacagatgaatcctgatgcagtggatcggattgttgcataccggttgggcatcaggcaggctggacagcagcgctggtgggagcaggagattaaaataaatgggaatattcaaaagggagaattaattacatataacttgacagagctaattaaaccagaagcttatgaagtccgactgactcctctcaccaaatttggtgaaggagattcaacaattcgtgtgatcaaatatagtgctcctgtaaatcctcatttgagagaatttcattgtggatttgaagatggtaatatttgtttgttcactcaagatgatacagataattttgactggacaaagcaaagtacagcaacaagaaatacaaaatatactcctaatacaggacctaatgctgaccgtagtggctccaaagaaggtttttatatgtacattgagacatcacgacccagattggaaggcgaaaaggctcgacttctcagccctgttttcagcatagctcccaaaaacccttatggacccacaaacactgcatattgtttcagcttcttttatcacatgtatggacaacatataggtgtcttaaatgtttatctacgtttgaaagggcaaacaacaatagagaatccactgtggtcttcaagtgggaataaaggacaaagatggaatgaggctcatgttaatatatacccaattacttcatttcagctcatttttgaaggtatccgaggtcctggaatagaaggtgacattgctattgatgatgtatcaattgcagaaggagaatgtgcaaaacaagacctagcaactaagaattccgttgatggtgctgttgggattttggttcatatatggctttttcccattatcgtcctcatctctatcttaagtcctcgaaggtgaccttatcctggcagaggctataaaagattcaccaggcactggcatgaagaaagagtctttgtaaatggacattgaacaaacaaactaccaaagattcctccactgactactgactcaaaaataaaataataaaaacaaatttttttaagcactggggataaaaagacatcatggaagtataacttattccagactaaacataaaagataatcttgacctgagtagagaagagaccttcaggtgcttttgtggctaaaaagattacagcgtcatctggttgaactctggaaaaaaaaaaaaaaatgaaaaaaagaaaaaaaaaagagctatagaaatccttgtcaaagcacaaagtcatggctggttttgtttcaaatgaatagtttgcttgttaccatggaaacctaatggcctgccaacaaaaacctcactgtaaacagggtacgtgaagagctggcatttattttccttacgagaaggttttcgtagagaattaaataaatgtaggcccttttacctttggctgttacccttccttgaaaataacccgaactcagaattatttaaagcattcatgtttctccccaccttatccccatcccacctttattattattatttttctcccatggctaagctagataactgtatgctgtctctttttgcatgcactactatccaggatggtaaacctgggcttacatgttacacaggcttatcggagtttgcttgcggccacttgaacacccaaactacgtcatctgttccaatgaagaaaccaaaccaccatcttttataaattgccatggaaaccaagtgccttcaatgaaacaagcctgaataattttcaactcagaagcttgcactgctaagagtggtttgtgtaaaactattttataaacaaactacagagcctaaatgtgcaaattacaggcaagacaacaaagccgcttctgaagaagaaaggaccgaagctgctgcgtaagcccatgcagacaagatatttgttgtttaacctcctagacagccatggcctttcggcttattgtccattagaaaatcacttccattgagaccagacatggagcaacactttttttcttccaggttattaaatgggtcaaccagagcaaaaggttattaagaatacttagtgcagaaggtggtaaaacacaaaagtgatttttttactctaacctccatttgaaatgaaattggccctagctttagagggaacaagaaaatgtttgggattgcagtgcatactaactctacagtggaactgggcctgaaaaatctggctttattctaaactctgagggtaatatgcctctgccctttagtcagactctgtgcaaattgtgaaatattattttattattttaccaagattataaaaacacttttacaaaaaaacaaaaacctgtaaaaataattttgagctacctgacgacaaatcatatctttaaccagccagttttccaatgcattgtaaatttcacttaaacctgttggttatgaaaatttgaagatcattttccttaaattatctcagcttttaacttcatttaaaaagacttttgtctaagaagaatattattattatatgttctttcaacaccccaggattaaaaaaactgattatgcaagcaattggaatataagtattaaattatagcatttgcaaatattaatataaaagcacaacaaaatgtagtggaaaatgacaaagcttgttttttaaaacaattctgtagaaatgtttgtgcaaattcagtaattcaacttaaaatataattttacagctatgttcaataaagcctctttccaggtaaggtatgacaagcagtatgtgtgtttgttgagcaatgttcacttatcactaaaatgaaattagttatacaatttattggttaccatgggataaatcttcagtgctccacataccttaatgtctgcagaaagaaattttaataggaactccctgatgcactcccctatattgtaatacatgcagaaagcagttaaacctttgaaggtaaaatatgaaacatatatgaacctggaatttaatgtctattttcagtcagttcaaaaggggaccagtttgaatatttaggtagtgatggaattgatctgaaccaagtcctttaaattaaacataataaacaaatgagtttcataacttatttgaatgaattagacatcttaaaattttttcagagtttcacagtaacccatatactttatcagaccaaagagattcaagtacacaatatctggggcatttcttttacgtttt

SEQ ID NO: 151411 - DNA, 1918 bp, Homo sapiens
  Payload ID: 9814
  Gene Symbol: MDGA2
  Gene Name: MAM domain containing glycosylphosphatidylinositol anchor 2
  ENST ID: ENST00000482848
  CDS Start-End: 705-1457
gcttgagcctgtaccagaatgataagtggaaattagtcctcaaagtaacctcagctgtttcattattgtgtgcctcgagcatctggttattcaagctcctcccacggttcgtattgtgcactcaggcttggcctgtaacattgaagaggagcgctactccgaaagggtctacactatccgggaaggagaaacccttgagttgacttgtctagtcacaggacatccacgtccacaggtggaccaaaacagcaggaagtgcctctgacagattccaagactcaagtgtcttcaatgagactttgaggattacaaatattcagcgacaccaaggaggccggtattactgtaaagcagagaatggcttggggtctccagcgataaagtcaatcagagtggatgtatactatttggatgatccagtagtaactgttcatcaaagtataggtgaagctaaagaacaattttactatgagagaacagtgttcctccggtgtgttgccaattccaatcctcctgttcggtatagctggagacgtggccaggaggtcttgctgcaaggatctgataaaggagttgagatttatgaaccattctttacccagggtgaaacaaagatcttaaaactaaagaatcttcgacctcaggactatgctaattatagctgcattgcttcagtgaggaatgtatgtaatattcctgataagatggtgtcgtttagactgtccaataaaacagcatcaccgtcaattaaactcttggtggatgatcctatagttgtaaatcctggagaggccataacattagtatgtgttacaacaggaggagagcctgcaccttctctcacctgggtcaggtcctttgggactctgcctgaaaagactgttttgaatggaggaactttgaccatacctgccatcacctcagatgatgctggtacttacagctgcattgccaataataatgtgggaaaccctgcaaaaaagtccaccaacatcattgtgagagcattaaaaaaaggacgattttggatcacaccagatccttatcacaaagatgacaacatccagattggccgtgaggtgaaaatatcttgccaagtagaagctgttccttctgaggagctaacatttagttggtttaaaaatggtcgtccattaagaagttctgagcggatggtcattacacagactgatcctgatgtctctccgggaacaacaaacttggacatcattgatttaaaattcacggattttgggacgtacacatgtgtagcatctctgaagggaggaggaatatctgatatcagtatcgatgttaatatatccagcagcacaggtaacactattggagataaaagaaatatattgacttcttccaaaacactacccctggaaagtacccacttaactacagatagatgtggtttctccatagaatggaagctctacaaagtctgagactttgtctgcatcactcattgctataatctcaatagccgaaacaatacatggcacatagaagacaggagcagctcctcaatttgtggtgtccagtgaaaataaaaatgcatgccccttgttcaaaaattaataaactcactatggcaacatcaaagcattaaagcaaatttggggctgttctaagtgtggctacacggatggcaggctcttgaggctagatggcctaggagattttattgtgatagaaggcctacagaagatgatgcctaacctaaagaatgagttactgaagatgattacatattctgtcttcaagccaaaactgacctttgatgttccaatttgcttacaatagagtggaatactagaatgcagtataaagttctataaatctgagattgtatgattcaactgacatcattaaaatgatatttatcccaatactattgaagactaaa

SEQ ID NO: 151412 - DNA, 757 bp, Homo sapiens
  Payload ID: 9814
  Gene Symbol: MDGA2
  Gene Name: MAM domain containing glycosylphosphatidylinositol anchor 2
  ENST ID: ENST00000554762
  CDS Start-End: 1-757
aaagatcttaaaactaaagaatcttcgacctcaggactatgctaattatagctgcattgcttcagtgaggaatgtatgtaatattcctgataagatggtgtcgtttagactgtccaataaaacaggaggagagcctgcaccttctctcacctgggtcaggtcctttgggactctgcctgaaaagactgttttgaatggaggaactttgaccatacctgccatcacctcagatgatgctggtacttacagctgcattgccaataataatgtgggaaaccctgcaaaaaagtccaccaacatcattgtgagagcattaaaaaaaggacgattttggatcacaccagatccttatcacaaagatgacaacatccagattggccgtgaggtgaaaatatcttgccaagtagaagctgttccttctgaggagctaacatttagttggtttaaaaatggtcgtccattaagaagttctgagcggatggtcattacacagactgatcctgatgtctctccgggaacaacaaacttggacatcattgatttaaaattcacggattttgggacgtacacatgtgtagcatctctgaagggaggaggaatatctgatatcagtatcgatgttaatatatccagcagcacagttccacccaatctgactgttccacaggaaaaatcaccattggtcaccagagaaggagacacaatagaactgcaatgtcaagtaactggcaaacctaaaccaatcatcctttggtct

SEQ ID NO: 151413 - DNA, 574 bp, Homo sapiens
  Payload ID: 9814
  Gene Symbol: MDGA2
  Gene Name: MAM domain containing glycosylphosphatidylinositol anchor 2
  ENST ID: ENST00000486952
  CDS Start-End: 149-574
aaaaaaacaaacaaacaaaaaaaatcaccattccttttaatagcttgagcctgtaccagaatgataagtggaaattagtcctcaaagtaacctcagctgtttcattattgtgtgcctcgagcatctggttattcaaggtgaggcttccatgttcaagtatgaatcccttgggatctgccgcaggactcacggtagtgctgcctgcttctcccactctgtggctgactcccctgaggtagcattctgccaggcaaagctgcctttccttcctcctactactgtgacttcagaagctcctcccacggttcgtattgtgcactcaggcttggcctgtaacattgaagaggagcgctactccgaaagggtctacactatccgggaaggagaaacccttgagttgacttgtctagtcacaggacatccacgtccacagatcaggtggaccaaaacagcaggaagtgcctctgacagattccaagactcaagtgtcttcaatgagactttgaggattacaaatattcagcgacaccaaggaggccggtattactgtaaagcagagaatggcttggggtct

SEQ ID NO: 151414 - DNA, 3635 bp, Homo sapiens
  Payload ID: 9814
  Gene Symbol: MDGA2
  Gene Name: MAM domain containing glycosylphosphatidylinositol anchor 2
  ENST ID: ENST00000557238
  CDS Start-End: 802-1503
ggctccagccttggccagcccagaaaggggctcccacagtgcagcggcgggctgaagggctcctcaagcgcggccagagtgagtgccaaagccgaggaggcgccgagagcgaaggagggctgtgagggctgccagctggctgtcacctcacagtgtagcggacaggaagaagaatgttgccaggcagctcctcccacggttcgtattgtgcactcaggcttggcctgtaacattgaagaggagcgctactccgaaagggtctacactatccgggaaggagaaacccttgagttgacttgtctagtcacaggacatccacgtccacagatcaggtggaccaaaacagcaggaagtgcctctgacagattccaagactcaagtgtcttcaatgagactttgaggattacaaatattcagcgacaccaaggaggccggtattactgtaaagcagagaatggcttggggtctccagcgataaagtcaatcagagtggatgtatactatttggatgatccagtagtaactgttcatcaaagtataggtgaagctaaagaacaattttactatgagagaacagtgttcctccggtgtgttgccaattccaatcctcctgttcggtatagctggagacgtggccaggaggtcttgctgcaaggatctgataaaggagttgagatttatgaaccattctttacccagggtgaaacaaagatcttaaaactaaagaatcttcgacctcaggactatgctaattatagctgcattgcttcagtgaggaatgtatgtaatattcctgataagatggtgtcgtttagactgtccaataaaacagcatcaccgtcaattaaactcttggtggatgatcctatagttgtaaatcctggagaggccataacattagtatgtgttacaacaggaggagagcctgcaccttctctcacctgggtcaggtcctttgggactctgcctgaaaagactgttttgaatggaggaactttgaccatacctgccatcacctcagatgatgctggtacttacagctgcattgccaataataatgtgggaaaccctgcaaaaaagtccaccaacatcattgtgagagcattaaaaaaaggacgattttggatcacaccagatccttatcacaaagatgacaacatccagattggccgtgaggtgaaaatatcttgccaagtagaagctgttccttctgaggagctaacatttagttggtttaaaaatggtcgtccattaagaagttctgagcggatggtcattacacagactgatcctgatgtctctccgggaacaacaaacttggacatcattgatttaaaattcacggattttgggacgtacacatgtgtagcatctctgaagggaggaggaatatctgatatcagtatcgatgttaatatatccagcagcacaggaaaaatcaccattggtcaccagagaaggagacacaatagaactgcaatgtcaagtaactggcaaacctaaaccaatcatcctttggtctagagcggataaagaagttgcaatgcctgatggatcaatgcaaatggagagttatgatggaacactgaggattgtgaatgtatctagggaaatgtcaggaatgtacagatgtcagaccagccaatacaatggatttaacgtgaaaccaagggaagccttggtgcagctcatcgttcagtatccccctgcagtggaaccagcattcttggaaatccggcaaggacaggatcgaagtgtcactatgagttgcagagtactgagagcctatccaatacgggtgctgacctatgagtggcgcttgggcaataaattattacggacgggtcaatttgactctcaggaatacacagagtacgctgtgaagagtctttccaatgaaaactatggggtttataactgtagcatcataaatgaagctggagctgggagatgcagctttcttgttacaggaaaggcctatgctccagaattctattatgatacctacaatccagtatggcagaacagacaccgtgtttattcttacagtctacagtggacacagatgaatcctgatgcagtggatcggattgttgcataccggttgggcatcaggcaggctggacagcagcgctggtgggagcaggagattaaaataaatgggaatattcaaaagggagaattaattacatataacttgacagagctaattaaaccagaagcttatgaagtccgactgactcctctcaccaaatttggtgaaggagattcaacaattcgtgtgatcaaatatagtggagaatttcattgtggatttgaagatggtaatatttgtttgttcactcaagatgatacagataattttgactggacaaagcaaagtacagcaacaagaaatacaaaatatactcctaatacaggacctaatgctgaccgtagtggctccaaagaaggtttttatatgtacattgagacatcacgacccagattggaaggcgaaaaggctcgacttctcagccctgttttcagcatagctcccaaaaacccttatggacccacaaacactgcatattgtttcagcttcttttatcacatgtatggacaacatataggctcttgctatgttgcccaggctggtctcaaggaatcttcccaccttcgcctctcaaaatgctgggattacaggcatgagtcattgtgcccagccagaaagcttttgagaagttaaactactataaacttgaagtcaggagacctgggcaggaacttggctgtagcacttcatcactgtaatacttcagagaaatcacttaaaatgtctgaaccttggtttccttatctgtaaaatgagaataataactcttatttcagaaagctgtagtttaagttaaattaggcaacatacatagtatcttcaaccagatggcagacactcataatcttaggttactttgaatctgaaatagcaataataatagcaataataaaataatagttgacatttatggagtactcatcatgggctaggatactttgtggattatttctcttaattttcacgatcaacatttgtgcttattaaaatcattatcctgtttcatagataacaaaattgaaatacaaaggactttagttaccatgcccatcacctggctaagtagtgaagccataacacaaacatgggaagctggacagagtctgcctgttttattactgtgcaggaacacttgttggaagattttgcaagcctagctaagtatgtgacagttacttagtagtggtgtgagttattagattttctgcaatcaaaaagcataatgagatatttgatttaggaaaataaacataaaaataggtaaaatcattcagaaacagaatctagactgggaatcacttaaagaaccaatgaaaggaaacaaatcgcataattgccaagccattttatttattgtgggattactatattattactaatgtaggattagctcaactctaattcttcctttttgttaataatgtatactctgtttcctctttgttttgaatatgtgtcatgtactttctttctcctcttccaatttacattggatcacatattttaattgatttttaaataaatatttccaagaccaata

SEQ ID NO: 151415 - DNA, 2440 bp, Homo sapiens
  Payload ID: 9815
  Gene Symbol: MASP1
  Gene Name: mannan-binding lectin serine peptidase 1 (C4/C2 activating component of Ra-reactive factor)
  Uniprot ID: P48740
  ENST ID: ENST00000169293
  CDS Start-End: 326-1468
gccacacaggataaaggagggaagggaaggagcagatcttttcggtaggaagacagattttgttgtcaggttcctgggagtgcaagagcaagtcaaaggagagagagaggagagaggaaaagccagagggagagagggggagaggggatctgttgcaggcaggggaaggcgtgacctgaatggagaatgccagccaattccagagacacacagggacctcagaacaaagataaggcatcacggacaccacaccgggcacgagctcacaggcaagtcaagctgggaggaccaaggccgggcagccgggagcacccaaggcaggaaaatgaggtggctgcttctctattatgctctgtgcttctccctgtcaaaggcttcagcccacaccgtggagctaaacaatatgtttggccagatccagtcgcctggttatccagactcctatcccagtgattcagaggtgacttggaatatcactgtcccagatgggtttcggatcaagctttacttcatgcacttcaacttggaatcctcctacctttgtgaatatgactatgtgaaggtagaaactgaggaccaggtgctggcaaccttctgtggcagggagaccacagacacagagcagactcccggccaggaggtggtcctctcccctggctccttcatgtccatcactttccggtcagatttctccaatgaggagcgtttcacaggctttgatgcccactacatggctgtggatgtggacgagtgcaaggagagggaggacgaggagctgtcctgtgaccactactgccacaactacattggcggctactactgctcctgccgcttcggctacatcctccacacagacaacaggacctgccgagtggagtgcagtgacaacctcttcactcaaaggactggggtgatcaccagccctgacttcccaaacccttaccccaagagctctgaatgcctgtataccatcgagctggaggagggtttcatggtcaacctgcagtttgaggacatatttgacattgaggaccatcctgaggtgccctgcccctatgactacatcaagatcaaagttggtccaaaagttttggggcctttctgtggagagaaagccccagaacccatcagcacccagagccacagtgtcctgatcctgttccatagtgacaactcgggagagaaccggggctggaggctctcatacagggctgcaggaaatgagtgcccagagctacagcctcctgtccatgggaaaatcgagccctcccaagccaagtatttcttcaaagaccaagtgctcgtcagctgtgacacaggctacaaagtgctgaaggataatgtggagatggacacattccagattgagtgtctgaaggatgggacgtggagtaacaagattcccacctgtaaaaaaaatgaaatcgatctggagagcgaactcaagtcagagcaagtgacagagtgaatgacgggaccccacacaatgcagacatccagaaatggatcactcccaagacccctggggcccagagctgcaccacccctccccacccacaacacccccgtgcccctttccatgtggattagaatgggtgctgaacaacatgatctcagcagttgaagctgctacgtgtgtgaaagcaaattctccacttgagggtttgcccatcattcaaacactattccagaaaataatgaaaaaaaaatgtgggatttattttagcacctctgagtggactgtacttttctcaacggaaaaaaaaaatgcccttggtccttgagacaaaagatttaatatacaaccatgtggcctcaggctgaccagatcaaagtggtttctaatccattctacatgtcaagtttaaatgaaccagactgcctgtgactttatgaatctgaaggtattacctgttgctgctttcttaaccaccatgagtaggtaaagcaaataataactcacagagtgtggatttttgagaatctgaatgttttctcattcacaaaagtatcccttctacccctatctggcgcagggctgaaatgtcatcattagaggttctgtcttctggggcttacaagttctatgtttcttaaaattcgctgattaaaaattttaaaaagataggatcacacctgaaagcagtggtcccagctctgtgctgtgggacatcacaggtcctaaacagtgatagagaaagggctggggagtggcagctggaatctctgcttccgtctgaacatctggacacacatgtcagagaatctttgcattaaatggactgcccgatctatttggtgattaaatggctgtgcggtgaggggagaaccctgggcagtctggagactgaggtgccattctcggctagagacaccacccaaagaagagatgggctggctactaaagacaagtgtcagttgaataaatgtctttaaacct

SEQ ID NO: 151416 - DNA, 4015 bp, Homo sapiens
  Payload ID: 9815
  Gene Symbol: MASP1
  Gene Name: mannan-binding lectin serine peptidase 1 (C4/C2 activating component of Ra-reactive factor)
  Uniprot ID: P48740
  ENST ID: ENST00000296280
  CDS Start-End: 227-2413
agagagagaggagagaggaaaagccagagggagagagggggagaggggatctgttgcaggcaggggaaggcgtgacctgaatggagaatgccagccaattccagagacacacagggacctcagaacaaagataaggcatcacggacaccacaccgggcacgagctcacaggcaagtcaagctgggaggaccaaggccgggcagccgggagcacccaaggcaggaaaatgaggtggctgcttctctattatgctctgtgcttctccctgtcaaaggcttcagcccacaccgtggagctaaacaatatgtttggccagatccagtcgcctggttatccagactcctatcccagtgattcagaggtgacttggaatatcactgtcccagatgggtttcggatcaagctttacttcatgcacttcaacttggaatcctcctacctttgtgaatatgactatgtgaaggtagaaactgaggaccaggtgctggcaaccttctgtggcagggagaccacagacacagagcagactcccggccaggaggtggtcctctcccctggctccttcatgtccatcactttccggtcagatttctccaatgaggagcgtttcacaggctttgatgcccactacatggctgtggatgtggacgagtgcaaggagagggaggacgaggagctgtcctgtgaccactactgccacaactacattggcggctactactgctcctgccgcttcggctacatcctccacacagacaacaggacctgccgagtggagtgcagtgacaacctcttcactcaaaggactggggtgatcaccagccctgacttcccaaacccttaccccaagagctctgaatgcctgtataccatcgagctggaggagggtttcatggtcaacctgcagtttgaggacatatttgacattgaggaccatcctgaggtgccctgcccctatgactacatcaagatcaaagttggtccaaaagttttggggcctttctgtggagagaaagccccagaacccatcagcacccagagccacagtgtcctgatcctgttccatagtgacaactcgggagagaaccggggctggaggctctcatacagggctgcaggaaatgagtgcccagagctacagcctcctgtccatgggaaaatcgagccctcccaagccaagtatttcttcaaagaccaagtgctcgtcagctgtgacacaggctacaaagtgctgaaggataatgtggagatggacacattccagattgagtgtctgaaggatgggacgtggagtaacaagattcccacctgtaaaattgtagactgtagagccccaggagagctggaacacgggctgatcaccttctctacaaggaacaacctcaccacatacaagtctgagatcaaatactcctgtcaggagccctattacaagatgctcaacaataacacaggtatatatacctgttctgcccaaggagtctggatgaataaagtattggggagaagcctacccacctgccttccagagtgtggtcagccctcccgctccctgccaagcctggtcaagaggatcattgggggccgaaatgctgagcctggcctcttcccgtggcaggccctgatagtggtggaggacacttcgagagtgccaaatgacaagtggtttgggagtggggccctgctctctgcgtcctggatcctcacagcagctcatgtgctgcgctcccagcgtagagacaccacggtgataccagtctccaaggagcatgtcaccgtctacctgggcttgcatgatgtgcgagacaaatcgggggcagtcaacagctcagctgcccgagtggtgctccacccagacttcaacatccaaaactacaaccacgatatagctctggtgcagctgcaggagcctgtgcccctgggaccccacgttatgcctgtctgcctgccaaggcttgagcctgaaggcccggccccccacatgctgggcctggtggccggctggggcatctccaatcccaatgtgacagtggatgagatcatcagcagtggcacacggaccttgtcagatgtcctgcagtatgtcaagttacccgtggtgcctcacgctgagtgcaaaactagctatgagtcccgctcgggcaattacagcgtcacggagaacatgttctgtgctggctactacgagggcggcaaagacacgtgccttggagatagcggtggggcctttgtcatctttgatgacttgagccagcgctgggtggtgcaaggcctggtgtcctgggggggacctgaagaatgcggcagcaagcaggtctatggagtctacacaaaggtctccaattacgtggactgggtgtgggagcagatgggcttaccacaaagtgttgtggagccccaggtggaacggtgagctgacttacttcctcggggcctgcctcccctgagcgaagctacaccgcacttccgacagcacactccacattacttatcagaccatatggaatggaacacactgacctagcggtggcttctcctaccgagacagcccccaggaccctgagaggcagagtgtggtatagggaaaaggctccaggcaggagacctgtgttcctgagcttgtccaagtctctttccctgtctgggcctcactctaccgagtaatacaatgcaggagctcaaccaaggcctctgtgccaatcccagcactcctttccaggccatgcttcttaccccagtggcctttattcactcctgaccacttatcaaacccatcggtcctactgttggtataactgagcttggacctgactattagaaaatggtttctaacattgaactgaatgccgcatctgtatattttcctgctctgccttctgggactagccttggcctaatccttcctctaggagaagagcattcaggttttgggagatggctcatagccaagcccctctctcttagtgtgatcccttggagcaccttcatgcctggggtttctctcccaaaagcttcttgcagtctaagccttatcccttatgttccccattaaaggaatttcaaaagacatggagaaagttgggaaggtttgtgctgactgctgggagcagaatagccgtgggaggcccaccaagcccttaaattcccattgtcaactcagaacacatttgggcccatatgccaccctggaacaccagctgacaccatgggcgtccacacctgctgctccagacaagcacaaagcaatctttcagccttgaaatgtattatctgaaaggctacctgaagcccaggcccgaatatggggacttagtcgattacctggaaaaagaaaagacccacactgtgtcctgctgtgcttttgggcaggaaaatggaagaaagagtggggtgggcacattagaagtcacccaaatcctgccaggctgcctggcatccctggggcatgagctgggcggagaatccaccccgcaggatgttcagagggacccactccttcatttttcagagtcaaaggaatcagaggctcacccatggcaggcagtgaaaagagccaggagtcctgggttctagtccctgctctgcccccaactggctgtataacctttgaaaaatcattttctttgtctgagtctctggttctccgtcagcaacaggctggcataaggtcccctgcaggttccttctagctggagcactcagagcttccctgactgctagcagcctctctggccctcacagggctgattgttctccttctccctggagctctctctcctgaaaatctccatcagagcaaggcagccagagaagcccctgagagggaatgattgggaagtgtccactttctcaaccggctcatcaaacacactcctttgtctatgaatggcacatgtaaatgatgttatattttgtatcttttatatcatatgcttcaccattctgtaaagggcctctgcattgttgctcccatcaggggtctcaagtggaaataaaccctcgtggataaccaaca

SEQ ID NO: 151417 - DNA, 5276 bp, Homo sapiens
  Payload ID: 9815
  Gene Symbol: MASP1
  Gene Name: mannan-binding lectin serine peptidase 1 (C4/C2 activating component of Ra-reactive factor)
  Uniprot ID: P48740
  ENST ID: ENST00000337774
  CDS Start-End: 391-2490
acacacagagtgatacaaatacctgcttgagcccctcagttattttctctcaagggctgaagtcagccacacaggataaaggagggaagggaaggagcagatcttttcggtaggaagacagattttgttgtcaggttcctgggagtgcaagagcaagtcaaaggagagagagaggagagaggaaaagccagagggagagagggggagaggggatctgttgcaggcaggggaaggcgtgacctgaatggagaatgccagccaattccagagacacacagggacctcagaacaaagataaggcatcacggacaccacaccgggcacgagctcacaggcaagtcaagctgggaggaccaaggccgggcagccgggagcacccaaggcaggaaaatgaggtggctgcttctctattatgctctgtgcttctccctgtcaaaggcttcagcccacaccgtggagctaaacaatatgtttggccagatccagtcgcctggttatccagactcctatcccagtgattcagaggtgacttggaatatcactgtcccagatgggtttcggatcaagctttacttcatgcacttcaacttggaatcctcctacctttgtgaatatgactatgtgaaggtagaaactgaggaccaggtgctggcaaccttctgtggcagggagaccacagacacagagcagactcccggccaggaggtggtcctctcccctggctccttcatgtccatcactttccggtcagatttctccaatgaggagcgtttcacaggctttgatgcccactacatggctgtggatgtggacgagtgcaaggagagggaggacgaggagctgtcctgtgaccactactgccacaactacattggcggctactactgctcctgccgcttcggctacatcctccacacagacaacaggacctgccgagtggagtgcagtgacaacctcttcactcaaaggactggggtgatcaccagccctgacttcccaaacccttaccccaagagctctgaatgcctgtataccatcgagctggaggagggtttcatggtcaacctgcagtttgaggacatatttgacattgaggaccatcctgaggtgccctgcccctatgactacatcaagatcaaagttggtccaaaagttttggggcctttctgtggagagaaagccccagaacccatcagcacccagagccacagtgtcctgatcctgttccatagtgacaactcgggagagaaccggggctggaggctctcatacagggctgcaggaaatgagtgcccagagctacagcctcctgtccatgggaaaatcgagccctcccaagccaagtatttcttcaaagaccaagtgctcgtcagctgtgacacaggctacaaagtgctgaaggataatgtggagatggacacattccagattgagtgtctgaaggatgggacgtggagtaacaagattcccacctgtaaaattgtagactgtagagccccaggagagctggaacacgggctgatcaccttctctacaaggaacaacctcaccacatacaagtctgagatcaaatactcctgtcaggagccctattacaagatgctcaacaataacacaggtatatatacctgttctgcccaaggagtctggatgaataaagtattggggagaagcctacccacctgccttccagtgtgtgggctccccaagttctcccggaagctgatggccaggatcttcaatggacgcccagcccagaaaggcaccactccctggattgccatgctgtcacacctgaatgggcagcccttctgcggaggctcccttctaggctccagctggatcgtgaccgccgcacactgcctccaccagtcactcgatccggaagatccgaccctacgtgattcagacttgctcagcccttctgacttcaaaatcatcctgggcaagcattggaggctccggtcagatgaaaatgaacagcatctcggcgtcaaacacaccactctccacccccagtatgatcccaacacattcgagaatgacgtggctctggtggagctgttggagagcccagtgctgaatgccttcgtgatgcccatctgtctgcctgagggaccccagcaggaaggagccatggtcatcgtcagcggctgggggaagcagttcttgcaaaggttcccagagaccctgatggagattgaaatcccgattgttgaccacagcacctgccagaaggcttatgccccgctgaagaagaaagtgaccagggacatgatctgtgctggggagaaggaagggggaaaggacgcctgtgcgggtgactctggaggccccatggtgaccctgaatagagaaagaggccagtggtacctggtgggcactgtgtcctggggtgatgactgtgggaagaaggaccgctacggagtatactcttacatccaccacaacaaggactggatccagagggtcaccggagtgaggaactgaatttggctcctcagccccagcaccaccagctgtgggcagtcagtagcagaggacgatcctccgatgaaagcagccatttctcctttccttcctcccatcccccctccttcggcctatccattactgggcaatagagcaggtatcttcacccccttttcactctctttaaagagatggagcaagagagtggtcagaacacaggccgaatccaggctctatcacttactagtttgcagtgctgggcaggtgacttcatctcttcgaacttcagtttcttcataagatggaaatgctataccttacctacctcgtaaaagtctgatgaggaaaagattaactaatagatgcatagcacttaacagagtgcatagcatacactgttttcaataaatgcaccttagcagaaggtcgatgtgtctaccaggcagacgaagctctcttacaaacccctgcctgggtcttagcattgatcagtgacacacctctcccctcaaccttgaccatctccatctgcccttaaatgctgtatgcttttttgccaccgtgcaacttgcccaacatcaatcttcaccctcatccctaaaaaagtaaaacagacaaggttctgagtcctgtggtatgtcccctagcaaatgtaactaggaacatgcactagatgacagattgcgggagggcctgagagaagcagggacaggagggagcctggggattgtggtttgggaaggcagacacctggttctagaactagctctgcccttagccccctgtatgaccctatgcaagtcctcctccctcatctcaaagggtcctcaaagctctgacgatctaagatacaatgaagccattttccccctgataagatgaggtaaagccaatgtaaccaaaaggcaaaaattacaatcggttcaaaggaactttgatgcagacaaaatgctgctgctgctgctcctgaaatacccacccctttccactacgggtgggttcccaaggacatgggacaggcaaagtgtgagccaaaggatccttccttattcctaagcagagcatctgctctgggccctggcctccttcccttcttgggaaactgggctgcatgaggtgggccctggtagtttgtaccccaggcccctatactcttccttcctatgtccacagctgaccccaagcagccgttccccgactcctcacccctgagcctcaccctgaactccctcatcttgcaaggccataagtgttttccaagcaaaatgcctctcccatcctctctcaggaagcttctagagactttatgccctccagagctccaagatataagccctccaagggatcagaagctccaagttcctgtcttctgttttatagaaattgatcttccctgggggactttaactcttgacctgtatgcagctgttggagtaattccaggtctcttgaaaaaaaagaggaagataatggagaatgagaacatatatatatatatattaagccccaggctgaatactcagggacagcaattcacagcctgcctctggttctataaacaagtcattctacctctttgtgccctgctgtttattctgtaaggggaaggtggcaatgggacccagctccatcagacacttgtcaagctagcagaaactccattttcaatgccaaagaagaactgtaatgctgttttggaatcatcccaaggcatcccaagacaccatatcttcccatttcaagcactgcctgggcacaccccaacatcccaggctgtggtggctcctgtgggaactacctagatgaagagagtatcatttataccttctaggagctcctattgggagacatgaaacatatgtaattgactaccatgtaatagaacaaaccctgccaagtgctgctttggaaagtcatggaggtaaaagaaagaccattctggtatgaaggttttgggggaggagatatcaatcaagaaggcttcccagaagaggtgactggaccagagccttgtccacaggtaagacggaggaggccttccacatggagggagaacaatagtaaatgtccactcaagatgtcctttattataccagctcctcccacaaaaacacatgtccagtggactctttttctgggatcagaaccaacaccaaaaagagcttttctccttaaagttagaattctaaacaggacttgaaatggcctcaaggtttgtgcacaaatactgacttctggctggacccagcttattctgtttatttctccaattgcaatttcatccttatcctgagaaaatgtctaaataggccatggaacccaggcttccccgtgacctacaagcacttattagctgtgccagctcctgcactgctgctaaggtccaagaaacccagatctctcacagagccatagaagcagagggctggagtatctgtgaggacaacaaccttgtctaacttcgcgacctcattcttgagcatttctactgatgagaaactcactacccccaattgcagctcattcaactttaaaattgctgctttttgaatcactgattgtgaatattaatttaaaaaaataagtaagaaaatgttttaaatgtgctgcctctttaaaaggtctcctctttgtgcaaccaaaacccacctctctagaatacagtttgtataactgaagctataatttcataccatgagtgctgctgttagcaataataatcatgcccggattttattaacaacagaagctgttgctcgtatgaaaaaacaaacattagttctaataaacatctgcattgagtc

SEQ ID NO: 151418 - DNA, 1673 bp, Homo sapiens
  Payload ID: 9815
  Gene Symbol: MASP1
  Gene Name: mannan-binding lectin serine peptidase 1 (C4/C2 activating component of Ra-reactive factor)
  ENST ID: ENST00000392470
  CDS Start-End: 435-1499
gggagtgcaagagcaagtcaaaggagagagagaggagagaggaaaagccagagggagagagggggagaggggatctgttgcaggcaggggaaggcgtgacctgaatggagaatgccagccaattccagagacacacagggacctcagaacaaagataaggcatcacggacaccacaccgggcacgagctcacaggcaagtcaagctgggaggaccaaggccgggcagccgggagcacccaaggcaggaaaatgagggtgctgcctgctggcgaatgtgactctcctcctgttcacccacaaggctgatttttccgtgttcctcctctggaaagagcattgctttctctcttccagcactttgtggctgcttctctattatgctctgtgcttctccctgtcaaaggcttcagcccacaccgtggagctaaacaatatgtttggccagatccagtcgcctggttatccagactcctatcccagtgattcagaggtgacttggaatatcactgtcccagatgggtttcggatcaagctttacttcatgcacttcaacttggaatcctcctacctttgtgaatatgactatgtgaaggtagaaactgaggaccaggtgctggcaaccttctgtggcagggagaccacagacacagagcagactcccggccaggaggtggtcctctcccctggctccttcatgtccatcactttccggtcagatttctccaatgaggagcgtttcacaggctttgatgcccactacatggctgtggatgtggacgagtgcaaggagagggaggacgaggagctgtcctgtgaccactactgccacaactacattggcggctactactgctcctgccgcttcggctacatcctccacacagacaacaggacctgccgagtggagtgcagtgacaacctcttcactcaaaggactggggtgatcaccagccctgacttcccaaacccttaccccaagagctctgaatgcctgtataccatcgagctggaggagggtttcatggtcaacctgcagtttgaggacatatttgacattgaggaccatcctgaggtgccctgcccctatgactacatcaagatcaaagttggtccaaaagttttggggcctttctgtggagagaaagccccagaacccatcagcacccagagccacagtgtcctgatcctgttccatagtgacaactcgggagagaaccggggctggaggctctcatacagggctgcaggaaatgagtgcccagagctacagcctcctgtccatgggaaaatcgagccctcccaagccaagtatttcttcaaagaccaagtgctcgtcagctgtgacacaggctacaaagtgctgaaggataatgtggagatggacacattccagattgagtgtctgaaggatgggacgtggagtaacaagattcccacctgtaaaaaaaatgaaatcgatctggagagcgaactcaagtcagagcaagtgacagagtgaatgacgggaccccacacaatgcagacatccagaaatggatcactcccaagacccctggggcccagagctgcaccacccctccccacccacaacacccccgtgcccctttccatgtggattagaatgggtgctgaacaacatgatctcagcagttgaagctgctacgtgtgtgaa

SEQ ID NO: 151419 - DNA, 3900 bp, Homo sapiens
  Payload ID: 9815
  Gene Symbol: MASP1
  Gene Name: mannan-binding lectin serine peptidase 1 (C4/C2 activating component of Ra-reactive factor)
  Uniprot ID: P48740
  ENST ID: ENST00000392472
  CDS Start-End: 453-2300
tctctcaagggctgaagtcagccacacaggataaaggagggaagggaaggagcagatcttttcggtaggaagacagattttgttgtcaggttcctgggagtgcaagagcaagtcaaaggagagagagaggagagaggaaaagccagagggagagagggggagaggggatctgttgcaggcaggggaaggcgtgacctgaatggagaatgccagccaattccagagacacacagggacctcagaacaaagataaggcatcacggacaccacaccgggcacgagctcacaggcaagtcaagctgggaggaccaaggccgggcagccgggagcacccaaggcaggaaaatgaggtagaaactgaggaccaggtgctggcaaccttctgtggcagggagaccacagacacagagcagactcccggccaggaggtggtcctctcccctggctccttcatgtccatcactttccggtcagatttctccaatgaggagcgtttcacaggctttgatgcccactacatggctgtggatgtggacgagtgcaaggagagggaggacgaggagctgtcctgtgaccactactgccacaactacattggcggctactactgctcctgccgcttcggctacatcctccacacagacaacaggacctgccgagtggagtgcagtgacaacctcttcactcaaaggactggggtgatcaccagccctgacttcccaaacccttaccccaagagctctgaatgcctgtataccatcgagctggaggagggtttcatggtcaacctgcagtttgaggacatatttgacattgaggaccatcctgaggtgccctgcccctatgactacatcaagatcaaagttggtccaaaagttttggggcctttctgtggagagaaagccccagaacccatcagcacccagagccacagtgtcctgatcctgttccatagtgacaactcgggagagaaccggggctggaggctctcatacagggctgcaggaaatgagtgcccagagctacagcctcctgtccatgggaaaatcgagccctcccaagccaagtatttcttcaaagaccaagtgctcgtcagctgtgacacaggctacaaagtgctgaaggataatgtggagatggacacattccagattgagtgtctgaaggatgggacgtggagtaacaagattcccacctgtaaaattgtagactgtagagccccaggagagctggaacacgggctgatcaccttctctacaaggaacaacctcaccacatacaagtctgagatcaaatactcctgtcaggagccctattacaagatgctcaacaataacacaggtatatatacctgttctgcccaaggagtctggatgaataaagtattggggagaagcctacccacctgccttccagagtgtggtcagccctcccgctccctgccaagcctggtcaagaggatcattgggggccgaaatgctgagcctggcctcttcccgtggcaggccctgatagtggtggaggacacttcgagagtgccaaatgacaagtggtttgggagtggggccctgctctctgcgtcctggatcctcacagcagctcatgtgctgcgctcccagcgtagagacaccacggtgataccagtctccaaggagcatgtcaccgtctacctgggcttgcatgatgtgcgagacaaatcgggggcagtcaacagctcagctgcccgagtggtgctccacccagacttcaacatccaaaactacaaccacgatatagctctggtgcagctgcaggagcctgtgcccctgggaccccacgttatgcctgtctgcctgccaaggcttgagcctgaaggcccggccccccacatgctgggcctggtggccggctggggcatctccaatcccaatgtgacagtggatgagatcatcagcagtggcacacggaccttgtcagatgtcctgcagtatgtcaagttacccgtggtgcctcacgctgagtgcaaaactagctatgagtcccgctcgggcaattacagcgtcacggagaacatgttctgtgctggctactacgagggcggcaaagacacgtgccttggagatagcggtggggcctttgtcatctttgatgacttgagccagcgctgggtggtgcaaggcctggtgtcctgggggggacctgaagaatgcggcagcaagcaggtctatggagtctacacaaaggtctccaattacgtggactgggtgtgggagcagatgggcttaccacaaagtgttgtggagccccaggtggaacggtgagctgacttacttcctcggggcctgcctcccctgagcgaagctacaccgcacttccgacagcacactccacattacttatcagaccatatggaatggaacacactgacctagcggtggcttctcctaccgagacagcccccaggaccctgagaggcagagtgtggtatagggaaaaggctccaggcaggagacctgtgttcctgagcttgtccaagtctctttccctgtctgggcctcactctaccgagtaatacaatgcaggagctcaaccaaggcctctgtgccaatcccagcactcctttccaggccatgcttcttaccccagtggcctttattcactcctgaccacttatcaaacccatcggtcctactgttggtataactgagcttggacctgactattagaaaatggtttctaacattgaactgaatgccgcatctgtatattttcctgctctgccttctgggactagccttggcctaatccttcctctaggagaagagcattcaggttttgggagatggctcatagccaagcccctctctcttagtgtgatcccttggagcaccttcatgcctggggtttctctcccaaaagcttcttgcagtctaagccttatcccttatgttccccattaaaggaatttcaaaagacatggagaaagttgggaaggtttgtgctgactgctgggagcagaatagccgtgggaggcccaccaagcccttaaattcccattgtcaactcagaacacatttgggcccatatgccaccctggaacaccagctgacaccatgggcgtccacacctgctgctccagacaagcacaaagcaatctttcagccttgaaatgtattatctgaaaggctacctgaagcccaggcccgaatatggggacttagtcgattacctggaaaaagaaaagacccacactgtgtcctgctgtgcttttgggcaggaaaatggaagaaagagtggggtgggcacattagaagtcacccaaatcctgccaggctgcctggcatccctggggcatgagctgggcggagaatccaccccgcaggatgttcagagggacccactccttcatttttcagagtcaaaggaatcagaggctcacccatggcaggcagtgaaaagagccaggagtcctgggttctagtccctgctctgcccccaactggctgtataacctttgaaaaatcattttctttgtctgagtctctggttctccgtcagcaacaggctggcataaggtcccctgcaggttccttctagctggagcactcagagcttccctgactgctagcagcctctctggccctcacagggctgattgttctccttctccctggagctctctctcctgaaaatctccatcagagcaaggcagccagagaagcccctgagagggaatgattgggaagtgtccactttctcaaccggctcatcaaacacactcctttgtctatgaatggcacatgtaaatgatgttatattttgtatcttttatatcatatgcttcaccattctgtaaagggcctctgcattgttgctcccatcaggggtctcaagtggaaataaaccctcgtggataaccaa

SEQ ID NO: 151420 - DNA, 962 bp, Homo sapiens
  Payload ID: 9815
  Gene Symbol: MASP1
  Gene Name: mannan-binding lectin serine peptidase 1 (C4/C2 activating component of Ra-reactive factor)
  ENST ID: ENST00000392475
  CDS Start-End: 349-962
ttttctctcaagggctgaagtcagccacacaggataaaggagggaagggaaggagcagatcttttcggtaggaagacagattttgttgtcaggttcctgggagtgcaagagcaagtcaaaggagagagagaggagagaggaaaagccagagggagagagggggagaggggatctgttgcaggcaggggaaggcgtgacctgaatggagaatgccagccaattccagagacacacagggacctcagaacaaagataaggcatcacggacaccacaccgggcacgagctcacaggcaagtcaagctgggaggaccaaggccgggcagccgggagcacccaaggcaggaaaatgagacctacattcatgtctttcaggtggctgcttctctattatgctctgtgcttctccctgtcaaaggcttcagcccacaccgtggagctaaacaatatgtttggccagatccagtcgcctggttatccagactcctatcccagtgattcagaggtgacttggaatatcactgtcccagatgggtttcggatcaagctttacttcatgcacttcaacttggaatcctcctacctttgtgaatatgactatgtgaaggtagaaactgaggaccaggtgctggcaaccttctgtggcagggagaccacagacacagagcagactcccggccaggaggtggtcctctcccctggctccttcatgtccatcactttccggtcagatttctccaatgaggagcgtttcacaggctttgatgcccactacatggctgtggatgtggacgagtgcaaggagagggaggacgaggagctgtcctgtgaccactactgccacaactacattggcggctactactgctcctgccgcttcggctacatcctccacacagacaacaggacctgccgagtggagtgcagtgacaacctcttcactcaaaggactggggtgatcac

SEQ ID NO: 151421 - DNA, 553 bp, Homo sapiens
  Payload ID: 9815
  Gene Symbol: MASP1
  Gene Name: mannan-binding lectin serine peptidase 1 (C4/C2 activating component of Ra-reactive factor)
  ENST ID: ENST00000425937
  CDS Start-End: 388-553
agctcacaggcaagtcaagctgggaggaccaaggccgggcagccgggagcacccaaggcaggaaaatgagggctctgagaagggagctgtgggtgggctgggtgccttccccaggactccaggagacataaaacttgaaacgggagacttcgtgcaaatcctgctccggacgctgctgaagctcagatttctcccactgcctgcacagggtgctgcctgctggcgaatgtgactctcctcctgttcacccacaaggctgatttttccgtgttcctcctctggaaagagcattgctttctctcttccagcactttgtggctgcttctctattatgctctgtgcttctccctgtcaaaggcttcagcccacaccgtggagctaaacaatatgtttggccagatccagtcgcctggttatccagactcctatcccagtgattcagaggtgacttggaatatcactgtcccagatgggtttcggatcaagctttacttcatgcacttcaacttggaatcctcctacctttgtgaatatgactatgtgaaggtagaaa

SEQ ID NO: 151422 - DNA, 542 bp, Homo sapiens
  Payload ID: 9815
  Gene Symbol: MASP1
  Gene Name: mannan-binding lectin serine peptidase 1 (C4/C2 activating component of Ra-reactive factor)
  ENST ID: ENST00000439271
  CDS Start-End: 188-542
agccacacaggataaaggagggaagggaaggagcagatcttttcggtaggaagacagattttgttgtcaggttcctgggagtgcaagagcaagtcaaaggagagagagaggagagaggaaaagccagagggagagagggggagaggggatctgttgcaggcaggggaaggcgtgacctgaatggagaatgccagccaattccagagacacacagggacctcagaacaaagataaggcatcacggacaccacaccgggcacgagctcacaggtggctgcttctctattatgctctgtgcttctccctgtcaaaggcttcagcccacaccgtggagctaaacaatatgtttggccagatccagtcgcctggttatccagactcctatcccagtgattcagaggtgacttggaatatcactgtcccagatgggtttcggatcaagctttacttcatgcacttcaacttggaatcctcctacctttgtgaatatgactatgtgaaggtagaaactgaggaccaggtgctggcaaccttctgtggca

SEQ ID NO: 151423 - DNA, 2439 bp, Homo sapiens
  Payload ID: 9816
  Gene Symbol: MASP2
  Gene Name: mannan-binding lectin serine peptidase 2
  Uniprot ID: O00187
  ENST ID: ENST00000400897
  CDS Start-End: 17-2077
gctggacgggcacaccatgaggctgctgaccctcctgggccttctgtgtggctcggtggccacccccttgggcccgaagtggcctgaacctgtgttcgggcgcctggcatcccccggctttccaggggagtatgccaatgaccaggagcggcgctggaccctgactgcaccccccggctaccgcctgcgcctctacttcacccacttcgacctggagctctcccacctctgcgagtacgacttcgtcaagctgagctcgggggccaaggtgctggccacgctgtgcgggcaggagagcacagacacggagcgggcccctggcaaggacactttctactcgctgggctccagcctggacattaccttccgctccgactactccaacgagaagccgttcacggggttcgaggccttctatgcagccgaggacattgacgagtgccaggtggccccgggagaggcgcccacctgcgaccaccactgccacaaccacctgggcggtttctactgctcctgccgcgcaggctacgtcctgcaccgtaacaagcgcacctgctcagccctgtgctccggccaggtcttcacccagaggtctggggagctcagcagccctgaatacccacggccgtatcccaaactctccagttgcacttacagcatcagcctggaggaggggttcagtgtcattctggactttgtggagtccttcgatgtggagacacaccctgaaaccctgtgtccctacgactttctcaagattcaaacagacagagaagaacatggcccattctgtgggaagacattgccccacaggattgaaacaaaaagcaacacggtgaccatcacctttgtcacagatgaatcaggagaccacacaggctggaagatccactacacgagcacagcgcagccttgcccttatccgatggcgccacctaatggccacgtttcacctgtgcaagccaaatacatcctgaaagacagcttctccatcttttgcgagactggctatgagcttctgcaaggtcacttgcccctgaaatcctttactgcagtttgtcagaaagatggatcttgggaccggccaatgcccgcgtgcagcattgttgactgtggccctcctgatgatctacccagtggccgagtggagtacatcacaggtcctggagtgaccacctacaaagctgtgattcagtacagctgtgaagagaccttctacacaatgaaagtgaatgatggtaaatatgtgtgtgaggctgatggattctggacgagctccaaaggagaaaaatcactcccagtctgtgagcctgtttgtggactatcagcccgcacaacaggagggcgtatatatggagggcaaaaggcaaaacctggtgattttccttggcaagtcctgatattaggtggaaccacagcagcaggtgcacttttatatgacaactgggtcctaacagctgctcatgccgtctatgagcaaaaacatgatgcatccgccctggacattcgaatgggcaccctgaaaagactatcacctcattatacacaagcctggtctgaagctgtttttatacatgaaggttatactcatgatgctggctttgacaatgacatagcactgattaaattgaataacaaagttgtaatcaatagcaacatcacgcctatttgtctgccaagaaaagaagctgaatcctttatgaggacagatgacattggaactgcatctggatggggattaacccaaaggggttttcttgctagaaatctaatgtatgtcgacataccgattgttgaccatcaaaaatgtactgctgcatatgaaaagccaccctatccaaggggaagtgtaactgctaacatgctttgtgctggcttagaaagtgggggcaaggacagctgcagaggtgacagcggaggggcactggtgtttctagatagtgaaacagagaggtggtttgtgggaggaatagtgtcctggggttccatgaattgtggggaagcaggtcagtatggagtctacacaaaagttattaactatattccctggatcgagaacataattagtgatttttaacttgcgtgtctgcagtcaaggattcttcatttttagaaatgcctgtgaagaccttggcagcgacgtggctcgagaagcattcatcattactgtggacatggcagttgttgctccacccaaaaaaacagactccaggtgaggctgctgtcatttctccacttgccagtttaattccagccttacccattgactcaaggggacataaaccacgagagtgacagtcatctttgcccacccagtgtaatgtcactgctcaaattacatttcattaccttaaaaagccagtctcttttcatactggctgttggcatttctgtaaactgcctgtccatgctctttgtttttaaacttgttcttattga

SEQ ID NO: 151424 - DNA, 726 bp, Homo sapiens
  Payload ID: 9816
  Gene Symbol: MASP2
  Gene Name: mannan-binding lectin serine peptidase 2
  Uniprot ID: O00187
  ENST ID: ENST00000400898
  CDS Start-End: 27-584
ggccaggccagctggacgggcacaccatgaggctgctgaccctcctgggccttctgtgtggctcggtggccacccccttgggcccgaagtggcctgaacctgtgttcgggcgcctggcatcccccggctttccaggggagtatgccaatgaccaggagcggcgctggaccctgactgcaccccccggctaccgcctgcgcctctacttcacccacttcgacctggagctctcccacctctgcgagtacgacttcgtcaagctgagctcgggggccaaggtgctggccacgctgtgcgggcaggagagcacagacacggagcgggcccctggcaaggacactttctactcgctgggctccagcctggacattaccttccgctccgactactccaacgagaagccgttcacggggttcgaggccttctatgcagccgaggacattgacgagtgccaggtggccccgggagaggcgcccacctgcgaccaccactgccacaaccacctgggcggtttctactgctcctgccgcgcaggctacgtcctgcaccgtaacaagcgcacctgctcagagcagagcctctagcctcccctggagctccggcctgcccagcaggtcagaagccagagccagcctgctggcctcagctccgggttgggctgagatggctgtgccccaactcccattcacccaccatggacccaataataaacctggccccacccca

SEQ ID NO: 151425 - DNA, 1619 bp, Homo sapiens
  Payload ID: 9817
  Gene Symbol: MPI
  Gene Name: mannose phosphate isomerase
  Uniprot ID: P34949
  ENST ID: ENST00000323744
  CDS Start-End: 33-1121
atacgtgcttaatcctggtgcagggggcgagcatggccgctccgcgagtattcccactttcctgtgcggtgcagcagtatgcctgggggaagatgggttccaacagcgaagtggcgcggctgttggccagcagtgatccactggcccagatcgcagaggacaagccttatgcagagttgtggatggggactcacccccgaggggatgccaagatccttgacaaccgcatctcacagaagaccctaagccagtggattgctgagaaccaggacagcttgggctcaaaggtcaaggacacctttaatggcaacctgcccttcctcttcaaagtgctctcagttgaaacacccctgtccatccaggcacaccctaacaaggagctggcagagaagctgcacctccaggctccgcagcactaccccgatgccaaccacaagccagagatggccattgccctcacccccttccagggcttgtgtggcttccggccagttgaggagattgtaacctttctaaagacggctgccggaaacaacatggaggacatctttggggagcttttgctacagctgcaccagcagtacccaggtgatatcggctgctttgccatctacttcctgaacctgcttaccctgaagcctggggaggccatgtttctggaggccaacgtaccccatgcctacctgaaaggagactgcgtggagtgcatggcgtgttcagacaacacagttcgtgctggcctgacacccaagttcattgatgtgccaaccctgtgtgaaatgctcagctatacccctagctccagcaaggacaggctctttctcccaacacggagtcaggaagacccctacctctcaatctatgacccccctgtaccagacttcaccattatgaagacggaggtccctggctctgtcactgaatacaaggtcttggcactggactctgccagcatcctcctgatggtacaggggacagtaatagccagcacacccacaacccagacaccaatccctctgcaacgtggtggcgtgctcttcattggggccaatgagagtgtctcactgaagcttactgagccgaaggacctgctgatattccgtgcctgctgtctgctgtaaaggctgcagcctccccagctctcctctgccagccaccctaaattccagccaacctcacctcctcgggcccagctcaagcccccttccttgctctggaccccttaggtataccctggaagagctggggtgggggaggagggagcgtgaaggtagtgactcctgaacacacccaggtggaaccatctttggggaggagaggcccgtgtgaggggtctgatactccctttgtcttccctctctactcctcgctacacctgagccaggctcttgccaactctgttccagcctatggctttaggctagctgttaaatatgtgacccagcattagctcagcatctgtcagagcaagagaccaggtaatttctaagaacagggttctagcgatgggactgcccatttcctcagctgcagaggaggaaagggaaagggtaggcctgtagactaacgctgtttacacccttgttctgtcaaagcaattaaagatcacttgtgttgag

SEQ ID NO: 151426 - DNA, 5828 bp, Homo sapiens
  Payload ID: 9817
  Gene Symbol: MPI
  Gene Name: mannose phosphate isomerase
  Uniprot ID: P34949
  ENST ID: ENST00000352410
  CDS Start-End: 68-1339
gggcgcagagggccgcgggggctgccgggaaaggcatacgtgcttaatcctggtgcagggggcgagcatggccgctccgcgagtattcccactttcctgtgcggtgcagcagtatgcctgggggaagatgggttccaacagcgaagtggcgcggctgttggccagcagtgatccactggcccagatcgcagaggacaagccttatgcagagttgtggatggggactcacccccgaggggatgccaagatccttgacaaccgcatctcacagaagaccctaagccagtggattgctgagaaccaggacagcttgggctcaaaggtcaaggacacctttaatggcaacctgcccttcctcttcaaagtgctctcagttgaaacacccctgtccatccaggcacaccctaacaaggagctggcagagaagctgcacctccaggctccgcagcactaccccgatgccaaccacaagccagagatggccattgccctcacccccttccagggcttgtgtggcttccggccagttgaggagattgtaacctttctaaagaaggtgcctgagtttcagttcctgattggagatgaggcagcaacacacctgaagcagaccatgagccatgactcccaggctgtggcctcctctctgcagagctgtttctcccacctgatgaagagtgagaagaaggtggtggtggaacagctcaacctgttggtgaagcggatctcccagcaagcggctgccggaaacaacatggaggacatctttggggagcttttgctacagctgcaccagcagtacccaggtgatatcggctgctttgccatctacttcctgaacctgcttaccctgaagcctggggaggccatgtttctggaggccaacgtaccccatgcctacctgaaaggagactgcgtggagtgcatggcgtgttcagacaacacagttcgtgctggcctgacacccaagttcattgatgtgccaaccctgtgtgaaatgctcagctatacccctagctccagcaaggacaggctctttctcccaacacggagtcaggaagacccctacctctcaatctatgacccccctgtaccagacttcaccattatgaagacggaggtccctggctctgtcactgaatacaaggtcttggcactggactctgccagcatcctcctgatggtacaggggacagtaatagccagcacacccacaacccagacaccaatccctctgcaacgtggtggcgtgctcttcattggggccaatgagagtgtctcactgaagcttactgagccgaaggacctgctgatattccgtgcctgctgtctgctgtaaaggctgcagcctccccagctctcctctgccagccaccctaaattccagccaacctcacctcctcgggcccagctcaagcccccttccttgctctggaccccttaggtataccctggaagagctggggtgggggaggagggagcgtgaaggtagtgactcctgaacacacccaggtggaaccatctttggggaggagaggcccgtgtgaggggtctgatactccctttgtcttccctctctactcctcgctacacctgagccaggctcttgccaactctgttccagcctatggctttaggctagctgttaaatatgtgacccagcattagctcagcatctgtcagagcaagagaccaggtaatttctaagaacagggttctagcgatgggactgcccatttcctcagctgcagaggaggaaagggaaagggtaggcctgtagactaacgctgtttacacccttgttctgtcaaagcaattaaagatcacttgtgttgaggctgtggggtaatgagcactcagcctttggggtacctgttcctaaagtgggccaaaagagccctccctacatgatgccccagtttttgctttattcctatttcatacagcttctcgggggagtgagcaggctacactccagaacaccggtatgggaaggagtgggagaggaagccagctttggcctcacaggcacagcttgcaagcaggccttgggtctgcccagaggcacagcttgcaagcagccctacagagaaggtgactcaaaggatacaccagtcaccagtgcaagactcttcgctcctgtttttctcttttttttttttttgagacggagtctcggtctgtagcccaggctggagtgcagtggcacgatctcggctcattgcaagctccgcctcccgggttcacgccactcttctgcctcagcctcccaagtagctgggaccacaggcgcccaccaccacgcccagccaatttttttggtatttttagtagagatggggtttcactgtgttagccaggatggtctcgatcttctgacctcgtgatccgcccacctcagcctcccaaagtgctgggattacaggcgtgagccaccacgcctggcccggctcctgtttttcaactggccctagaggaggggtccgcaaaccaggctggcaggccagttctggccatacctgttcatttccatactgtctggctgctttcaagccacagtggcaaagttgaagagttgcactagactgtacggcctgcaaaactgaaaccattgactgtcaaccacttctctacaacatactcaactgttgcagattacagggactcaggaaccgaattagacaattttcatggcgaggagaagcccagttagctttcctaaacgggcaggaagtgtgaaggagggaatctcctgatgccctgctccaggggtggcacacacctgcaagaggctgtcggctgtctgctgctgctgaggtttctgacctgcaatcgtagatcctgtcaccacagactaatcacttagtccactggctccttcctgtgggataaaggtttaaattcatgcaaaagaatctttctgggcttctgcccacactagagtccctatacaatggagttccaggaaaccaccttcaaaaatctcctgggttttcttgcctccaaattttcttcagctaaaaaacaataaagatgagctggaaagaaaaggtctgctaaagggaacccattctacagaagtgacttgcaagagcctatttcactcatgccgtccagtgaaacaggcccgaaagtgatgcccagtgggaacagcagaaaggggagggagtttccagaaggaattgctgtagtcagctgttaagctatttcttcatttcaggatatccaggatattcttaacttttatttttttgagacggagtctcgcactgtctcccgggctggagtgcagtggcgcgatagctcactgcaacctccgcccactgggttcaagcgattcttctgcctcagctcctgagtagctgggactacaggcgcctgccaccacacccagctaagtttttgtatttttagtagagacggggtttcagtagagacggggtgacaggatctacaattccaggtaaggtcaggttggtctcaaactcctgaccttgtgatttgcttgcctcagcctctgaaagtgctgggattacaagcatgagccattgtgcctggccaaggcctttaaaatccactgcaacacagacacagctcaactagtgtgattgcatttattcttataaatgtacagagctgtagaagtgcaagccaagagttctatagagtagtacataaacaccatatggtaccactcctgctgggaggtaagcctggatacacccctctcctcaggaaactgtcacctgcagaacacacagcactcagaattaaggcagtttggccctgggcacattggtggtattttggtatgtggccactggccctaaacaactgaccatttctaccctgcctcactgcactgtcccaccaggtccctccagctttttctacaaggtaacaccctcctacatggggtcagccagctcagaaacctcttcttcagggacagttgcagctgaatatgccagagctgattattacaacaacgatgcagagggccttggttttggggtcctgccaccctcacccctagaagctgctaaacacccaggccattctgccctgaccacctccccaacagagatgtaggtctatacttaccttccacagccacctcccagcacacactgggtccctctacctgtgttgctgtctttctttacactgtgctacatttgatccctttccacatgtgcacttcacctctgcagacacaagaaaggcctggacatggtctctgcagatggggaaggggttctggatggagatgttcttgagctctacaagcatttgcacaaagtgctcagaatgttggccactgcatagagctgcagagtcccattccagaacagagtaaccatctgcctctcttcccaagaccccaagctggcatgactctggtctctgtcctatctctctgctgtgatgctcctagctagtagagtaagtcagcccccagatactgtatattcctctcaaccttccatggtttgagaaaaacacaaagatagatgtccatcaggcactcacaggattaccatcgtaaggatggttgtcagacaaataacaaataaggccgtatctttttattagacttgctcatcttctagtcaccccttgtggtagagcgaaaagagtgtgttgtccctctcatgcctctggtggtcacaggacactgagtaaagcaagagactggatactttcccatgtagaacctataccccaatcccgactattgggctgggaaccctgtctatgcccattcaaagctcaccatgtgggaggactgcttgggcctgggaggttgaggctgcagtgagctgtgattacaccactgcactccagcctgggtgacagagaccctgtctccaacaaaacaaagcagaacgctcaccatggttctgagttaagccaaaaaacaaaacaaaacctgttggaaaaattctagaaagaggcttggtatagagtatagcaagatatactctccaatttgtgggtagggggtgtcacagcagaaattatgcctatttctgctgtttgggctgggggctgaaagaggctgtgtcacacccagaggtctgcttaaagcccaatcctgagtatccagtaaggcccatgctgtgaccagaagaatctggcaatagaatggtccatgctggagtgaagggaggccctctacactggtggactgatttcctcaggcaagggtctaggagctggcttaggtctctcttacccttcctgtctgtaagcctcagtctaggacaaagcccacacagctgtatacccactctcacgagtccattgctacttctcaaaagtttaaaaagtaaacaataggaaggcaccggactgctccctgtagctccctctgctggtaataataaaaactgcaggcttctggggccagccccagtaccttcgacctaatctttagctcaaagactgggtgaagaaactcacccagaccaaggaaatacaaataaataaatatgaacatgtcagagcagtttttctctaactagggaagggcaaaccagaatcactaaactcacccggacggttggaccagttggggatgccccaggtccagggattctggaagccaggatcctgctgtatcattaagcaacctgctatgatccctgtcatagttagacaggtgcaacctgaagagggacaaaaggactcactttatgctgtcttgaaggtcaagcctgcaaaccatcttagagctaggaagaatagagcaaacggaatttctcgaactggtctcaaacagtttcttttttggattgccagctataataaaccataaagtgcta

SEQ ID NO: 151427 - DNA, 1523 bp, Homo sapiens
  Payload ID: 9817
  Gene Symbol: MPI
  Gene Name: mannose phosphate isomerase
  ENST ID: ENST00000535694
  CDS Start-End: 55-1176
atacgtgcttaatcctggtgcagggggcgagcatggccgctccgcgagttgtggatggggactcacccccgaggggatgccaagatccttgacaaccgcatctcacagaagaccctaagccagtggattgctgagaaccaggacagcttgggctcaaaggtcaaggacacctttaatggcaacctgcccttcctcttcaaagtgctctcagttgaaacacccctgtccatccaggcacaccctaacaaggagctggcagagaagctgcacctccaggctccgcagcactaccccgatgccaaccacaagccagagatggccattgccctcacccccttccagggcttgtgtggcttccggccagttgaggagattgtaacctttctaaagaaggtgcctgagtttcagttcctgattggagatgaggcagcaacacacctgaagcagaccatgagccatgactcccaggctgtggcctcctctctgcagagctgtttctcccacctgatgaagagtgagaagaaggtggtggtggaacagctcaacctgttggtgaagcggatctcccagcaagcggctgccggaaacaacatggaggacatctttggggagcttttgctacagctgcaccagcagtacccaggtgatatcggctgctttgccatctacttcctgaacctgcttaccctgaagcctggggaggccatgtttctggaggccaacgtaccccatgcctacctgaaaggagactgcgtggagtgcatggcgtgttcagacaacacagttcgtgctggcctgacacccaagttcattgatgtgccaaccctgtgtgaaatgctcagctatacccctagctccagcaaggacaggctctttctcccaacacggagtcaggaagacccctacctctcaatctatgacccccctgtaccagacttcaccattatgaagacggaggtccctggctctgtcactgaatacaaggtcttggcactggactctgccagcatcctcctgatggtacaggggacagtaatagccagcacacccacaacccagacaccaatccctctgcaacgtggtggcgtgctcttcattggggccaatgagagtgtctcactgaagcttactgagccgaaggacctgctgatattccgtgcctgctgtctgctgtaaaggctgcagcctccccagctctcctctgccagccaccctaaattccagccaacctcacctcctcgggcccagctcaagcccccttccttgctctggaccccttaggtataccctggaagagctggggtgggggaggagggagcgtgaaggtagtgactcctgaacacacccaggtggaaccatctttggggaggagaggcccgtgtgaggggtctgatactccctttgtcttccctctctactcctcgctacacctgagccaggctcttgccaactctgttccagcctatggctttaggctagctgttaaatatgtgacccagcattagctcagcatctgtcagagc

SEQ ID NO: 151428 - DNA, 851 bp, Homo sapiens
  Payload ID: 9817
  Gene Symbol: MPI
  Gene Name: mannose phosphate isomerase
  ENST ID: ENST00000561470
  CDS Start-End: 33-248
atacgtgcttaatcctggtgcagggggcgagcatggccgctccgcgaggtgagccattggctggggtgtcggcgagtgtgttcgtggagcgcgtcctggggacgactcccggcattatcggccaggttgagtccgctcctggcattccgcggaaagatggtattcccactttcctgtgcggtgcagcagtatgcctgggggaagatgggttccaacagcgaagtggcgcggctgttggccagcagtgatccactggcccagatcgcagaggacaagccttatgcagagttgtggatggggactcacccccgaggggatgccaagatccttgacaaccgcatctcacagaagaccctaagccagtggattgctgagaaccaggacagcttgggctcaaaggtcaaggacacctttaatggcaacctgcccttcctcttcaaagtgctctcagttgaaacacccctgtccatccaggcacaccctaacaaggagctggcagagaagctgcacctccaggctccgcagcactaccccgatgccaaccacaagccagagatggccattgccctcacccccttccagggcttgtgtggcttccggccagttgaggagattgtaacctttctaaagaaggtgcctgagtttcagttcctgattggagatgaggcagcaacacacctgaagcagaccatgagccatgactcccaggctgtggcctcctctctgcagagctgtttctcccacctgatgaagagtgagaagaaggtggtggtggaacagctcaacctgttggtgaagcggatctcccagcaagcggctgccggaaacaacatggaggacatctttgggga

SEQ ID NO: 151429 - DNA, 1195 bp, Homo sapiens
  Payload ID: 9817
  Gene Symbol: MPI
  Gene Name: mannose phosphate isomerase
  ENST ID: ENST00000564003
  CDS Start-End: 55-741
atacgtgcttaatcctggtgcagggggcgagcatggccgctccgcgagttgtggatggggactcacccccgaggggatgccaagatccttgacaaccgcatctcacagaagaccctaagccagtggattgctgagaaccaggacagcttgggctcaaaggtcaaggacacctttaatggcaacctgcccttcctcttcaaagtgctctcagttgaaacacccctgtccatccaggcacaccctaacaaggagctggcagagaagctgcacctccaggctccgcagcactaccccgatgccaaccacaagccagagatggccattgccctcacccccttccagggcttgtgtggcttccggccagttgaggagattgtaacctttctaaagacggctgccggaaacaacatggaggacatctttggggagcttttgctacagctgcaccagcagtacccaggtgatatcggctgctttgccatctacttcctgaacctgcttaccctgaagcctggggaggccatgtttctggaggccaacgtaccccatgcctacctgaaaggaggtgagccacatttcagcagtgagccccactgccatccctgctgggccctgtttccctatctggacaaaggaaggagaagggtggtcaaggagacccccaaggaccttgcagctctgacctctgagggttcctgggctcagcaagcaacagctggtagggatgatgaatgcatttagcattgaacacgccttgaatcctgacaccaaccctgtgatgccatgctactctgattttaagtcctgccagtcagtgtgggaaccacaatttgaacgcaggctatattggatcaaagctgttgttctgtcacagcctttgtatgtctgtcctacctaccagggatttttacactaaaatatgcatgttgccatggaaggatgccacctttcgactgttggctgcttatccacacatgcctcatgcacaggattctggggtagaagtgggagactacagagttggggctccccaacccccaggggttaacatgactcccctctgacaataatgggtgacctgtcacctgtttttggtatttgatatcttaaccccattctcccagagaatacaattcatggaaatttttacctaacttggcatggggttcatggagctcaggttaggaggcccaga

SEQ ID NO: 151430 - DNA, 1148 bp, Homo sapiens
  Payload ID: 9817
  Gene Symbol: MPI
  Gene Name: mannose phosphate isomerase
  ENST ID: ENST00000565576
  CDS Start-End: 13-807
cagggggcgagcatggccgctccgcgagtattcccactttcctgtgcggtgcagcagtatgcctgggggaagatgggttccaacagcgaagtggcgcggctgttggccagcagtgatccactggcccagatcgcagaggacaagccttatgcagagttgtggatggggactcacccccgaggggatgccaagatccttgacaaccgcatctcacagaagaccctaagccagtggattgctgagaaccaggacagcttgggctcaaaggtcaaggacacctttaatggcaacctgcccttcctcttcaaagtgctctcagttgaaacacccctgtccatccaggcacaccctaacaaggagctggcagagaagctgcacctccaggctccgcagcactaccccgatgccaaccacaagccagagatggccattgccctcacccccttccagggcttgtgtggcttccggccagttgaggagattgtaacctttctaaagaaggtgcctgagtttcagttcctgattggagatgaggcagcaacacacctgaagcagaccatgagccatgactcccaggctgtggcctcctctctgcagagctgtttctcccacctgatgaagagtgagaagaaggtggtggtggaacagctcaacctgttggtgaagcggatctcccagcaaggtggacacagttatattcctggttgggtgcaatgctctggcctgggcttcccagcagacaccagactctggggacagttctcaacccccttgcccaagtggaacactaaaaggggccccacttagatgacctgttggcaacttagcattgcttgcctagtctttgtggagcagggcccttcttagttgagtgctgcttcccaactggtcatcttctccagatggttggaggcagactggcatagaggactcttaggatgccttccacctaggcattctgagattttccctagccctgcagctgccctccatggatggacttgtatctcggggctaaagaggcaggaaggggacacgagcatcctccctctcctggaaaggactgatgcctccagcactcagtcatttgatctttcctttaccttctgtgtgcccaaccttgtgctaagaagagttcaggaaatgac

SEQ ID NO: 151431 - DNA, 555 bp, Homo sapiens
  Payload ID: 9817
  Gene Symbol: MPI
  Gene Name: mannose phosphate isomerase
  ENST ID: ENST00000569233
  CDS Start-End: 33-555
atacgtgcttaatcctggtgcagggggcgagcatggccgctccgcgagtattcccactttcctgtgcggtgcagcagtatgcctgggggaagatgggttccaacagcgaagtggcgcggctgttggccagcagtgatccactggcccagatcgcagaggacaagccttatgcagagtggagaaaaagccaaagcataggaaggctttcgcctctgcttctgaaactggaagatttgtggatggggactcacccccgaggggatgccaagatccttgacaaccgcatctcacagaagaccctaagccagtggattgctgagaaccaggacagcttgggctcaaaggtcaaggacacctttaatggcaacctgcccttcctcttcaaagtgctctcagttgaaacacccctgtccatccaggcacaccctaacaaggagctggcagagaagctgcacctccaggctccgcagcactaccccgatgccaaccacaagccagagatggccattgccctcacccccttccagggcttgtgtggcttccggccagttgagg

SEQ ID NO: 151432 - DNA, 578 bp, Homo sapiens
  Payload ID: 9817
  Gene Symbol: MPI
  Gene Name: mannose phosphate isomerase
  ENST ID: ENST00000568828
  CDS Start-End: 23-578
aatcctggtgcagggggcgagcatggccgctccgcgagtattcccactttcctgtgcggtgcagcagtatgcctgggggaagatgggttccaacagcgaagtggcgcggctgttggccagcagtgatccactggcccagatcgcagaggacaagccttatgcagagatccttgacaaccgcatctcacagaagaccctaagccagtggattgctgagaaccaggacagcttgggctcaaaggtcaaggacacctttaatggcaacctgcccttcctcttcaaagtgctctcagttgaaacacccctgtccatccaggcacaccctaacaaggagctggcagagaagctgcacctccaggctccgcagcactaccccgatgccaaccacaagccagagatggccattgccctcacccccttccagggcttgtgtggcttccggccagttgaggagattgtaacctttctaaagaaggtgcctgagtttcagttcctgattggagatgaggcagcaacacacctgaagcagaccatgagccatgactcccaggctgtggcctcctctctgcagagctgtt

SEQ ID NO: 151433 - DNA, 969 bp, Homo sapiens
  Payload ID: 9817
  Gene Symbol: MPI
  Gene Name: mannose phosphate isomerase
  ENST ID: ENST00000569931
  CDS Start-End: 104-969
ctgggcgcagagggccgcgggggctgccgggaaaggcatacgtgcttaatcctggtgcagggggcgagcatggccgctccgcgagcagtatgcctgggggaagatgggttccaacagcgaagtggcgcggctgttggccagcagtgatccactggcccagatcgcagaggacaagccttatgcagagttgtggatggggactcacccccgaggggatgccaagatccttgacaaccgcatctcacagaagaccctaagccagtggattgctgagaaccaggacagcttgggctcaaaggtcaaggacacctttaatggcaacctgcccttcctcttcaaagtgctctcagttgaaacacccctgtccatccaggcacaccctaacaaggagctggcagagaagctgcacctccaggctccgcagcactaccccgatgccaaccacaagccagagatggccattgccctcacccccttccagggcttgtgtggcttccggccagttgaggagattgtaacctttctaaagaaggtgcctgagtttcagttcctgattggagatgaggcagcaacacacctgaagcagaccatgagccatgactcccaggctgtggcctcctctctgcagagctgtttctcccacctgatgaagagtgagaagaaggtggtggtggaacagctcaacctgttggtgaagcggatctcccagcaagcggctgccggaaacaacatggaggacatctttggggagcttttgctacagctgcaccagcagtacccaggtgatatcggctgctttgccatctacttcctgaacctgcttaccctgaagcctggggaggccatgtttctggaggccaacgtaccccatgcctacctgaaaggagactgcgtggagtgcatggcgtgttcagacaacacagttcgtgctggcctgacacccaagttcattgatgtgccaaccctgtg

SEQ ID NO: 151434 - DNA, 1707 bp, Homo sapiens
  Payload ID: 9817
  Gene Symbol: MPI
  Gene Name: mannose phosphate isomerase
  ENST ID: ENST00000563786
  CDS Start-End: 182-1393
atacgtgcttaatcctggtgcagggggcgagcatggccgctccgcgagtgagcacccccagctcttgcctggtttcccgggacactagggtggggcctgaggagtggagtggcagctgaccctgtctgtgcccctagtattcccactttcctgtgcggtgcagcagtatgcctgggggaagatgggttccaacagcgaagtggcgcggctgttggccagcagtgatccactggcccagatcgcagaggacaagccttatgcagagttgtggatggggactcacccccgaggggatgccaagatccttgacaaccgcatctcacagaagaccctaagccagtggattgctgagaaccaggacagcttgggctcaaaggtcaaggacacctttaatggcaacctgcccttcctcttcaaagtgctctcagttgaaacacccctgtccatccaggcacaccctaacaaggagctggcagagaagctgcacctccaggctccgcagcactaccccgatgccaaccacaagccagagatggccattgccctcacccccttccagggcttgtgtggcttccggccagttgaggagattgtaacctttctaaagaaggtgcctgagtttcagttcctgattggagatgaggcagcaacacacctgaagcagaccatgagccatgactcccaggctgtggcctcctctctgcagagctgtttctcccacctgatgaagagtgagaagaaggtggtggtggaacagctcaacctgttggtgaagcggatctcccagcaagcggctgccggaaacaacatggaggacatctttggggagcttttgctacagctgcaccagcagtacccaggtgatatcggctgctttgccatctacttcctgaacctgcttaccctgaagcctggggaggccatgtttctggaggccaacgtaccccatgcctacctgaaaggagactgcgtggagtgcatggcgtgttcagacaacacagttcgtgctggcctgacacccaagttcattgatgtgccaaccctgtgtgaaatgctcagctatacccctagctccagcaaggacaggctctttctcccaacacggagtcaggaagacccctacctctcaatctatgacccccctgtaccagacttcaccattatgaagacggaggtccctggctctgtcactgaatacaaggtcttggcactggactctgccagcatcctcctgatggtacaggggacagtaatagccagcacacccacaacccagacaccaatccctctgcaacgtggtggcgtgctcttcattggggccaatgagagtgtctcactgaagcttactgagccgaaggacctgctgatattccgtgcctgctgtctgctgtaaaggctgcagcctccccagctctcctctgccagccaccctaaattccagccaacctcacctcctcgggcccagctcaagcccccttccttgctctggaccccttaggtataccctggaagagctggggtgggggaggagggagcgtgaaggtagtgactcctgaacacacccaggtggaaccatctttggggaggagaggcccgtgtgaggggtctgatactccctttgtcttccctctctactcctcgctacacctgagccaggctcttgccaactctgttccagcctatggctttaggctagctgttaaatat

SEQ ID NO: 151435 - DNA, 583 bp, Homo sapiens
  Payload ID: 9817
  Gene Symbol: MPI
  Gene Name: mannose phosphate isomerase
  ENST ID: ENST00000564633
  CDS Start-End: 64-583
atacgtgcttaatcctggtgcagggggcgagcatggccgctccgcgagtatgcctgggggaagatgggttccaacagcgaagtggcgcggctgttggccagcagtgatccactggcccagatcgcagaggacaagccttatgcagagttgtggatggggactcacccccgaggggatgccaagatccttgacaaccgcatctcacagaagaccctaagccagtggattgctgagaaccaggacagcttgggctcaaaggtcaaggacacctttaatggcaacctgcccttcctcttcaaagtgctctcagttgaaacacccctgtccatccaggcacaccctaacaaggagctggcagagaagctgcacctccaggctccgcagcactaccccgatgccaaccacaagccagagatggccattgccctcacccccttccagggcttgtgtggcttccggccagttgaggagattgtaacctttctaaagaaggtgcctgagtttcagttcctgattggagatgaggcagcaacacacctgaagcagaccatgagccatgactcccaggctgtggcctcctctc

SEQ ID NO: 151436 - DNA, 2809 bp, Homo sapiens
  Payload ID: 9817
  Gene Symbol: MPI
  Gene Name: mannose phosphate isomerase
  ENST ID: ENST00000566377
  CDS Start-End: 36-899
ggcatacgtgcttaatcctggtgcagggggcgagcatggccgctccgcgagtattcccactttcctgtgcggtgcagcagtatgcctgggggaagatgggttccaacagcgaagtggcgcggctgttggccagcagtgatccactggcccagatcgcagaggacaagccttatgcagagttgtggatggggactcacccccgaggggatgccaagatccttgacaaccgcatctcacagaagaccctaagccagtggattgctgagaaccaggacagcttgggctcaaaggtcaaggacacctttaatggcaacctgcccttcctcttcaaagtgctctcagttgaaacacccctgtccatccaggcacaccctaacaaggagctggcagagaagctgcacctccaggctccgcagcactaccccgatgccaaccacaagccagagatggccattgccctcacccccttccagggcttgtgtggcttccggccagttgaggagattgtaacctttctaaagaaggtgcctgagtttcagttcctgattggagatgaggcagcaacacacctgaagcagaccatgagccatgactcccaggctgtggcctcctctctgcagagctgtttctcccacctgatgaagagtgagaagaaggtggtggtggaacagctcaacctgttggtgaagcggatctcccagcaagcggctgccggaaacaacatggaggacatctttggggagcttttgctacagctgcaccagcagtacccaggtgatatcggctgctttgccatctacttcctgaacctgcttaccctgaagcctggggaggccatgtttctggaggccaacgtaccccatgcctacctgaaaggaggtccctggctctgtcactgaatacaaggtcttggcactggactctgccagcatcctcctgatggtacaggggacagtaatagccagcacacccacaacccagacaccaatccctctgcaacgtggtggcgtgctcttcattggggccaatgagagtgtctcactgaagcttactgagccgaaggacctgctgatattccgtgcctgctgtctgctgtaaaggctgcagcctccccagctctcctctgccagccaccctaaattccagccaacctcacctcctcgggcccagctcaagcccccttccttgctctggaccccttaggtataccctggaagagctggggtgggggaggagggagcgtgaaggtagtgactcctgaacacacccaggtggaaccatctttggggaggagaggcccgtgtgaggggtctgatactccctttgtcttccctctctactcctcgctacacctgagccaggctcttgccaactctgttccagcctatggctttaggctagctgttaaatatgtgacccagcattagctcagcatctgtcagagcaagagaccaggtaatttctaagaacagggttctagcgatgggactgcccatttcctcagctgcagaggaggaaagggaaagggtaggcctgtagactaacgctgtttacacccttgttctgtcaaagcaattaaagatcacttgtgttgaggctgtggggtaatgagcactcagcctttggggtacctgttcctaaagtgggccaaaagagccctccctacatgatgccccagtttttgctttattcctatttcatacagcttctcgggggagtgagcaggctacactccagaacaccggtatgggaaggagtgggagaggaagccagctttggcctcacaggcacagcttgcaagcaggccttgggtctgcccagaggcacagcttgcaagcagccctacagagaaggtgactcaaaggatacaccagtcaccagtgcaagactcttcgctcctgtttttctcttttttttttttttgagacggagtctcggtctgtagcccaggctggagtgcagtggcacgatctcggctcattgcaagctccgcctcccgggttcacgccactcttctgcctcagcctcccaagtagctgggaccacaggcgcccaccaccacgcccagccaatttttttggtatttttagtagagatggggtttcactgtgttagccaggatggtctcgatcttctgacctcgtgatccgcccacctcagcctcccaaagtgctgggattacaggcgtgagccaccacgcctggcccggctcctgtttttcaactggccctagaggaggggtccgcaaaccaggctggcaggccagttctggccatacctgttcatttccatactgtctggctgctttcaagccacagtggcaaagttgaagagttgcactagactgtacggcctgcaaaactgaaaccattgactgtcaaccacttctctacaacatactcaactgttgcagattacagggactcaggaaccgaattagacaattttcatggcgaggagaagcccagttagctttcctaaacgggcaggaagtgtgaaggagggaatctcctgatgccctgctccaggggtggcacacacctgcaagaggctgtcggctgtctgctgctgctgaggtttctgacctgcaatcgtagatcctgtcaccacagactaatcacttagtccactggctccttcctgtgggataaaggtttaaattcatgcaaaagaatctttctgggcttctgcccacactagagtccctatacaatggagttccaggaaaccaccttcaaaaatctcctgggttttcttgcctccaaattttcttcagctaaaaaacaataaagatgagctggaaagaaaa

SEQ ID NO: 151437 - DNA, 857 bp, Homo sapiens
  Payload ID: 9817
  Gene Symbol: MPI
  Gene Name: mannose phosphate isomerase
  ENST ID: ENST00000567570
  CDS Start-End: 500-857
gcatggccgctccgcgaggtgagccattggctggggtgtcggcgagtgtgttcgtggagcgcgtcctggggacgactcccggcattatcggccaggttgagtccgctcctggcattccgcggaaagatgggtgggtgccgggcagaggtgtggccacctgcgatggggattgacctccgaggggagggggcccttctagacgtcgtgccgtgggataggtaccttctgctccctccccgccaccctgcctcagatcagcacaaggtccttactgctgcccatctgacagttgggaacatcgaggcctgcagcggaggggggtctcatccaacagcctacaaaacccttatttgactctgtccccagtgagcacccccagctcttgcctggtttcccgggacactagggtggggcctgaggagtggagtggcagctgaccctgtctgtgcccctagtattcccactttcctgtgcggtgcagcagtatgcctgggggaagatgggttccaacagcgaagtggcgcggctgttggccagcagtgatccactggcccagatcgcagaggacaagccttatgcagagttgtggatggggactcacccccgaggggatgccaagatccttgacaaccgcatctcacagaagaccctaagccagtggattgctgagaaccaggacagcttgggctcaaaggtcaaggacacctttaatggcaacctgcccttcctcttcaaagtgctctcagttgaaacacccctgtccatccaggcacaccctaacaaggagctggcagagaagctgcacctccaggctccgcagcactaccccgatgccaaccacaagccagagatggcca

SEQ ID NO: 151438 - DNA, 559 bp, Homo sapiens
  Payload ID: 9817
  Gene Symbol: MPI
  Gene Name: mannose phosphate isomerase
  ENST ID: ENST00000567132
  CDS Start-End: 33-559
atacgtgcttaatcctggtgcagggggcgagcatggccgctccgcgagtattcccactttcctgtgcggtgcagcagtatgcctgggggaagatgggttccaacagcgaagtggcgcggctgttggccagcagtgatccactggcccagatcgcagaggacaagccttatgcagagttgtggatggggactcacccccgaggggatgccaagatccttgacaaccgcatctcacagaagaccctaagccagtggattgctgagaaccaggacagcttgggctcaaaggtcaaggacacctttaatggcaacctgcccttcctcttcaaagtgctctcagttgaaacacccctgtccatccaggctccgcagcactaccccgatgccaaccacaagccagagatggccattgccctcacccccttccagggcttgtgtggcttccggccagttgaggagattgtaacctttctaaagaaggtgcctgagtttcagttcctgattggagatgaggcagcaacacacctgaagcagaccatgagccatgactcccaggctgt

SEQ ID NO: 151439 - DNA, 1068 bp, Homo sapiens
  Payload ID: 9817
  Gene Symbol: MPI
  Gene Name: mannose phosphate isomerase
  ENST ID: ENST00000567177
  CDS Start-End: 1-642
cagcagtatgcctgggggaagatgggttccaacagcgaagtggcgcggctgttggccagcagtgatccactggcccagatcgcagaggacaagccttatgcagagttgtggatggggactcacccccgaggggatgccaagatccttgacaaccgcatctcacagaagaccctaagccagtggattgctgagaaccaggacagcttgggctcaaaggtcaaggacacctttaatggcaacctgcccttcctcttcaaagtgctctcagttgaaacacccctgtccatccaggcacaccctaacaaggagctggcagagaagctgcacctccaggctccgcagcactaccccgatgccaaccacaagccagagatggccattgccctcacccccttccagggcttgtgtggcttccggccagttgaggagattgtaacctttctaaagacggctgccggaaacaacatggaggacatctttggggagcttttgctacagctgcaccagcagtacccaggtgatatcggctgctttgccatctacttcctgaacctgcttaccctgaagcctggggaggccatgtttctggaggccaacgtaccccatgcctacctgaaaggaggtccctggctctgtcactgaatacaaggtcttggcactggactctgccagcatcctcctgatggtacaggggacagtaatagccagcacacccacaacccagacaccaatccctctgcaacgtggtggcgtgctcttcattggggccaatgagagtgtctcactgaagcttactgagccgaaggacctgctgatattccgtgcctgctgtctgctgtaaaggctgcagcctccccagctctcctctgccagccaccctaaattccagccaacctcacctcctcgggcccagctcaagcccccttccttgctctggaccccttaggtataccctggaagagctggggtgggggaggagggagcgtgaaggtagtgactcctgaacacacccaggtggaaccatctttggggaggagaggcccgtgtgaggggtctgatactcccttt

SEQ ID NO: 151440 - DNA, 1052 bp, Homo sapiens
  Payload ID: 9817
  Gene Symbol: MPI
  Gene Name: mannose phosphate isomerase
  ENST ID: ENST00000562606
  CDS Start-End: 56-1015
atcctggtgcagggggcgagcatggccgctccgcgagcagtatgcctgggggaagatgggttccaacagcgaagtggcgcggctgttggccagcagtgatccactggcccagatcgcagaggacaagccttatgcagagttgtggatggggactcacccccgaggggatgccaagatccttgacaaccgcatctcacagaagaccctaagccagtggattgctgagaaccaggacagcttgggctcaaaggtcaaggacacctttaatggcaacctgcccttcctcttcaaagtgctctcagttgaaacacccctgtccatccaggcacaccctaacaaggagctggcagagaagctgcacctccaggctccgcagcactaccccgatgccaaccacaagccagagatggccattgccctcacccccttccagggcttgtgtggcttccggccagttgaggagattgtaacctttctaaagaaggtgcctgagtttcagttcctgattggagatgaggcagcaacacacctgaagcagaccatgagccatgactcccaggctgtggcctcctctctgcagagctgtttctcccacctgatgaagagtgagaagaaggtggtggtggaacagctcaacctgttggtgaagcggatctcccagcaagcggctgccggaaacaacatggaggacatctttggggagcttttgctacagctgcaccagcagtacccaggtgatatcggctgctttgccatctacttcctgaacctgcttaccctgaagcctggggaggccatgtttctggaggccaacgtaccccatgcctacctgaaaggaggtgagccacatttcagcagtgagccccactgccatccctgctgggccctgtttccctatctggacaaaggaaggagaagggtggtcaaggagacccccaaggaccttgcagctctgacctctgagggttcctgggctcagcaagcaacagctggtagggatgatgaatgcatttagcattgaacacgccttgaatcctgacaccaaccctgtg

SEQ ID NO: 151441 - DNA, 537 bp, Homo sapiens
  Payload ID: 9817
  Gene Symbol: MPI
  Gene Name: mannose phosphate isomerase
  ENST ID: ENST00000568907
  CDS Start-End: 33-537
atacgtgcttaatcctggtgcagggggcgagcatggccgctccgcgagtattcccactttcctgtgcggtgcagcagtatgcctgggggaagatgggttccaacagcgaagtggcgcggctgttggccagcagtgatccactggcccagatcgcagaggacaagccttatgcagagttgtggatggggactcacccccgaggggatgccaagatccttgacaaccgcatctcacagaagaccctaagccagtggattgctgagaaccaggacagcttgggctcaaaggagctggcagagaagctgcacctccaggctccgcagcactaccccgatgccaaccacaagccagagatggccattgccctcacccccttccagggcttgtgtggcttccggccagttgaggagattgtaacctttctaaagaaggtgcctgagtttcagttcctgattggagatgaggcagcaacacacctgaagcagaccatgagccatgactcccaggctgtggcctcctctctgcagagctgtttct

SEQ ID NO: 151442 - DNA, 407 bp, Homo sapiens
  Payload ID: 9817
  Gene Symbol: MPI
  Gene Name: mannose phosphate isomerase
  ENST ID: ENST00000562800
  CDS Start-End: 33-407
atacgtgcttaatcctggtgcagggggcgagcatggccgctccgcgagtattcccactttcctgtgcggtgcagcagtatgcctgggggaagatgggttccaacagcgaagtggcgcggctgttggccagcagtgatccactggcccagatcgcagaggacaagccttatgcagagttgtggatggggactcacccccgaggggatgccaagatccttgacaaccgcatctcacagaagaccctaagccagtggattgctgagaaccaggacagcttgggctcaaaggtcttggcactggactctgccagcatcctcctgatggtacaggggacagtaatagccagcacacccacaacccagacaccaatccctctgcaacgtggtggcgtgctcttcattggggcc

SEQ ID NO: 151443 - DNA, 1481 bp, Homo sapiens
  Payload ID: 9817
  Gene Symbol: MPI
  Gene Name: mannose phosphate isomerase
  ENST ID: ENST00000563422
  CDS Start-End: 33-1052
atacgtgcttaatcctggtgcagggggcgagcatggccgctccgcgagtattcccactttcctgtgcggtgcagcagtatgcctgggggaagatgggttccaacagcgaagtggcgcggctgttggccagcagtgatccactggcccagatcgcagaggacaagccttatgcagagttgtggatggggactcacccccgaggggatgccaagatccttgacaaccgcatctcacagaagaccctaagccagtggattgctgagaaccaggacagcttgggctcaaaggtcaaggacacctttaatggcaacctgcccttcctcttcaaagtgctctcagttgaaacacccctgtccatccaggcacaccctaacaaggagctggcagagaagctgcacctccaggctccgcagcactaccccgatgccaaccacaagccagagatggccattgccctcacccccttccagggcttgtgtggcttccggccagttgaggagattgtaacctttctaaagaaggtgcctgagtttcagttcctgattggagatgaggcagcaacacacctgaagcagaccatgagccatgactcccaggctgtggcctcctctctgcagagctgtttctcccacctgatgaagagtgagaagaaggtggtggtggaacagctcaacctgttggtgaagcggatctcccagcaagcggctgccggaaacaacatggaggacatctttggggagcttttgctacagctgcaccagcagtacccaggtgatatcggctgctttgccatctacttcctgaacctgcttaccctgaagcctggggaggccatgtttctggaggccaacgtaccccatgcctacctgaaaggaggtgagccacatttcagcagtgagccccactgccatccctgctgggccctgtttccctatctggacaaaggaaggagaagggtggtcaaggagacccccaaggaccttgcagctctgacctctgagggttcctgggctcagcaagcaacagctggtagggatgatgaatgcatttagcattgaacacgccttgaatcctgacaccaaccctgtgatgccatgctactctgattttaagtcctgccagtcagtgtgggaaccacaatttgaacgcaggctatattggatcaaagctgttgttctgtcacagcctttgtatgtctgtcctacctaccagggatttttacactaaaatatgcatgttgccatggaaggatgccacctttcgactgttggctgcttatccacacatgcctcatgcacaggattctggggtagaagtgggagactacagagttggggctccccaacccccaggggttaacatgactcccctctgacaataatgggtgacctgtcacctgtttttggtatttgatatcttaaccccattctcccagagaatacaattcatggaaatttttacctaacttggcatggggttca

SEQ ID NO: 151444 - DNA, 5198 bp, Homo sapiens
  Payload ID: 9818
  Gene Symbol: MRC1
  Gene Name: mannose receptor, C type 1
  Uniprot ID: P22897
  ENST ID: ENST00000569591
  CDS Start-End: 123-4493
ttttcagctgggcagctctgggaacttggattaggtggagaggcagttggggggcctcgttgttttgcgtcttagttccgccctcctgtccatcaggagaaggaaaggataaaccctgggccatgaggctacccctgctcctggtttttgcctctgtcattccgggtgctgttctcctactggacaccaggcaatttttaatctataatgaagatcacaagcgctgcgtggatgcagtgagtcccagtgccgtccaaaccgcagcttgcaaccaggatgccgaatcacagaaattccgatgggtgtccgaatctcagattatgagtgttgcatttaaattatgcctgggagtgccatcaaaaacggactgggttgctatcactctctatgcctgtgactcaaaaagtgaatttcagaaatgggagtgcaaaaatgacacacttttggggatcaaaggagaagatttattttttaactacggcaacagacaagaaaagaatattatgctctacaagggatcgggtttatggagcaggtggaagatctatggaaccacagacaatctgtgctccagaggttatgaagccatgtatacgctactaggcaatgccaatggagcaacctgtgcattcccgttcaagtttgaaaacaagtggtacgcagattgcacgagtgctgggcggtcggatggatggctctggtgcggaaccactactgactatgacacagacaagctatttggatattgtccattgaaatttgagggcagtgaaagcttatggaataaagacccgctgaccagcgtttcctaccagataaactccaaatccgctttaacgtggcaccaggcgaggaaaagctgccaacaacagaacgctgagctcctgagcatcacagagattcatgagcaaacatacctgacaggattaaccagttccttgacctcaggactctggattggacttaacagtctgagcttcaacagcggttggcagtggagtgaccgcagtcctttccgatatttgaactggttaccaggaagtccatcagctgaacctggaaaaagctgtgtgtcactaaatcctggaaaaaatgctaaatgggaaaatctggaatgtgttcagaaactgggctatatttgcaaaaagggcaacaccactttaaattcttttgttattccctcagaaagtgatgtgcctactcactgtcctagtcagtggtggccgtatgccggtcactgttacaagattcacagagatgagaaaaaaatccagagggatgctctgaccacctgcaggaaggaaggcggtgacctcacaagtatccacaccatcgaggaattggactttattatctcccagctaggatatgagccaaatgacgaattgtggatcggcttaaatgacattaagattcaaatgtactttgagtggagtgatgggacccctgtaacgtttaccaaatggcttcgtggagaaccaagccatgaaaacaacagacaggaggattgtgtggtgatgaaaggcaaggatgggtactgggcagatcggggctgtgagtggcctcttggctacatctgcaagatgaaatcacgaagccaaggtccagaaatagtggaagtcgaaaaaggctgcaggaaaggctggaaaaaacatcacttttactgctatatgattggacatacgctttcaacatttgcagaagcaaaccaaacctgtaataatgagaatgcttatttaacaactattgaagacagatatgaacaagccttcctgactagtttcgttggcttaaggcctgaaaaatatttctggacaggactttcagatatacaaaccaaagggacttttcagtggaccatcgaggaagaggttcggttcacccactggaattcagatatgccagggcgaaagccagggtgtgttgccatgagaaccgggattgcagggggcttatgggatgttttgaaatgtgatgaaaaggcaaaatttgtgtgcaagcactgggcagaaggagtaacccacccaccgaagcccacgacgactcccgaacccaaatgtccggaggattggggcgccagcagtagaacaagcttgtgtttcaagctgtatgcaaaaggaaaacatgagaagaaaacgtggtttgaatctcgagatttttgtcgagctctgggtggagacttagctagcatcaataacaaagaggaacagcaaacaatatggcgattaataacagctagtggaagctaccacaaactgttttggttgggattgacatatggaagcccttcagaaggttttacttggagtgatggttctcctgtttcatatgaaaactgggcttatggagaacctaataattatcaaaatgttgaatactgtggtgagctgaaaggtgaccctactatgtcttggaatgatattaattgtgaacaccttaacaactggatttgccagatacaaaaaggacaaacaccaaaacctgagccaacaccagctcctcaagacaatccaccagttactgaagatgggtgggttatttacaaagactaccagtattatttcagcaaagagaaggaaaccatggacaatgcgcgagcgttttgcaagaggaattttggtgatcttgtttctattcaaagtgaaagtgaaaagaagtttctatggaaatatgtaaacagaaatgatgcacagtctgcatattttattggtttattgatcagcttggataaaaagtttgcttggatggatggaagcaaagtggattacgtgtcttgggccacaggtgaacccaattttgcaaatgaagatgaaaactgtgtgaccatgtattcaaattcagggttttggaatgacattaactgtggctatccaaacgccttcatttgccagcgacataacagtagtatcaatgctaccacagttatgcctaccatgccctcggtcccatcagggtgcaaggaaggttggaatttctacagcaacaagtgtttcaaaatctttggatttatggaagaagaaagaaaaaattggcaagaggcacgaaaagcttgtataggctttggagggaatctggtctccatacaaaatgaaaaagagcaagcatttcttacctatcacatgaaggactccactttcagtgcctggactgggctgaatgatgtcaattcagaacacacgttcctttggacggatggacgaggagtccattacacaaactgggggaaaggttaccctggtggaagaagaagcagtctttcttatgaagatgctgactgtgttgttattattggaggtgcatcaaatgaagcaggaaaatggatggatgatacctgcgacagtaaacgaggctacatatgccagacacgatccgacccttccttgactaatcctccagcaacgattcaaacagatggctttgttaaatatggcaaaagcagctattcactcatgagacaaaaatttcaatggcatgaagcggagacatactgcaagcttcacaattcccttatagccagcattctggatccctacagtaatgcatttgcgtggctgcagatggaaacatctaatgaacgtgtgtggatcgccctgaacagtaacttgactgataatcaatacacttggactgataagtggagggtgaggtacactaactgggctgctgatgagcccaaattgaaatcagcatgtgtttatctggatcttgatggctactggaagacagcacattgcaatgaaagtttttactttctctgtaaaagatcagatgaaatccctgctactgaacccccacaactgcctggcagatgcccggagtcagatcacacagcatggattcctttccatggtcactgttactatattgagtcctcatatacaagaaactggggccaagcttctctggaatgtcttcgaatgggttcctctctggtttccattgaaagtgctgcagaatccagttttctgtcatatcgggttgagccacttaaaagtaaaaccaatttttggataggattgttcagaaatgttgaagggacgtggctgtggataaataacagtccggtctcctttgtcaactggaacacaggagatccctctggtgaacggaatgattgtgtagctttacatgcgtcttctgggttttggagtaatattcactgttcatcctacaaaggatatatttgtaaaagaccaaaaattattgatgctaaacctactcatgaattacttacaacaaaagctgacacaaggaagatggacccttctaaaccgtcttccaacgtggccggagtagtcatcattgtgatcctcctgattttaacgggtgctggccttgccgcctatttcttttataagaaaagacgtgtgcacctacctcaagagggcgcctttgaaaacactctgtattttaacagtcagtcaagcccaggaactagtgatatgaaagatctcgtgggcaatattgaacagaatgaacactcggtcatctagtacctcaatgcgattctgagatatttgaatttcataaaattgtaactgaaatttaaaatttttagttcaatgtgattgttttctttaaaatgagtactgaattgtactggtctgtccttttttcctttgcctaattgaagaaataattgcttgttttctagcctggcaagatattttcataaaagagggataacaatgctgattactaccttttaaaatattttagataaatgcacagcaccacagcaccacatctaagcattagtgatgggtagctgatgtcagcttcatgtggattttaagcactctagaaacaatgaagcttcttggcatattttaaggagctcccaaaatgtgttacctattaaattgtaactcagcaagtagaagaccatttgaaaagtcaggtacaaatttcctcaagtggcataaaaatgtagtcagttttctcttttaccagtttttatttccactccaattatttagaactttatttgtacatgtgcagaagaataaggcagctgagaatcttgtttcccccaagagagttttacaggctgagtgttgcaaatgtgttctttgtcctgttatatgtatatcaggaatacaaggatgtgaaataaaactgtaaatttgcataactggatgtacttagataatgtgaaataaacattaaagacaaggtctatttttaatagatttgca

SEQ ID NO: 151445 - DNA, 5988 bp, Homo sapiens
  Payload ID: 9819
  Gene Symbol: MRC2
  Gene Name: mannose receptor, C type 2
  Uniprot ID: Q9UBG0
  ENST ID: ENST00000303375
  CDS Start-End: 403-4842
gaaggcgaggcggggagagactgggaaacagagcagcaagagaaagggcgcacgctggggtcctcctggacccggcgtgtcctcctctccgccacccctttctctccctcccgacgctctagccccagacccgcgcctcctccccttcccctcccacgctgcccacttcccttcccctctacccctcgaaccctcctccccggttctgcgctcctccctccgccctccctccgcccgggctgcctcctccctcctcctccccgggaggcatcacttcgtcccgacccggaggaggacgcgagccccttgcgggcggtcatcacagcccagcctcggggctgccacagcgcgttgcgcctgtgcgccctcggtccccgcgtccactgagcgccgcgctcggggatggggcccggccggccggcccccgcgccctggcctcgtcacctgctgcgctgcgtcctgctcctcgggtgcctgcacctcggccgtcccggcgcccctggggacgccgccctcccggaacccaacgtcttcctcatcttcagccatggactgcagggctgcctggaggcccagggcgggcaggtcagagtcaccccggcttgcaataccagcctccctgcccagcgctggaagtgggtctcccgaaaccggctattcaacctgggtaccatgcagtgcctgggcacaggctggccaggcaccaacaccacggcctccctgggcatgtatgagtgtgaccgggaagcactgaatcttcgctggcattgtcgtacactgggtgaccagctgtccttgctcctgggggcccgcaccagcaacatatccaagcctggcacccttgagcgtggtgaccagacccgcagtggccagtggcgcatctacggcagcgaggaggacctatgtgctctgccctaccacgaggtctacaccatccagggaaactcccacggaaagccgtgcaccatccccttcaaatatgacaaccagtggttccacggctgcaccagcacgggccgcgaggatggtcacctgtggtgtgccaccacccaggactacggcaaagacgagcgctggggcttctgccccatcaagagtaacgactgcgagaccttctgggacaaggaccagctgactgacagctgctaccagtttaacttccagtccacgctgtcgtggagggaggcctgggccagctgcgagcagcagggtgcggatctgctgagcatcacggagatccacgagcagacctacatcaacggcctcctcactgggtacagctccaccctgtggatcggcttgaatgacttggacacgagcggaggctggcagtggtcggacaactcgcccctcaagtacctcaactgggagagtgaccagccggacaaccccagtgaggagaactgtggagtgatccgcactgagtcctcgggcggctggcagaaccgtgactgcagcatcgcgctgccctatgtgtgcaagaagaagcccaacgccacggccgagcccacccctccagacaggtgggccaatgtgaaggtggagtgcgagccgagctggcagcccttccagggccactgctaccgcctgcaggccgagaagcgcagctggcaggagtccaagaaggcatgtctacggggcggtggcgacctggtcagcatccacagcatggcggagctggaattcatcaccaagcagatcaagcaagaggtggaggagctgtggatcggcctcaacgatttgaaactgcagatgaattttgagtggtctgacgggagccttgtgagcttcacccactggcacccctttgagcccaacaacttccgggacagtctggaggactgtgtcaccatctggggcccggaaggccgctggaacgacagtccctgtaaccagtccttgccatccatctgcaagaaggcaggccagctgagccagggggccgccgaggaggaccatggctgccggaagggttggacgtggcacagcccatcctgctactggctgggagaagaccaagtgacctacagtgaggcccggcgcctgtgcactgaccatggctctcagctggtcaccatcaccaacaggttcgagcaggccttcgtcagcagcctcatctacaactgggagggcgagtacttctggacggccctgcaggacctcaacagcaccggctccttcttctggctcagtggggatgaagtcatgtacacccactggaaccgggaccagcccgggtacagccgtgggggctgcgtggcgctggccactggcagcgccatggggctgtgggaggtgaagaactgtacctcgttccgggcccgctacatctgccggcagagcctgggcactccagtgacgccggagctgccggggccagatcccacgcccagcctcactggctcctgtccccagggctgggcctcggacaccaaactccggtattgctataaggtgttcagctcagagcggctgcaggacaagaagagctgggtccaggcccagggggcctgccaggagctgggggcccagctgctgagcctggccagctacgaggaggagcactttgtggccaacatgctcaacaagatcttcggtgaatcagaacccgagatccacgagcagcactggttctggatcggcctgaaccgtcgggatcccagagggggtcagagttggcgctggagcgacggcgtagggttctcttaccacaatttcgaccggagccggcacgacgacgacgacatccgaggctgtgcggtgctggacctggcctccctgcagtgggtggccatgcagtgcgacacacagctggactggatctgcaagatccccagaggtacggacgtgcgggagcccgacgacagccctcaaggccgacgggaatggctgcgcttccaggaggccgagtacaagttctttgagcaccactccacgtgggcgcaggcgcagcgcatctgcacgtggttccaggccgagctgacctcggtgcacagccaggcggagctagacttcctgagccacaacttgcagaagttctcccgggcccaggagcagcactggtggatcggcctgcacacctctgagagcgatgggcgcttcagatggacagatggttccattataaacttcatctcctgggcaccaggcaaacctcggcctgtcggcaaggacaagaagtgcgtgtacatgacagccagccgagaggactggggggaccagaggtgcctgacagccttgccctacatctgcaagcgcagcaacgtcaccaaagaaacgcagcccccagacctgccaactacagccctggggggctgcccctctgactggatccagttcctcaacaagtgttttcaggtccagggccaggaaccccagagccgggtgaagtggtcagaggcacagttctcctgtgaacagcaagaggcccagctggtcaccatcacaaaccccttagagcaagcattcatcacagccagcctgcccaatgtgacctttgacctttggattggcctccatgcctcgcagagggacttccagtgggtggagcaggagcctttgatgtatgccaactgggcacctggggagccctctggccctagccctgctcccagtggcaacaaaccgaccagctgtgcagtggtcctgcacagcccctcagcccacttcactggccgctgggacgatcggagctgcacggaggagacccatggcttcatctgccagaagggcacggacccctccctgagcccgtccccagcagcgctgccccccgccccgggcactgagctctcctacctcaacggcaccttccggctgcttcagaagccgctgcgctggcacgatgccctcctgctgtgtgagagccgcaatgccagcctggcctacgtgcccgacccctacacccaggccttcctcacgcaggctgcccgagggctgcgcacgccgctctggattgggctggctggcgaggagggctctcggcggtactcctgggtctcagaggagccgctgaactacgtgggctggcaggacggggagccgcagcagccggggggctgtacctacgtagatgtggacggggcctggcgcaccaccagctgtgacaccaagctgcagggggctgtgtgtggggttagcagtgggccccctcctccccgaagaataagctaccatggcagctgtccccagggactggcagactccgcgtggattcccttccgggagcactgctattctttccacatggagctgctgctgggccacaaggaggcgcgacagcgctgccagagagcgggtggggccgtcctgtctatcctggatgagatggagaatgtgtttgtctgggagcacctgcagagctatgagggccagagtcggggcgcctggctgggcatgaacttcaaccccaaaggaggcactctggtctggcaggacaacacagctgtgaactactccaactgggggcccccgggcttgggccccagcatgctgagccacaacagctgctactggattcagagcaacagcgggctatggcgccccggcgcttgcaccaacatcaccatgggtgtcgtctgcaagcttcctcgtgctgagcagagcagcttctccccatcagcgcttccagagaacccagcggccctggtggtggtgctgatggcggtgctgctgctcctggccttgctgaccgcagccctcatcctttaccggaggcgccagagcatcgagcgcggggcctttgagggtgcccgctacagccgcagcagctccagccccaccgaggccactgagaagaacatcctggtgtcagacatggaaatgaatgagcaacaagaatagagccaggcgcgtgggcagggccagggcgggaggagctggggagctggggccctgggtcagtctggccccccaccagctgcctgtccagttggcctatggaagggtgcccttgggagtcgctgttgggagccggagctgggcagagcctgggctggtggggtgccaccctcccacaagggctgggctgagacccagctgagtgcagcgtggcgtttccctttctgggggggcctgaggtcttgtcacctggtcctgtgcccccacaggaaccagaggtaggatgggagggggaacgagagcctctttctccccagagcccccggcccaggcctgttgatccgcgccccaggacccccttctttgcagagcccgaggagcctcccctgtcccctcgggcagatctgttgtgtctctcttcccacctggcagcctcagctctgtgcccctcaccctgctccctctcgccccttctctcccaccccttccttctgagccgggccctggggattggggagccctcttgttcctgatgagggtcagctgagggggctgagcatccatcactcctgtgcctgctggggtggctgtggggcgtggcaggaggggcctaggtgggttgggcctgagaaccagggcacgggtgtggtgtctgctgggctggagataagactggggagagacaccccaacctcccagggtgggagctgggccgggctgggatgtcatctcctgccgggcgggggagggctctgcccctggaagagtcccctgtggggaccaaaataagttccctaacatctccagctcctggctctggtttggagcaaggggaagggttgccagagtcctgggggccccagaggagcaggagtctgggagggcccagagttcaccctctagtggatccaggaggagcagcacccgagccctggagtggcccagtacccttccaagaggccacagtcccagccaggacaaagtatgcggcccatcctggtgcgacagcgtgggacaatgtgaacatggactcgaagacatggccctttctctgtagttgattttttaaatgtgccattattgtttttaaaaaaaaaggaaaaaagaaaagcaaacaaataaaacacctttaagaggcttgaaagagaa

SEQ ID NO: 151446 - DNA, 3201 bp, Homo sapiens
  Payload ID: 9819
  Gene Symbol: MRC2
  Gene Name: mannose receptor, C type 2
  ENST ID: ENST00000446119
  CDS Start-End: 1020-2057
atatgatgatccgggggcctctttgtatttggtgcctacttaccatgtactggggggcttgaggcaggaaggaccaggagcacctgggactcagaatttgagcttgtctttttgcccttgggcttcctgccctggagtcctcaggcttcttttctggagcagcaagtgtccagggacagctggggccttatctagaggcaccaggtccttgggtctttgactgccctgagctcagtagctccacccctcagcctacagccactaaaccccagaacctgggcccttccctgcccccattcctgcggccttcattgctgcatccggtggaggcccagctgggggccggtgctggagttacctctgctccatgccattgcagatggacagatggttccattataaacttcatctcctgggcaccaggcaaacctcggcctgtcggcaaggacaagaagtgcgtgtacatgacagccagccgaggctagactcagcgaggggtggacctgtctccatggtccagaagacttgaattcggagctggacacaggccctgagcctctgcccagactcctctcagggcatgaggctgagtgtgctgccagccatgccctgccctgctctgccctgggggtgactgccctcccctcccctttccgcagaggactggggggaccagaggtgcctgacagccttgccctacatctgcaagcgcagcaacgtcaccaaagaaacgcagcccccagacctgccaactacagccctggggggctgcccctctgactggatccagttcctcaacaagtgttttcaggtccagggccaggaaccccagagccgggtgaagtggtcagaggcacagttctcctgtgaacagcaagaggcccagctggtcaccatcacaaaccccttagagcaagcattcatcacagccagcctgcccaatgtgacctttgacctttggattggcctccatgcctcgcagagggacttccagtgggtggagcaggagcctttgatgtatgccaactgggcacctggggagccctctggccctagccctgctcccagtggcaacaaaccgaccagctgtgcagtggtcctgcacagcccctcagcccacttcactggccgctgggacgatcggagctgcacggaggagacccatggcttcatctgccagaagggcacggggctctcggcggtactcctgggtctcagaggagccgctgaactacgtgggctggcaggacggggagccgcagcagccggggggctgtacctacgtagatgtggacggggcctggcgcaccaccagctgtgacaccaagctgcagggggctgtgtgtggggttagcagtgggccccctcctccccgaagaataagctaccatggcagctgtccccagggactggcagactccgcgtggattcccttccgggagcactgctattctttccacatggagctgctgctgggccacaaggaggcgcgacagcgctgccagagagcgggtggggccgtcctgtctatcctggatgagatggagaatgtgtttgtctgggagcacctgcagagctatgagggccagagtcggggcgcctggctgggcatgaacttcaaccccaaaggaggcactctggtctggcaggacaacacagctgtgaactactccaactgggggcccccgggcttgggccccagcatgctgagccacaacagctgctactggattcagagcaacagcgggctatggcgccccggcgcttgcaccaacatcaccatgggtgtcgtctgcaagcttcctcgtgctgagcagagcagcttctccccatcagcgcttccagagaacccagcggccctggtggtggtgctgatggcggtgctgctgctcctggccttgctgaccgcagccctcatcctttaccggaggcgccagagcatcgagcgcggggcctttgagggtgcccgctacagccgcagcagctccagccccaccgaggccactgagaagaacatcctggtgtcagacatggaaatgaatgagcaacaagaatagagccaggcgcgtgggcagggccagggcgggaggagctggggagctggggccctgggtcagtctggccccccaccagctgcctgtccagttggcctatggaagggtgcccttgggagtcgctgttgggagccggagctgggcagagcctgggctggtggggtgccaccctcccacaagggctgggctgagacccagctgagtgcagcgtggcgtttccctttctgggggggcctgaggtcttgtcacctggtcctgtgcccccacaggaaccagaggtaggatgggagggggaacgagagcctctttctccccagagcccccggcccaggcctgttgatccgcgccccaggacccccttctttgcagagcccgaggagcctcccctgtcccctcgggcagatctgttgtgtctctcttcccacctggcagcctcagctctgtgcccctcaccctgctccctctcgccccttctctcccaccccttccttctgagccgggccctggggattggggagccctcttgttcctgatgagggtcagctgagggggctgagcatccatcactcctgtgcctgctggggtggctgtggggcgtggcaggaggggcctaggtgggttgggcctgagaaccagggcacgggtgtggtgtctgctgggctggagataagactggggagagacaccccaacctcccagggtgggagctgggccgggctgggatgtcatctcctgccgggcgggggagggctctgcccctggaagagtcccctgtggggaccaaaataagttccctaacatctccagctcctggctctggtttggagcaaggggaagggttgccagagtcctgggggccccagaggagcaggagtctgggagggcccagagttcaccctctagtggatccaggaggagcagcacccgagccctggagtggcccagtacccttccaagaggccacagtcccagccaggacaaagtatgcggcccatcctggtgcgacagcgtgggacaatgtgaacatggactcgaagacatggccctttctctgtagttgattttttaaatgtgccattattgtttttaaaaaaaaaggaaaaaagaaaagcaaacaaataaaacacctttaagaggcttgaaagag

SEQ ID NO: 151447 - DNA, 598 bp, Homo sapiens
  Payload ID: 9819
  Gene Symbol: MRC2
  Gene Name: mannose receptor, C type 2
  ENST ID: ENST00000584682
  CDS Start-End: 1-473
ccttcgtcagcagcctcatctacaactgggagggcgagtacttctggacggccctgcaggacctcaacagcaccggctccttcttctggctcagtggggatgaagtcatgtacacccactggaaccgggaccagcccgggtacagccgtgggggctgcgtggcgctggccactggcagcgccatggggctgtgggaggtgaagaactgtacctcgttccgggcccgctacatctgccggcagagcctgggcactccagtgacgccggagctgccggggccagatcccacgcccagcctcactggctcctgtccccagggctgggcctcggacaccaaactccggtattgctataaggtgttcagctcagagcggctgcaggacaagaagagctgggtccaggcccagggggcctgccaggagctgggggcccagctgctgagcctggccagctacgaggaggagcacttttgaatcagaacccgagatccacgagcagcactggttctggatcggcctgaaccgtcgggatcccagagggggtcagagttggcgctggagcgacggcgtagggttctcttaccacaatttcgaccgga

SEQ ID NO: 151448 - DNA, 574 bp, Homo sapiens
  Payload ID: 9819
  Gene Symbol: MRC2
  Gene Name: mannose receptor, C type 2
  ENST ID: ENST00000579432
  CDS Start-End: 470-574
agaacatatgatgatccgggggcctctttgtatttggtgcctacttaccatgtactggggggcttgaggcaggaaggaccaggagcacctgggactcagaatttgagcttgtctttttgcccttgggcttcctgccctggagtcctcaggcttcttttctggagcagcaagtgtccagggacagctggggccttatctagaggcaccaggtccttgggtctttgactgccctgagctcagtagctccacccctcagcctacagccactaaaccccagaacctgggcccttccctgcccccattcctgcggccttcattgctgcatccggtggaggcccagctgggggccggtgctggagttacctctgctccatgccattgcagatggacagatggttccattataaacttcatctcctgggcaccaggcaaacctcggcctgtcggcaaggacaagaagtgcgtgtacatgacagccagccgagaggactggggggaccagaggtgcctgacagccttgccctacatctgcaagcgcagcaacgtcaccaaagaaacgcagcccccagacctg

SEQ ID NO: 151449 - DNA, 2756 bp, Homo sapiens
  Payload ID: 9820
  Gene Symbol: M6PR
  Gene Name: mannose-6-phosphate receptor (cation dependent)
  Uniprot ID: P20645
  ENST ID: ENST00000000412
  CDS Start-End: 470-1303
ccgggagcggtcaggcgcgtgaccccgcgtgaccggggtgcgcgagccgagaggccctggaagcgggactctgggaccccattgaaagaaaggcaaccagaaaaggcgaaacgacaacctcgatagtgattggagctgatggaacgagggcggagctaaagtcccagaatactggccaatcagagtttaagattatcagggagcccgggaaggggaaaggggcgaaatggttctatggtcacatgccgcggggtctggtgggaggagcggttgcccagcggcctcttggcgcttcctgtttccggttcccagagtggggcacagcgaggcgctagggggaacgctggcctctgaaactagctctgggaccggggtctgcggccggcccctagctggccccgtctcccatccccagaagggtattcactggggattctgagctttggctactccagtttcccacgacacgatgttccctttctacagctgctggaggactggactgctactactactcctggctgtggcagtgagagaatcctggcagacagaagaaaaaacttgcgacttggtaggagaaaagggtaaagagtcagagaaagagttggctctagtgaagaggctgaaaccactgtttaataaaagctttgagagcactgtgggccagggttcagacacatacatctacatcttcagggtgtgccgggaagctggcaaccacacttctggggcaggcctggtgcaaatcaacaaaagtaatgggaaggagacagtggtagggagactcaacgagactcacatcttcaacggaagtaattggatcatgctgatctataaagggggtgatgaatatgacaaccactgtggcaaggagcagcgtcgtgcagtggtgatgatctcctgcaatcgacacaccctagcggacaattttaaccctgtgtctgaggagcgtggcaaagtccaagattgtttctacctctttgagatggatagcagcctggcctgttcaccagagatctcccacctcagtgtgggttccatcttacttgtcacgtttgcatcactggttgctgtttatgttgttggggggttcctataccagcgactggtagtgggagccaaaggaatggagcagtttccccacttagccttctggcaggatcttggcaacctggtagcagatggctgtgactttgtctgccgttctaaacctcgaaatgtgcctgcagcatatcgtggtgtgggggatgaccagctgggggaggagtcagaagaaagggatgaccatttattaccaatgtagattgcactttatatgtccagcctcttcctcagtcccccaaaccaaagctacacagccagatttctcaagcagtctcaactccagtccctcatctcacccttactattgctcttgctttccagtttgcttttgatttgcatcttctcactagtaaaactgccttccctttgttccttattttctgttttttctctagagaggtacagttgtaagtcagagttaatataatagggcctgtgaaaacagaggcttttgcattgtctcttgacatcagaagttacaataggcatatgggcaaaatggtgtagcaggctcactggccgtttgttttttaaacacattttcacaagtttttgagacactggatttctttaattaaaaaaaaaatgccaagaaacattatttatacagggttgattgctttcatgttgttattctgtaccctatagtagcctccatgagaatctggtatttcttgctgcttggaactactttgcagtgattacttggttgcagtccaagtactctcgtttagtctgagcctggagatgttctagacttgcttctcccacctctgagattaggacaggaaaaatgtgaaatttcccaattacaggattatacggtaccatcacatcatttgtggaaattggggtgactgtatagctgggattgggctaaggactgtggtcttatctgtccacatacagccaaaatgcctatccagaaatccagttcgttggaaaggaaaattggtactcctgtgccacaggggttccagaaaagggaagtcactttaccttgcggtggtgggatcctgatgtctttcatccatttgtagtaaaagctggtaaagcttttcttactcctggttccctaccagtatttctaaacatgtcgcactttctccacaggcatgtggttttgacctttttttcaatcttctagaaagggaacggaagcagaagtgggacatcgagggctctgctgtcctctgcgctgggtgtggaatgctgctgcacctgtcccttctgctggctcagggaagtgtcttcttgcccacatttctgtggggaaaggtttttaatcctctgatgcttccatcttcctgtttaggccatgtgcccagaaacctggactgatctttctttaatagtgaacccctgggccactgaagagtaacatggctccactggacacaaaagagggatggaatcaacaggcagggggccttttataagccttaggaaaagaaaatgaaactatttcatctttggacttttcaatactattggagtgatttttttctttctaaacagggaaaataatgttacaaaagcatcttttttgttatttgtttgcatccctcccccacaccctggtgttttaaaatgaagaaaaaaaaccatcaccttttgtacaaaaactcttaatgattaaaaaacaaacaaaa

SEQ ID NO: 151450 - DNA, 616 bp, Homo sapiens
  Payload ID: 9820
  Gene Symbol: M6PR
  Gene Name: mannose-6-phosphate receptor (cation dependent)
  ENST ID: ENST00000543704
  CDS Start-End: 1-447
ctactactactcctggctgtggcagtgagagaatcctggcagacagaagaaaaaacttgcgacttggacaattttaaccctgtgtctgaggagcgtggcaaagtccaagattgtttctacctctttgagatggatagcagcctggcctgttcaccagagatctcccacctcagtgtgggttccatcttacttgtcacgtttgcatcactggttgctgtttatgttgttggggggttcctataccagcgactggtagtgggagccaaaggaatggagcagtttccccacttagccttctggcaggatcttggcaacctggtagcagatggctgtgactttgtctgccgttctaaacctcgaaatgtgcctgcagcatatcgtggtgtgggggatgaccagctgggggaggagtcagaagaaagggatgaccatttattaccaatgtagattgcactttatatgtccagcctcttcctcagtcccccaaaccaaagctacacagccagatttctcaagcagtctcaactccagtccctcatctcacccttactattgctcttgctttccagtttgcttttgatttgcatcttctcactagtaaaactgccttcccttt

SEQ ID NO: 151451 - DNA, 650 bp, Homo sapiens
  Payload ID: 9820
  Gene Symbol: M6PR
  Gene Name: mannose-6-phosphate receptor (cation dependent)
  ENST ID: ENST00000539143
  CDS Start-End: 1-290
ccatcttacttgtcacgtttgcatcactggttgctgtttatgttgttggggggttcctataccagcgactggtagtgggagccaaaggaatggagcagtttccccacttagccttctggcaggatcttggcaacctggtagcaaaagggaacggaagcagaagtgggacatcgagggctctgctgtcctctgcgctgggtgtggaatgctgctgcacctgtcccttctgctggctcagggaagtgtcttcttgcccacatttctgtggggaaaggtttttaatcctctgatgcttccatcttcctgtttaggccatgtgcccagaaacctggactgatctttctttaatagtgaacccctgggccactgaagagtaacatggctccactggacacaaaagagggatggaatcaacaggcagggggccttttataagccttaggaaaagaaaatgaaactatttcatctttggacttttcaatactattggagtgatttttttctttctaaacagggaaaataatgttacaaaagcatcttttttgttatttgtttgcatccctcccccacaccctggtgttttaaaatgaagaaaaaaaaccatcaccttttgtacaaaaactcttaatgattaaaaaacaaacaaaaca

SEQ ID NO: 151452 - DNA, 660 bp, Homo sapiens
  Payload ID: 9820
  Gene Symbol: M6PR
  Gene Name: mannose-6-phosphate receptor (cation dependent)
  ENST ID: ENST00000544245
  CDS Start-End: 586-660
ggcgaaatggttctatggtcacatgccgcggggtctggtgggaggagcggttgcccagcggcctcttggcgcttcctgtttccggttcccagagtggggcacagcgaggcgctagggggaacgctggcctctgaaactagctctgggaccggggtctgcggccggcccctagctggccccgtctcccatccccagaagggtattcactggggattctgagctttggctactccagtttcccacgacacctgctggaggactggactgctactactactcctggctgtggcagtgagagaatcctggcagacagaagaaaaaacttgcgacttggtaggagaaaagggtaaagagtcagagaaagagttggctctagtgaagaggctgaaaccactgtttaataaaagctttgagagcactgtgggccagggttcagacacatacatctacatcttcagggtgtgccgggaagctggcaaccacacttctggggcaggcctggtgcaaatcaacaaaagtaatgggaaggagacagtggtagggagactcaacgagactcacatcttcaacggaagtaattggatcatgctgatctataaagggggtgatgaatatgacaaccactgtggcaaggagcagcgtcgtgcagtggtgatgatc

SEQ ID NO: 151453 - DNA, 2305 bp, Homo sapiens
  Payload ID: 9820
  Gene Symbol: M6PR
  Gene Name: mannose-6-phosphate receptor (cation dependent)
  ENST ID: ENST00000536844
  CDS Start-End: 276-851
atcagggagcccgggaaggggaaaggggcgaaatggttctatggtcacatgccgcggggtctggtgggaggagcggttgcccagcggcctcttggcgcttcctgtttccggttcccagagtggggcacagcgaggcgctagggggaacgctggcctctgaaactagctctgggaccggggtctgcggccggcccctagctggccccgtctcccatccccagaagggtattcactggggattctgagctttggctactccagtttcccacgacacgatgttccctttctacagctgctggaggactggactgctactactactcctggctgtggcagtgagagaatcctggcagacagaagaaaaaacttgcgacttggtaggagaaaagggtaaagagtcagagaaagagttggctctagtgaagaggctgaaaccactgtttaataaaagctttgagagcactgtgggccagggttcagacacatacatctacatcttcagggtgtgccgggaagctggcaaccacacttctggggcaggcctggtgcaaatcaacaaaagtaatgggaaggagacagtggtagggagactcaacgagactcacatcttcaacggaagtaattggatcatgctgatctataaagggggtgatgaatatgacaaccactgtggcaaggagcagcgtcgtgcagtggtgatgatctcctgcaatcgacacaccctagcggatggctgtgactttgtctgccgttctaaacctcgaaatgtgcctgcagcatatcgtggtgtgggggatgaccagctgggggaggagtcagaagaaagggatgaccatttattaccaatgtagattgcactttatatgtccagcctcttcctcagtcccccaaaccaaagctacacagccagatttctcaagcagtctcaactccagtccctcatctcacccttactattgctcttgctttccagtttgcttttgatttgcatcttctcactagtaaaactgccttccctttgttccttattttctgttttttctctagagaggtacagttgtaagtcagagttaatataatagggcctgtgaaaacagaggcttttgcattgtctcttgacatcagaagttacaataggcatatgggcaaaatggtgtagcaggctcactggccgtttgttttttaaacacattttcacaagtttttgagacactggatttctttaattaaaaaaaaaatgccaagaaacattatttatacagggttgattgctttcatgttgttattctgtaccctatagtagcctccatgagaatctggtatttcttgctgcttggaactactttgcagtgattacttggttgcagtccaagtactctcgtttagtctgagcctggagatgttctagacttgcttctcccacctctgagattaggacaggaaaaatgtgaaatttcccaattacaggattatacggtaccatcacatcatttgtggaaattggggtgactgtatagctgggattgggctaaggactgtggtcttatctgtccacatacagccaaaatgcctatccagaaatccagttcgttggaaaggaaaattggtactcctgtgccacaggggttccagaaaagggaagtcactttaccttgcggtggtgggatcctgatgtctttcatccatttgtagtaaaagctggtaaagcttttcttactcctggttccctaccagtatttctaaacatgtcgcactttctccacaggcatgtggttttgacctttttttcaatcttctagaaagggaacggaagcagaagtgggacatcgagggctctgctgtcctctgcgctgggtgtggaatgctgctgcacctgtcccttctgctggctcagggaagtgtcttcttgcccacatttctgtggggaaaggtttttaatcctctgatgcttccatcttcctgtttaggccatgtgcccagaaacctggactgatctttctttaatagtgaacccctgggccactgaagagtaacatggctccactggacacaaaagagggatggaatcaacaggcagggggccttttataagccttaggaaaagaaaatgaaactatttcatctttggacttttcaatactattggagtgatttttttctttctaaacagggaaaataatgttacaaaagcatcttttttgttatttgtttgcatccctcccccacaccctggtgttttaaaatgaagaaaaaaaaccatcaccttttgtacaaaaactcttaatgattaaaaaacaaacaaaac

SEQ ID NO: 151454 - DNA, 596 bp, Homo sapiens
  Payload ID: 9820
  Gene Symbol: M6PR
  Gene Name: mannose-6-phosphate receptor (cation dependent)
  ENST ID: ENST00000543845
  CDS Start-End: 269-596
agagtggggcacagcgaggcgctagggggaacgctggcctctgaaactagctctgggaccggggtctgcggccggcccctagctggccccgtctcccatccccagaagggtattcactggggattctgagctttggctactccagtttcccacgacactgtaaaagacaactgtacttatgggaagtctagaaacccttgagatttgtgacctgtagaggccaaagaggtttcagaagactacatcaagccatcaaacagtaaagaggatgttccctttctacagctgctggaggactggactgctactactactcctggctgtggcagtgagagaatcctggcagacagaagaaaaaacttgcgacttggtaggagaaaagggtaaagagtcagagaaagagttggctctagtgaagaggctgaaaccactgtttaataaaagctttgagagcactgtgggccagggttcagacacatacatctacatcttcagggtgtgccgggaagctggcaaccacacttctggggcaggcctggtgcaaatcaacaaaagtaatgggaaggagacagtggtagggagactcaacgagactc

SEQ ID NO: 151455 - DNA, 720 bp, Homo sapiens
  Payload ID: 9820
  Gene Symbol: M6PR
  Gene Name: mannose-6-phosphate receptor (cation dependent)
  ENST ID: ENST00000543159
  CDS Start-End: 445-720
caatttgttgtcattgatttgtagtgtaaaagacaactgtacttatgggaagtctagaaacccttgagatttgtgacctgtagaggccaaagaggtttcagaagactacatcaagccatcaaacagtaaagaggcaaggatggctccacccaagctgtcatcattcttttttaagttctttcatttccctcttcccaactttgtagtttgttctgaaagactcacctatacattagactacaagttacatataaatgaattttctgctgcagatgctcttgttacagagatattaaaatgtactatgtgttgcatatgccagagaatcttgtactttctggataattaaaataccatcgatttattacacattcatacgctttatctctttcctctctctcctgatcctacctgccctccccaacacacactctctcccaaaggatgttccctttctacagctgctggaggactggactgctactactactcctggctgtggcagtgagagaatcctggcagacagaagaaaaaacttgcgacttggtaggagaaaagggtaaagagtcagagaaagagttggctctagtgaagaggctgaaaccactgtttaataaaagctttgagagcactgtgggccagggttcagacacatacatctacatcttcagggtgtgccgggaagctggcaaccacacttctggggcaggcctggtgcaa

SEQ ID NO: 151456 - DNA, 255 bp, Homo sapiens
  Payload ID: 9820
  Gene Symbol: M6PR
  Gene Name: mannose-6-phosphate receptor (cation dependent)
  ENST ID: ENST00000544193
  CDS Start-End: 1-255
gttgttggggggttcctataccagcgactggtagtgggagccaaaggaatggagcagtttccccacttagccttctggcaggatcttggcaacctggtagcagcatgtggttttgacctttttttcaatcttctagaaagggaacggaagcagaagtgggacatcgagggctctgctgtcctctgcgctgggtgtggaatgctgctgcacctgtcccttctgctggctcagggaagtgtcttcttgcccacattt

SEQ ID NO: 151457 - DNA, 2198 bp, Homo sapiens
  Payload ID: 9820
  Gene Symbol: M6PR
  Gene Name: mannose-6-phosphate receptor (cation dependent)
  ENST ID: ENST00000541507
  CDS Start-End: 151-552
cacagcgaggcgctagggggaacgctggcctctgaaactagctctgggaccggggtctgcggccggcccctagctggccccgtctcccatccccagaagggtattcactggggattctgagctttggctactccagtttcccacgacacgatgttccctttctacagctgctggaggactggactgctactactactcctggctgtggcagtgagagaatcctggcagacagaagaaaaaacttgcgacttggtaggagaaaagggtaaagagtcagagaaagagttggctctagtgaagaggctgaaaccactgtttaataaaagctttgagagcactgtgggccagggttcagacacatacatctacatcttcagggtgtgccgggaagctggcaaccacacttctggggcaggcctggtgcaaatcaacaaaagtaatgggaaggagacagtggtagggagactcaacgagactcacatcttcaacggaagtttgcatcactggttgctgtttatgttgttggggggttcctataccagcgactggtagtgggagccaaaggaatggagcagtttccccacttagccttctggcaggatcttggcaacctggtagcagatggctgtgactttgtctgccgttctaaacctcgaaatgtgcctgcagcatatcgtggtgtgggggatgaccagctgggggaggagtcagaagaaagggatgaccatttattaccaatgtagattgcactttatatgtccagcctcttcctcagtcccccaaaccaaagctacacagccagatttctcaagcagtctcaactccagtccctcatctcacccttactattgctcttgctttccagtttgcttttgatttgcatcttctcactagtaaaactgccttccctttgttccttattttctgttttttctctagagaggtacagttgtaagtcagagttaatataatagggcctgtgaaaacagaggcttttgcattgtctcttgacatcagaagttacaataggcatatgggcaaaatggtgtagcaggctcactggccgtttgttttttaaacacattttcacaagtttttgagacactggatttctttaattaaaaaaaaaatgccaagaaacattatttatacagggttgattgctttcatgttgttattctgtaccctatagtagcctccatgagaatctggtatttcttgctgcttggaactactttgcagtgattacttggttgcagtccaagtactctcgtttagtctgagcctggagatgttctagacttgcttctcccacctctgagattaggacaggaaaaatgtgaaatttcccaattacaggattatacggtaccatcacatcatttgtggaaattggggtgactgtatagctgggattgggctaaggactgtggtcttatctgtccacatacagccaaaatgcctatccagaaatccagttcgttggaaaggaaaattggtactcctgtgccacaggggttccagaaaagggaagtcactttaccttgcggtggtgggatcctgatgtctttcatccatttgtagtaaaagctggtaaagcttttcttactcctggttccctaccagtatttctaaacatgtcgcactttctccacaggcatgtggttttgacctttttttcaatcttctagaaagggaacggaagcagaagtgggacatcgagggctctgctgtcctctgcgctgggtgtggaatgctgctgcacctgtcccttctgctggctcagggaagtgtcttcttgcccacatttctgtggggaaaggtttttaatcctctgatgcttccatcttcctgtttaggccatgtgcccagaaacctggactgatctttctttaatagtgaacccctgggccactgaagagtaacatggctccactggacacaaaagagggatggaatcaacaggcagggggccttttataagccttaggaaaagaaaatgaaactatttcatctttggacttttcaatactattggagtgatttttttctttctaaacagggaaaataatgttacaaaagcatcttttttgttatttgtttgcatccctcccccacaccctggtgttttaaaatgaagaaaaaaaaccatcaccttttgtacaaaaactcttaatgattaaaaaacaaacaaaaca

SEQ ID NO: 151458 - DNA, 561 bp, Homo sapiens
  Payload ID: 9820
  Gene Symbol: M6PR
  Gene Name: mannose-6-phosphate receptor (cation dependent)
  ENST ID: ENST00000543258
  CDS Start-End: 1-313
gtttaataaaagctttgagagcactgtgggccagggttcagacacatacatctacatcttcagggtgtgccgggaagctggcaaccacacttctggggcaggcctggtgcaaatcaacaaaagtaatgggaaggagacagtggtagggagactcaacgagactcacatcttcaacggaagtaattggatcatgctgatctataaagggggtgatgaatatgacaaccactgtggcaaggagcagcgtcgtgcagtggtgatgatctcctgcaatcgacacaccctagcggagtcaaaacacttaaccacctgaatgtgttatgccatctcatcatcaggacaattttaaccctgtgtctgaggagcgtggcaaagtccaagattgtttctacctctttgagatggatagcagcctggcctgttcaccagagatctcccacctcagtgtgggttccatcttacttgtcacgtttgcatcactggttgctgtttatgttgttggggggttcctataccagcgactggtagtgggagccaaaggaatggagcagtttccccact

SEQ ID NO: 151459 - DNA, 581 bp, Homo sapiens
  Payload ID: 9820
  Gene Symbol: M6PR
  Gene Name: mannose-6-phosphate receptor (cation dependent)
  ENST ID: ENST00000537621
  CDS Start-End: 1-368
aagggggtgatgaatatgacaaccactgtggcaaggagcagcgtcgtgcagtggtgatgatctcctgcaatcgacacaccctagcggacaattttaaccctgtgtctgaggagcgtggcaaagtccaagattgtttctacctctttgagatggatagcagcctggcctgttcaccagagatctcccacctcagtgtgggttccatcttacttgtcacgtttgcatcactggttgctgtttatgttgttggggggttcctataccagcgactggtagtgggagccaaaggaatggagcagtttccccacttagccttctggcaggatcttggcaacctggtagcagtaagtaacagggcagctggttgaatttgtagcctgcaaacaaggttgggtgaccaaccatcctcgtttgttcacactgagggggttcctgggacacaggacattgagtgctaaaaccacaaaagtcccagcaaacaagacagttgccctagtacagagtagtaagtggcacagcatccatttctggccttggtaagacattgctgaaagagcaacactgttgaccagatgggctct

SEQ ID NO: 151460 - DNA, 3569 bp, Homo sapiens
  Payload ID: 9821
  Gene Symbol: MBL2
  Gene Name: mannose-binding lectin (protein C) 2, soluble
  Uniprot ID: P11226
  ENST ID: ENST00000373968
  CDS Start-End: 66-812
ggtaaatatgtgttcattaactgagattaaccttccctgagttttctcacaccaaggtgaggaccatgtccctgtttccatcactccctctccttctcctgagtatggtggcagcgtcttactcagaaactgtgacctgtgaggatgcccaaaagacctgccctgcagtgattgcctgtagctctccaggcatcaacggcttcccaggcaaagatgggcgtgatggcaccaagggagaaaagggggaaccaggccaagggctcagaggcttacagggcccccctggaaagttggggcctccaggaaatccagggccttctgggtcaccaggaccaaagggccaaaaaggagaccctggaaaaagtccggatggtgatagtagcctggctgcctcagaaagaaaagctctgcaaacagaaatggcacgtatcaaaaagtggctcaccttctctctgggcaaacaagttgggaacaagttcttcctgaccaatggtgaaataatgacctttgaaaaagtgaaggccttgtgtgtcaagttccaggcctctgtggccacccccaggaatgctgcagagaatggagccattcagaatctcatcaaggaggaagccttcctgggcatcactgatgagaagacagaagggcagtttgtggatctgacaggaaatagactgacctacacaaactggaacgagggtgaacccaacaatgctggttctgatgaagattgtgtattgctactgaaaaatggccagtggaatgacgtcccctgctccacctcccatctggccgtctgtgagttccctatctgaagggtcatatcactcaggccctccttgtctttttactgcaacccacaggcccacagtatgcttgaaaagataaattatatcaatttcctcatatccagtattgttccttttgtgggcaatcactaaaaatgatcactaacagcaccaacaaagcaataatagtagtagtagtagttagcagcagcagtagtagtcatgctaattatataatatttttaatatatactatgaggccctatcttttgcatcctacattaattatctagtttaattaatctgtaatgctttcgatagtgttaacttgctgcagtatgaaaataagacggatttatttttccatttacaacaaacacctgtgctctgttgagccttcctttctgtttgggtagagggctcccctaatgacatcaccacagtttaataccacagctttttaccaagtttcaggtattaagaaaatctattttgtaactttctctatgaactctgttttctttctaatgagatattaaaccatgtaaagaacataaataacaaatctcaagcaaacagcttcacaaattctcacacacatacatacctatatactcactttctagattaagatatgggacatttttgactccctagaagccccgttataactcctcctagtactaactcctaggaaaatactattctgacctccatgactgcacagtaatttcgtctgtttataaacattgtatagttggaatcatattgtgtgtaatgttgtatgtcttgtttactcagaattaagtctgtgagattcattcatgtcatgtgtacaaaagtttcatccttttcattgccatgtagggttcccttatattaatattcctcagttcatccattctattgttaataggcacttaagtggcttccaatttttggccatgaggaagagaacccacgaacattcctggacttgtcttttggtggacatggtgcactaatttcactacctatccaggagtggaactggtagaggatgaggaaagcatgtattcagctttagtagatattaccagttttcctaagtgattgtatgaatttatgctcctaccggcaatgtgtggcagtcctagatgctctatgtgcttgtaaaaagtcaatgttttcagttctcttgattttcattattcctgtggatgtaaagtgatatttccccatggttttaatctgtatttccccaacatgtaataaggttgaacacttttttatatgcttattgggcacttgggtatcttcttttgtgaagtacccgttcacatttttgtattttgtttaaattagttagccaatatttttcttactgatttttaagttatttttacattctgaatatgtcctttttaatgtgtattacaaatattttgctagtttttgacttgctcctaatgttgaattttgatgaacaaaatttcctaattttgagaaagtcttatttattcatattttctttcaaaattagtgctttttgtgtcatgtttaagaaatttttgcccatcccaaaatcataagatatttttcatgattttgaaaccatgaagagatttttcatgattttgaaatcatgaagatatttttccatttttttctaatagttttattaataaacattctatctattcctggtagaatagatatccacttgagacagcactatgtaggaaagaccatttttcctccactgaactagggtggtgcatttttgtaagttaggtaactgtatgtgtgtgtgtctgtttctgggctgtctattctagtctatttgttgatgcttgtgtcaaacagtacactatcttaattattgtacatttatagttgtaactatagtccagctttgttcttcttaaagtcaagatttccatataaatattagaaacagcttctcaatttctacaaaatcctgatgaggtttctactgggaccacattgagtctatcaatcaacttatgcagaactggcaacttactactgaatctctaatcaatgttcatcatgtatcgcttcatgtaactagaatttctttaacttaattgctatgttttgacatttttagtttaaaaaccttgtatatcttgttttggtggttttagtgattttaataatatattttaaatattttttcttttctattgttgtacacagaaatacagttaagttttgtgtgtagtcttacgatgtttagtaaactcaataagtttatttcttaaatctagtaatttgtagattcctctggattttgtatatgcatagtcatgtaagctgaaaatatggcaatacttgcttcttcccaattgctttaccttttttcttaccttattgcactggttagcaaccccaatacagagaccaccagatcaggtatagactcctgaaagacaatataatgaagtgctccagtcaggcctatctaaactggattcacagctctgtcacttaattgctacatgatctagagccagttactttgtgtttcagccatgtatttgcagctgagagaaaataatcattcttatttcatgaaaattgtggggatgatgaaataagttaacacctttaaagtgtgtagtaaagtatcaggatactatattttaggtcttaatacacacagttatgccgctagatacatgctttttaatgagataatgtgatattatacataacacatatcgatttttaaaaattaaatcaaccttgctttgatggaataaactccatttagtcaca

SEQ ID NO: 151461 - DNA, 1601 bp, Homo sapiens
  Payload ID: 9822
  Gene Symbol: MPDU1
  Gene Name: mannose-P-dolichol utilization defect 1
  Uniprot ID: O75352
  ENST ID: ENST00000250124
  CDS Start-End: 217-960
aagctttacaattccaacagcgcgtccaaaacgtggtccctgactgagacttattttacgccactagagtgagggtgggtagcgtcagaaagagcggggcacggggcgggccagcttcgccgcgggaaaagaacgggaggcggagtgtccgcagcgcgcacgcgcaacgaaagtcaatggcggtctggagagactggcggaagctagctttgcaatatggcggccgaggcggacggaccgcttaaacggctgctcgtgccgattcttttacctgagaaatgctacgaccaacttttcgttcagtgggacttgcttcacgtcccctgcctcaagattctcctcagcaaaggcctggggctgggcattgtggctggctcacttctagtaaagctgccccaggtgtttaaaatcctgggagccaagagtgctgaagggttgagtctccagtctgtaatgctggagctagtggcattgactgggaccatggtctacagcatcactaacaacttcccattcagctcttggggtgaagccttattcctgatgctccagacgatcaccatctgcttcctggtcatgcactacagaggacagactgtgaaaggtgtcgctttcctcgcttgctacggcctggtcctgctggtgcttctctcacctctgacgcccttgactgtagtcaccctgctccaggcctccaatgtgcctgctgtggtggtggggaggcttctccaggcagccaccaactaccacaacgggcacacaggccagctctcagccatcacagtcttcctgctgtttgggggctccctggcccgaatcttcacttccattcaggaaaccggagatcccctgatggctgggacctttgtggtctcctctctctgcaacggcctcatcgccgcccagctgctcttctactggaatgcaaagcctccccacaagcagaaaaaggcgcagtagagccagctactggagtcattccgtttccactcattcacccaacctcagggttctccccatctgagccagcctgctggtgtgacttactcatcctccattcctctgcacttgcagactttctgagccagggttttcttttagtggaaacaaatggttgatggatccagatccttagaaaaggagaggatgggggtagagtctcccaagccaaaattttgacatttgagtgctttcgtaagccctgtacatgtactattaattcagtcattcagccaagcctcctcctctagcagcaatttccagctgtgtaacactatcctgggcaaatgttttaccctgtcctccagcctccctgcttcccttctggccctggaagactgagtctggacggcagagtggagggactgggaggctgtggctgcctccctccctcagcccggctgggactgtctcccggaccccagtgctggggtgggggaagggggacggagaatgactcaggcagggccccagggtggggtgaggaggttcctgctctggcaggtctaggcggaagggagtggagatggggctggttcctgctgcagtgaggggaacagatgggacaataaagactggagactcagttgaataatacaaaa

SEQ ID NO: 151462 - DNA, 840 bp, Homo sapiens
  Payload ID: 9822
  Gene Symbol: MPDU1
  Gene Name: mannose-P-dolichol utilization defect 1
  ENST ID: ENST00000359822
  CDS Start-End: 15-200
gctagctttgcaatatggcggccgaggcggacggaccgcttaaacggctgctcgtgccgattcttttacctgagaaatgctacgaccaacttttcgttcagtgggacttgcttcacgtcccctgcctcaagattctcctcagcaaaggcctggggctgggcattgtggctggctcacttctagctgccccaggtgtttaaaatcctgggagccaagagtgctgaagggttgagtctccagtctgtaatgctggagctagtggcattgactgggaccatggtctacagcatcactaacaacttcccattcagctcttggggtgaagccttattcctgatgctccagacgatcaccatctgcttcctggtcatgcactacagaggacagactgtgaaaggtgctggggacttacccaagagcaggctgtgtggttcctgggaaccctgctgggaactcagcttctccaggcagccaccaactaccacaacgggcacacaggccagctctcagccatcacagtcttcctgctgtttgggggctccctggcccgaatcttcacttccattcaggaaaccggagatcccctgatggctgggacctttgtggtctcctctctctgcaacggcctcatcgccgcccagctgctcttctactggaatgcaaagcctccccacaagcagaaaaaggcgcagtagagccagctactggagtcattccgtttccactcattcacccaacctcagggttctccccatctgagccagcctgctggtgtgacttactcatcctccattcctctgcacttgcagactttctgagccagggttttcttttagtgga

SEQ ID NO: 151463 - DNA, 1125 bp, Homo sapiens
  Payload ID: 9822
  Gene Symbol: MPDU1
  Gene Name: mannose-P-dolichol utilization defect 1
  ENST ID: ENST00000396501
  CDS Start-End: 36-614
ggtctggagagactggcggaagctagctttgcaatatggcggccgaggcggacggaccgcttaaacggctgctcgtgccgattcttttacctgagaaatgctacgaccaacttttcgttcagtgggacttgcttcacgtcccctgcctcaagattctcctcagcaaaggcctggggctgggcattgtggctggctcacttctagtaaagctgccccaggtgtttaaaatcctgggagccaagagtgctgaagggttgagtctccagtctgtaatgctggagctagtggcattgactgggaccatggtctacagcatcactaacaacttcccattcagctcttggggtgaagccttattcctgatgctccagacgatcaccatctgcttcctggtcatgcactacagaggacagactgtgaaaggtgctggggacttacccaagagcaggctgtgtggttcctgggaaccctgctgggaactcagcttctccaggcagccaccaactaccacaacgggcacacaggccagctctcagccatcacagtcttcctgctgtttgggggctccctggcccgaatcttcacttccattcaggaaaccggagatcccctgatggctgggacctttgtggtctcctctctctgcaacggcctcatcgccgcccagctgctcttctactggaatgcaaagcctccccacaagcagaaaaaggcgcagtagagccagctactggagtcattccgtttccactcattcacccaacctcagggttctccccatctgagccagcctgctggtgtgacttactcatcctccattcctctgcacttgcagactttctgagccagggttttcttttagtggaaacaaatggttgatggatccagatccttagaaaaggagaggatgggggtagagtctcccaagccaaaattttgacatttgagtgctttcgtaagccctgtacatgtactattaattcagtcattcagccaagcctcctcctctagcagcaatttccagctgtgtaacactatcctgggcaaatgttttaccctgtcctccagcctccctgcttcccttctggccctggaagactgagtctggacggcagagtggaggga

SEQ ID NO: 151464 - DNA, 888 bp, Homo sapiens
  Payload ID: 9822
  Gene Symbol: MPDU1
  Gene Name: mannose-P-dolichol utilization defect 1
  Uniprot ID: O75352
  ENST ID: ENST00000423172
  CDS Start-End: 11-571
gctttgcaatatggcggccgaggcggacggaccgcttaaacggctgctcgtgccgattcttttacctgagaaatgctacgaccaacttttcgttcagtgggacttgcttcacgtcccctgcctcaagattctcctcagcaaaggcctggggctgggcattgtggctggctcacttctagtaaagctgccccaggtgtttaaaatcctgggagccaagagtgctgaagggttgagtctccagtctgtaatgctggagctagtggcattgactgggaccatggtctacagcatcactaacaacttcccattcaggtgtcgctttcctcgcttgctacggcctggtcctgctggtgcttctctcacctctgacgcccttgactgtagtcaccctgctccaggcctccaatgtgcctgctgtggtggtggggaggcttctccaggcagccaccaactaccacaacgggcacacaggccagctctcagccatcacagtcttcctgctgtttgggggctccctggcccgaatcttcacttccattcaggggtgagcatcccattctctcagctctgaggaaggattctggtgtccagagttggctgacctggctggcggtctccactgatagagccatcagtccgattaccacggttacggcggcggcggctgcgattacgacgttgaggtcttgattcatcttctgtagggtaggaaaaaaccagagtcacacatccaacctcccaccctcgattcctacccatctctaactttccagaccccaggcacaccctcacccaggccattctctgtcatgttgggcccatctgattccaggcctccatccatgacggtcctgtcttcatcagtgcggcggcggcgggagcggcggc

SEQ ID NO: 151465 - DNA, 1020 bp, Homo sapiens
  Payload ID: 9822
  Gene Symbol: MPDU1
  Gene Name: mannose-P-dolichol utilization defect 1
  ENST ID: ENST00000571822
  CDS Start-End: 43-228
caatggcggtctggagagactggcggaagctagctttgcaatatggcggccgaggcggacggaccgcttaaacggctgctcgtgccgattcttttacctgagaaatgctacgaccaacttttcgttcagtgggacttgcttcacgtcccctgcctcaagattctcctcagcaaaggcctggggctgggcattgtggctggctcacttctagctgccccaggtgtttaaaatcctgggagccaagagtgctgaagggttgagtctccagtctgtaatgctggagctagtggcattgactgggaccatggtctacagcatcactaacaacttcccattcagctcttggggtgaagccttattcctgatgctccagacgatcaccatctgcttcctggtcatgcactacagaggacagactgtgaaaggtgtcgctttcctcgcttgctacggcctggtcctgctggtgcttctctcacctctgacgcccttgactgtagtcaccctgctccaggcctccaatgtgcctgctgtggtggtggggaggcttctccaggcagccaccaactaccacaacgggcacacaggccagctctcagccatcacagtcttcctgctgtttgggggctccctggcccgaatcttcacttccattcaggaaaccggagatcccctgatggctgggacctttgtggtctcctctctctgcaacggcctcatcgccgcccagctgctcttctactggaatgcaaagcctccccacaagcagaaaaaggcgcagtagagccagctactggagtcattccgtttccactcattcacccaacctcagggttctccccatctgagccagcctgctggtgtgacttactcatcctccattcctctgcacttgcagactttctgagccagggttttcttttagtggaaacaaatggttgatggatccagatccttagaaaaggagaggatgggggtagagtctcccaagccaaaattttgacatttgagtgctttcgtaag

SEQ ID NO: 151466 - DNA, 1102 bp, Homo sapiens
  Payload ID: 9822
  Gene Symbol: MPDU1
  Gene Name: mannose-P-dolichol utilization defect 1
  ENST ID: ENST00000572936
  CDS Start-End: 198-383
gcgcgtccaaaacgtggtccctgactgagacttattttacgccactagagtgagggtgggtagcgtcagaaagagcggggcacggggcgggccagcttcgccgcgggaaaagaacgggaggcggagtgtccgcagcgcgcacgcgcaacgaaagtcaatggcggtctggagagactggcggaagctagctttgcaatatggcggccgaggcggacggaccgcttaaacggctgctcgtgccgattcttttacctgagaaatgctacgaccaacttttcgttcagtgggacttgcttcacgtcccctgcctcaagattctcctcagcaaaggcctggggctgggcattgtggctggctcacttctagctgccccaggtgtttaaaatcctgggagccaagagtgctgaagggttgagtctccagtctgtaatgctggagctagtggcattgactgggaccatggtctacagcatcactaacaacttcccattcaggcccgcctttcttcctcccaactcttgactctgcagctcttggggtgaagccttattcctgatgctccagacgatcaccatctgcttcctggtcatgcactacagaggacagactgtgaaaggtgtcgctttcctcgcttgctacggcctggtcctgctggtgcttctctcacctctgacgcccttgactgtagtcaccctgctccaggcctccaatgtgcctgctgtggtggtggggaggcttctccaggcagccaccaactaccacaacgggcacacaggccagctctcagccatcacagtcttcctgctgtttgggggctccctggcccgaatcttcacttccattcaggaaaccggagatcccctgatggctgggacctttgtggtctcctctctctgcaacggcctcatcgccgcccagctgctcttctactggaatgcaaagcctccccacaagcagaaaaaggcgcagtagagccagctactggagtcattccgtttccactcattcacccaacctcagggttctccccatctgagccagcctgctggtgtgacttactcatcctccattcctctgcacttgcagactttctgagccaggg

SEQ ID NO: 151467 - DNA, 591 bp, Homo sapiens
  Payload ID: 9822
  Gene Symbol: MPDU1
  Gene Name: mannose-P-dolichol utilization defect 1
  ENST ID: ENST00000570458
  CDS Start-End: 1-184
ggcggacggaccgcttaaacggctgctcgtgccgattcttttacctgagaaatgctacgaccaacttttcgttcagtgggacttgcttcacgtcccctgcctcaagattctcctcagcaaaggcctggggctgggcattgtggctggctcacttctagctcttggggtgaagccttattcctgatgctccagacgatcaccatctgcttcctggtcatgcactacagaggacagactgtgaaaggtgtcgctttcctcgcttgctacggcctggtcctgctggtgcttctctcacctctgacgcccttgactgtagtcaccctgctccaggcctccaatgtgcctgctgtggtggtggggaggcttctccaggcagccaccaactaccacaacgggcacacaggccagctctcagccatcacagtcttcctgctgtttgggggctccctggcccgaatcttcacttccattcaggaaaccggagatcccctgatggctgggacctttgtggtctcctctctctgcaacggcctcatcgccgcccagctgctcttctactggaatgcaaagcctccccacaagcagaaaaag

SEQ ID NO: 151468 - DNA, 917 bp, Homo sapiens
  Payload ID: 9822
  Gene Symbol: MPDU1
  Gene Name: mannose-P-dolichol utilization defect 1
  ENST ID: ENST00000572719
  CDS Start-End: 4-333
aatatggcggccgaggcggacggaccgcttaaacggctgctcgtgccgattcttttacctgagaaatgctacgaccaacttttcgttcagtgggacttgcttcacgtcccctgcctcaagattctcctcagcaaaggcctggggctgggcattgtggctggctcacttctagtaaagctgccccaggtgtttaaaatcctgggagccaagagtgctgaagggttgagtctccagtctgtaatgctggagctagtggcattgactgggaccatggtctacagcatcactaacaacttcccattcaggcccgcctttcttcctcccaactcttgactctgcagctcttggggtgaagccttattcctgatgctccagacgatcaccatctgcttcctggtcatgcactacagaggacagactgtgaaaggtgtcgctttcctcgcttgctacggcctggtcctgctggtgcttctctcacctctgacgcccttgactgtagtcaccctgctccaggcctccaatgtgcctgctgtggtggtggggaggcttctccaggcagccaccaactaccacaacgggcacacaggccagctctcagccatcacagtcttcctgctgtttgggggctccctggcccgaatcttcacttccattcaggaaaccggagatcccctgatggctgggacctttgtggtctcctctctctgcaacggcctcatcgccgcccagctgctcttctactggaatgcaaagcctccccacaagcagaaaaaggcgcagtagagccagctactggagtcattccgtttccactcattcacccaacctcagggttctccccatctgagccagcctgctggtgtgacttactcatcctccattcctctgcacttgcagactttctgagccagggtttt

SEQ ID NO: 151469 - DNA, 809 bp, Homo sapiens
  Payload ID: 9822
  Gene Symbol: MPDU1
  Gene Name: mannose-P-dolichol utilization defect 1
  ENST ID: ENST00000576272
  CDS Start-End: 1-164
cgcttaaacggctgctcgtgccgattcttttacctgagaaatgctacgaccaacttttcgttcagtgggacttgcttcacgtcccctgcctcaagattctcctcagcaaaggcctggggctgggcattgtggctggctcacttctagctgccccaggtgtttaaaatcctgggagccaagagtgctgaagggttgagtctccagtctgtaatgctggagctagtggcattgactgggaccatggtctacagcatcactaacaacttcccattcagctcttggggtgaagccttattcctgatgctccagacgatcaccatctgcttcctggtcatgcactacagaggacagactgtgaaaggtgtcgctttcctcgcttgctacggcctggtcctgctggtgcttctctcacctctgacgcccttgactgtagtcaccctgctccaggcctccaatgtgcctgctgtggtggtggggaggcttctccaggcagccaccaactaccacaacgggcacacaggccagctctcagccatcacagtcttcctgctgtttgggggctccctggcccgaatcttcacttccattcaggaaaccggagatcccctgatggctgggacctttgtggtctcctctctctgcaacggcctcatcgccgcccagctgctcttctactggaatgcaaagcctccccacaagcagaaaaaggcgcagtagagccagctactggagtcattccgtttccactcattcacccaacctcagggttctccccatctgagccagcctgctggtgtgacttactcatc

SEQ ID NO: 151470 - DNA, 491 bp, Homo sapiens
  Payload ID: 9822
  Gene Symbol: MPDU1
  Gene Name: mannose-P-dolichol utilization defect 1
  ENST ID: ENST00000576066
  CDS Start-End: 4-231
aatatggcggccgaggcggacggaccgcttaaacggctgctcgtgccgattcttttacctgagaaatgctacgaccaacttttcgttcagtgggacttgcttcacgacatctcctgtctgcttacccttttttctctcctcagtcccctgcctcaagattctcctcagcaaaggcctggggctgggcattgtggctggctcacttctagtaaagctgccccaggtgtttaaaatcctgggagccaagagtgctgaagggttgagtctccagtctgtaatgctggagctagtggcattgactgggaccatggtctacagcatcactaacaacttcccattcagctcttggggtgaagccttattcctgatgctccagacgatcaccatctgcttcctggtcatgcactacagaggacagactgtgaaaggtgtcgctttcctcgcttgctacggcctggtcctgctggtgcttctctcacctctgacgccct

SEQ ID NO: 151471 - DNA, 900 bp, Homo sapiens
  Payload ID: 9822
  Gene Symbol: MPDU1
  Gene Name: mannose-P-dolichol utilization defect 1
  ENST ID: ENST00000574558
  CDS Start-End: 1-97
gctgctcgtgccgattcttttacctgagaaatgctacgaccaacttttcgttcagtgggacttgcttcacgctcttggggtgaagccttattcctgatgctccagacgatcaccatctgcttcctggtcatgcactacagaggacagactgtgaaaggtgtcgctttcctcgcttgctacggcctggtcctgctggtgcttctctcacctctgacgcccttgactgtagtcaccctgctccaggcctccaatgtgcctgctgtggtggtggggaggcttctccaggcagccaccaactaccacaacgggcacacaggccagctctcagccatcacagtcttcctgctgtttgggggctccctggcccgaatcttcacttccattcaggaaaccggagatcccctgatggctgggacctttgtggtctcctctctctgcaacggcctcatcgccgcccagctgctcttctactggaatgcaaagcctccccacaagcagaaaaaggcgcagtagagccagctactggagtcattccgtttccactcattcacccaacctcagggttctccccatctgagccagcctgctggtgtgacttactcatcctccattcctctgcacttgcagactttctgagccagggttttcttttagtggaaacaaatggttgatggatccagatccttagaaaaggagaggatgggggtagagtctcccaagccaaaattttgacatttgagtgctttcgtaagccctgtacatgtactattaattcagtcattcagccaagcctcctcctctagcagcaatttccagctgtgtaacactatcctgggcaaatgttttaccctgtcctccagcctccctgcttcccttctggccctggaagactgagtctgg

SEQ ID NO: 151472 - DNA, 572 bp, Homo sapiens
  Payload ID: 9822
  Gene Symbol: MPDU1
  Gene Name: mannose-P-dolichol utilization defect 1
  ENST ID: ENST00000584479
  CDS Start-End: 4-333
aatatggcggccgaggcggacggaccgcttaaacggctgctcgtgccgattcttttacctgagaaatgctacgaccaacttttcgttcagtgggacttgcttcacgtcccctgcctcaagattctcctcagcaaaggcctggggctgggcattgtggctggctcacttctagtaaagctgccccaggtgtttaaaatcctgggagccaagagtgctgaagggttgagtctccagtctgtaatgctggagctagtggcattgactgggaccatggtctacagcatcactaacaacttcccattcaggcccgcctttcttcctcccaactcttgactctgcagctcttggggtgaagccttattcctgatgctccagacgatcaccatctgcttcctggtcatgcactacagaggacagactgtgaaaggtgtcgctttcctcgcttgctacggcctggtcctgctggtgcttctctcacctctgacgcccttgactgtagtcaccctgctccaggcctccaatgtgcctgctgtggtggtggggagggtgggtaccaggagcaagggacaaga

SEQ ID NO: 151473 - DNA, 728 bp, Homo sapiens
  Payload ID: 9822
  Gene Symbol: MPDU1
  Gene Name: mannose-P-dolichol utilization defect 1
  ENST ID: ENST00000582151
  CDS Start-End: 335-493
agacaagatggcgcccagcaggaggagcggagaaaggcaggggtgtaaatctggcttccaaactggaagcgtcaacaaaggcgtgggaggtctaaccgcgcaggcgtgcagcttcggcaagctttacaattccaacagcgcgtccaaaacgtggtccctgactgagacttattttacgccactagagtgagggtgggtagcgtcagaaagagcggggcacggggcgggccagcttcgccgcgggaaaagaacgggaggcggagtgtccgcagcgcgcacgcgcaacgaaagtcaatggcggtctggagagactggcggaagctagctttgcaatatggcggccgaggcggacggaccgcttaaacggctgctcgtgccgattcttttacctgagaaatgctacgaccaacttttcgttcagtgggacttgcttcacggtgagttttattcagcatccgatccaagtcctactcgagtgaccgtgggcccttagtccaagccttgatcggcgactaagtgacggcagtgactgccgccatgccgagctggacggaagtcacttctgagaagggcggaagtgtctcgggctccttagagggaggacaccatattagtgccagtggggaagtcaccgggtggaattacttctttgtggagtttgtgctgtagcgacaatgaaaaacgaagagtcaacttttataaaacaaaataaaaattaagtcaaatca

SEQ ID NO: 151474 - DNA, 475 bp, Homo sapiens
  Payload ID: 9822
  Gene Symbol: MPDU1
  Gene Name: mannose-P-dolichol utilization defect 1
  ENST ID: ENST00000584378
  CDS Start-End: 12-475
agctttgcaatatggcggccgaggcggacggaccgcttaaacggctgctcgtgccgattcttttacctgagaaatgctacgaccaacttttcgttcagtgggacttgcttcacgtcccctgcctcaagattctcctcagcaaaggcctggggctgggcattgtggctggctcacttctagtaaagctgccccaggtgtttaaaatcctgggagccaagagtgctgaagggttgagtctccagtctgtaatgctggagctagtggcattgactgggaccatggtctacagcatcactaacaacttcccattcagcttctccaggcagccaccaactaccacaacgggcacacaggccagctctcagccatcacagtcttcctgctgtttgggggctccctggcccgaatcttcacttccattcaggggtgagcatcccattctctcagctctgaggaaggattctggtgtccagag

SEQ ID NO: 151475 - DNA, 438 bp, Homo sapiens
  Payload ID: 9822
  Gene Symbol: MPDU1
  Gene Name: mannose-P-dolichol utilization defect 1
  ENST ID: ENST00000585217
  CDS Start-End: 1-351
gcggacggaccgcttaaacggctgctcgtgccgattcttttacctgagaaatgctacgaccaacttttcgttcagtgggacttgcttcacgtcccctgcctcaagattctcctcagcaaaggcctggggctgggcattgtggctggctcacttctagtaaagctgccccaggtgtttaaaatcctgggagccaagagtgctgaagggttgagtctccagtctgtaatgctggagctagtggcattgactgggaccatggtctacagcatcactaacaacttcccattcagctcttggggtgaagccttattcctgatgctccagacgatcaccatctgcttcctggtctaggcggaagggagtggagatggggctggttcctgctgcagtgaggggaacagatgggacaataaagactggagactcagttgaataata

SEQ ID NO: 151476 - DNA, 714 bp, Homo sapiens
  Payload ID: 9822
  Gene Symbol: MPDU1
  Gene Name: mannose-P-dolichol utilization defect 1
  ENST ID: ENST00000580834
  CDS Start-End: 12-341
agctttgcaatatggcggccgaggcggacggaccgcttaaacggctgctcgtgccgattcttttacctgagaaatgctacgaccaacttttcgttcagtgggacttgcttcacgtcccctgcctcaagattctcctcagcaaaggcctggggctgggcattgtggctggctcacttctagtaaagctgccccaggtgtttaaaatcctgggagccaagagtgctgaagggttgagtctccagtctgtaatgctggagctagtggcattgactgggaccatggtctacagcatcactaacaacttcccattcaggcccgcctttcttcctcccaactcttgactctgcagctcttggggtgaagccttattcctgatgctccagacgatcaccatctgcttcctggtcatgcactacagaggacagactgtgaaaggtgtcgctttcctcgcttgctacggcctggtcctgctggtgcttctctcacctctgacgcccttgactgtagtcaccctgctccaggcctccaatgtgcctgctgtggtggtggggaggcttctccaggcagccaccaactaccacaacgggcacacaggccagctctcagccatcacagtcttcctgctgtttgggggctccctggcccgaatcttcacttccattcaggaaaccggagatcccctgatggctgggacctttgtggtctcctctctct

SEQ ID NO: 151477 - DNA, 456 bp, Homo sapiens
  Payload ID: 9822
  Gene Symbol: MPDU1
  Gene Name: mannose-P-dolichol utilization defect 1
  ENST ID: ENST00000581380
  CDS Start-End: 1-456
cggctgctcgtgccgattcttttacctgagaaatgctacgaccaacttttcgttcagtgggacttgcttcacgtcccctgcctcaagattctcctcagcaaaggcctggggctgggcattgtggctggctcacttctagtaaagctgccccaggtgtttaaaatcctgggagccaagagtgctgaagggttgagtctccagtctgtaatgctggagctagtggcattgactgggaccatggtctacagcatcactaacaacttcccattcagctcttggggtgaagccttattcctgatgctccagacgatcaccatctgcttcctggtcatgcactacagaggacagactgtgaaagcttctccaggcagccaccaactaccacaacgggcacacaggccagctctcagccatcacagtcttcctgctgtttgggggctccctggcccgaatctt

SEQ ID NO: 151478 - DNA, 582 bp, Homo sapiens
  Payload ID: 9822
  Gene Symbol: MPDU1
  Gene Name: mannose-P-dolichol utilization defect 1
  ENST ID: ENST00000579445
  CDS Start-End: 2-582
tatggcggccgaggcggacggaccgcttaaacggctgctcgtgccgattcttttacctgagaaatgctacgaccaacttttcgttcagtgggacttgcttcacgtcccctgcctcaagattctcctcagcaaaggcctggggctgggcattgtggctggctcacttctagtaaagctgccccaggtgtttaaaatcctgggagccaagagtgctgaagggttgagtctccagtctgtaatgctggagctagtggcattgactgggaccatggtctacagcatcactaacaacttcccattcagctcttggggtgaagccttattcctgatgctccagacgatcaccatctgcttcctggtcatgcactacagaggacagactgtgaaaggtgtcgctttcctcgcttgctacggcctggtcctgctggtgcttctctcacctctgacgcccttgactgtagtcaccctgctccaggcctccaatgtgcctgctgtggtggtggggagggcagccaccaactaccacaacgggcacacaggccagctctcagccatcacagtcttcctgctgtttgggggctc

SEQ ID NO: 151479 - DNA, 563 bp, Homo sapiens
  Payload ID: 9822
  Gene Symbol: MPDU1
  Gene Name: mannose-P-dolichol utilization defect 1
  ENST ID: ENST00000580708
  CDS Start-End: 12-317
agctttgcaatatggcggccgaggcggacggaccgcttaaacggctgctcgtgccgattcttttacctgagaaatgctacgaccaacttttcgttcagtgggacttgcttcacgtcccctgcctcaagattctcctcagcaaaggcctggggctgggcattgtggctggctcacttctagtaaagctgccccaggtgtttaaaatcctgggagccaagagtgctgaagggttgagtctccagtctgtaatgctggagctagtggcattgactgggaccatggtctacagcatcactaacaacttcccattcaggtgaggggcccacccttccaccccaagggtaatacccacaactctaatggggattaaggtgaaggaggttacaaggcagcaaagtggccgggcccagtggcttgcacctgtaaccccagcactttgggaggccgaggttgcagtgagccaagattgcgccactgcactccagcctgggcaacaagagcgaaactcagtcttaaaaaaaaaaaaaagggacaaggggctaggaaagttttaagccctttta

SEQ ID NO: 151480 - DNA, 1614 bp, Homo sapiens
  Payload ID: 9822
  Gene Symbol: MPDU1
  Gene Name: mannose-P-dolichol utilization defect 1
  ENST ID: ENST00000621041
  CDS Start-End: 217-1116
aagctttacaattccaacagcgcgtccaaaacgtggtccctgactgagacttattttacgccactagagtgagggtgggtagcgtcagaaagagcggggcacggggcgggccagcttcgccgcgggaaaagaacgggaggcggagtgtccgcagcgcgcacgcgcaacgaaagtcaatggcggtctggagagactggcggaagctagctttgcaatatggcggccgaggcggacggaccgcttaaacggctgctcgtgccgattcttttacctgagaaatgctacgaccaacttttcgttcagtgggacttgcttcacgtcccctgcctcaagattctcctcagcaaaggcctggggctgggcattgtggctggctcacttctagtaaagctgccccaggtgtttaaaatcctgggagccaagagtgctgaagggttgagtctccagtctgtaatgctggagctagtggcattgactgggaccatggtctacagcatcactaacaacttcccattcagctcttggggtgaagccttattcctgatgctccagacgatcaccatctgcttcctggtcatgcactacagaggacagactgtgaaaggtgtcgctttcctcgcttgctacggcctggtcctgctggtgcttctctcacctctgacgcccttgactgtagtccctgctccaggcctccaatgtgcctgctgtggtggtggggaggcttctccaggcagccaccaactaccacaacgggcacacaggccagctctcagccatcacagtcttcctgctgtttgggggctccctggcccgaatcttcacttccattcaggaaaccggagatcccctgatggctgggacctttgtggtctcctctctctgcaacggcctcatcgccgcccagctgctcttctactggaatgcaaagcctccccacaagcagaaaaaggcgcagtagagccagctactggagtcattccgtttccactcattcacccaacctcagggttctccccatctgagccagcctgctggtgtgacttactcatcctccattcctctgcacttgcagactttctgagccagggttttcttttagtggaaacaaatggttgatggatccagatccttagaaaaggagaggatgggggtagagtctcccaagccaaaattttgacatttgagtgctttcgtaagccctgtacatgtactattaattcagtcattcagccaagcctcctcctctagcagcaatttccagctgtgtaacactatcctgggcaaatgttttaccctgtcctccagcctccctgcttcccttctggccctggaagactgagtctggacggcagagtggagggactgggaggctgtggctgcctccctccctcagcccggctgggactgtctcccggaccccagtgctggggtgggggaagggggacggagaatgactcaggcagggccccagggtggggtgaggaggttcctgctctggcaggtctaggcggaagggagtggagatggggctggttcctgctgcagtgaggggaacagatgggacaataaagactggagactcagttgaataatacaaaactgtttaatactacc

SEQ ID NO: 151481 - DNA, 1615 bp, Homo sapiens
  Payload ID: 9822
  Gene Symbol: MPDU1
  Gene Name: mannose-P-dolichol utilization defect 1
  ENST ID: ENST00000620608
  CDS Start-End: 217-852
aagctttacaattccaacagcgcgtccaaaacgtggtccctgactgagacttattttacgccactagagtgagggtgggtagcgtcagaaagagcggggcacggggcgggccagcttcgccgcgggaaaagaacgggaggcggagtgtccgcagcgcgcacgcgcaacgaaagtcaatggcggtctggagagactggcggaagctagctttgcaatatggcggccgaggcggacggaccgcttaaacggctgctcgtgccgattcttttacctgagaaatgctacgaccaacttttcgttcagtgggacttgcttcacgtcccctgcctcaagattctcctcagcaaaggcctggggctgggcattgtggctggctcacttctagtaaagctgccccaggtgtttaaaatcctgggagccaagagtgctgaagggttgagtctccagtctgtaatgctggagctagtggcattgactgggaccatggtctacagcatcactaacaacttcccattcagctcttggggtgaagccttattcctgatgctccagacgatcaccatctgcttcctggtcatgcactacagaggacagactgtgaaaggtgtcgctttcctcgcttgctacggcctggtcctgctggtgcttctctcacctctgacgcccttgactgtagtcaccctgctccaggcctccaatgtgcctgctgtggtggtggggaggcttctccaggcagccaccaacaccacaacgggcacacaggccagctctcagccatcacagtcttcctgctgtttgggggctccctggcccgaatcttcacttccattcaggaaaccggagatcccctgatggctgggacctttgtggtctcctctctctgcaacggcctcatcgccgcccagctgctcttctactggaatgcaaagcctccccacaagcagaaaaaggcgcagtagagccagctactggagtcattccgtttccactcattcacccaacctcagggttctccccatctgagccagcctgctggtgtgacttactcatcctccattcctctgcacttgcagactttctgagccagggttttcttttagtggaaacaaatggttgatggatccagatccttagaaaaggagaggatgggggtagagtctcccaagccaaaattttgacatttgagtgctttcgtaagccctgtacatgtactattaattcagtcattcagccaagcctcctcctctagcagcaatttccagctgtgtaacactatcctgggcaaatgttttaccctgtcctccagcctccctgcttcccttctggccctggaagactgagtctggacggcagagtggagggactgggaggctgtggctgcctccctccctcagcccggctgggactgtctcccggaccccagtgctggggtgggggaagggggacggagaatgactcaggcagggccccagggtggggtgaggaggttcctgctctggcaggtctaggcggaagggagtggagatggggctggttcctgctgcagtgaggggaacagatgggacaataaagactggagactcagttgaataatacaaaactgtttaatactacc

SEQ ID NO: 151482 - DNA, 900 bp, Homo sapiens
  Payload ID: 9822
  Gene Symbol: MPDU1
  Gene Name: mannose-P-dolichol utilization defect 1
  ENST ID: ENST00000614740
  CDS Start-End: 1-900
atggcggccgaggcggacggaccgcttaaacggctgctcgtgccgattcttttacctgagaaatgctacgaccaacttttcgttcagtgggacttgcttcacgtcccctgcctcaagattctcctcagcaaaggcctggggctgggcattgtggctggctcacttctagtaaagctgccccaggtgtttaaaatcctgggagccaagagtgctgaagggttgagtctccagtctgtaatgctggagctagtggcattgactgggaccatggtctacagcatcactaacaacttcccattcagctcttggggtgaagccttattcctgatgctccagacgatcaccatctgcttcctggtcatgcactacagaggacagactgtgaaaggtgtcgctttcctcgcttgctacggcctggtcctgctggtgcttctctcacctctgacgcccttgactgtagtcccctgctccggcctccaatgtgcctgctgtggtggtggggaggcttctccaggcagccaccaactaccacaacgggcacacaggccagctctcagccatcacagtcttcctgctgtttgggggctccctggcccgaatcttcacttccattcaggaaaccggagatcccctgatggctgggacctttgtggtctcctctctctgcaacggcctcatcgccgcccagctgctcttctactggaatgcaaagcctccccacaagcagaaaaaggcgcagtagagccagctactggagtcattccgtttccactcattcacccaacctcagggttctccccatctgagccagcctgctggtgtgacttactcatcctccattcctctgcacttgcagactttctgagccagggttttcttttagtggaaacaaatggttga

SEQ ID NO: 151483 - DNA, 5014 bp, Homo sapiens
  Payload ID: 9823
  Gene Symbol: MAN1A1
  Gene Name: mannosidase, alpha, class 1A, member 1
  Uniprot ID: P33908
  ENST ID: ENST00000368468
  CDS Start-End: 443-2404
agtgctcgcggggccgcggcggagtgtaccgtgctgctctactcgctgccattcgcccgcaggtcggcgcgctcgcccacctgagccgcgccggggctgcgggaccgtgggacagcgcgctcagcccagcctaggaaagaggcagcagtctcagcgcggagatggggagcgggcgaagttgacgagtctcccgcccacgctgcgcccctcctgcccagaggggctgcagccagcggtctgtcgcgcgtgcctgtgtgcccgaggagccgccccggggagaagacccggcgcggagttgttcccccagggaggatccgcagcccagccgagggggtcgggcggcctggctacgcaggacccagccccgcagccgcggactcccagcggcggcgaagtttggctgctgagcggcgcggcgccggaccactggacagcgggagcgatgcccgtggggggcctgttgccgctcttcagcagccccgcgggcggcgtcctgggcggggggctcggcggcggcggtggcaggaaggggtcgggccccgccgccctccgcctgacggagaagttcgtgctgctgctggtattcagcgccttcatcacgctctgcttcggggcgatcttcttcctgccagactcctccaagctgctcagcggggtcctgttccactccagccccgccttgcagccggccgccgaccacaagcccgggcccggggcgcgcgccgaggacgcggccgaggggcgagcccggcgccgcgaggagggggcacccggggacccggaggccgccctggaggacaacttggccaggatccgcgaaaaccacgagcgggctctcagggaagccaaggagaccctgcagaagctgcccgaggagatccaaagagacatcctactggagaagaagaaggtggcccaggaccagctgcgtgacaaggcgccgttcagaggcctgcccccggtggacttcgtgcccccaatcggggtggagagccgggagcccgccgacgccgccatccgcgagaaaagggcaaagatcaaagagatgatgaaacatgcttggaataattataaaggttatgcctggggattaaatgaactcaaacctatatcaaaaggaggccattcaagcagtttgtttggtaacatcaaaggagcaactatagtagatgccctggatacactttttattatggaaatgaaacatgaatttgaagaagcaaaatcatgggttgaagaaaatttagattttaatgtgaatgctgaaatttctgtctttgaagtaaatatacgctttgttggtggactactctcagcctactatctgtctggagaagagatttttcgaaagaaagcagtggaacttggggtaaaattgctacctgcatttcatactccctctggaataccttgggcattgctgaatatgaaaagtggtattggaaggaactggccctgggcctctggaggcagcagtattctggcagaatttggaaccctgcatttggagtttatgcacttgagccacttatcaggaaaccccatctttgctgaaaaggtaatgaatattcgaacagtactgaacaaactggaaaaaccacaaggcctttatcctaactatctgaatcccagtagtggacagtggggtcaacatcatgtatcagttggaggacttggagacagcttctatgagtatttgctgaaggcctggttaatgtctgacaagacagatctggaagctaagaagatgtattttgatgctgttcaggctatcgagactcatttgatccgcaagtctagcagcggactaacttatatcgcagagtggaaagggggcctcctggagcacaagatgggccacctgacctgcttcgcggggggcatgttcgcactcggggctgatgcagctcccgaaggcatggcccaacactaccttgaactcggggctgaaattgcccgtacttgtcatgaatcatataatcgaacatttatgaaactgggaccagaagctttcagatttgatggtggtgttgaagccatcgctacaagacaaaatgaaaaatactacatcttacggccagaagttatggagacttacatgtatatgtggagactgactcatgatccaaagtacaggaaatgggcctgggaagccgtagaggccttggaaaaccattgcagagtgaatggaggctattcaggcctaagggatgtttaccttcttcatgagagttatgatgatgtgcagcagagtttcttcctggcagagacattgaaatatttgtacctaatattttctgacgacgatcttcttccactggagcattggatcttcaatagcgaggcacatcttctccctatcctccctaaagataaaaaggaagttgaaatcagagaggaataaaaagacattttatattttattctgctccattcccttcactgtataccttaataattccttttctggtaatcaggcacatgatgaactttgattagtaggtctgtgattaagttcttaaattgttttgcagtcttttatgtttattatcataggtataggtggacctaaattccttatcatatcctttattaattcagccagtgtatccaccagttttttgtttatgtttttaagtaacctattatctctggatttcatgaaggtgtaatatcgtttttgttaaactgaatagaattgtatagcgatgacctcttaattataatttgatttgactgcaaaactttttcctcctctaagaggagatgatgtctgctttaagctgtaatgttttgccatgttgcaaaaagccataataataagtataaaaaagctttttcctttacaatttcatgttaatctggtttgtctgtccaccagagacagatcttctgtgacagcctccttatgcaggtctatcattatttgatagaatgtcttctaaaatacttcactcacattgtaattcaaattagaaagtcattccaaaaggatcatgtcatgttgacctcatttcatcggaactgcagtatatttttgttggttaattatattagtgttttctattttgtaaatgtgtcctttaattttactttaaatgccctgtgtcatttctggattatatactagttaatttcttccattccccactacacagagaggtgagctttcaaattttgcagagctctgctatcactgaattacatttatctgaagaaaatagtacaacttaatggattagcttttgggtttaactgaatatatgaagaaattgggtctgtctaaagagagggtatttcatatggcttttagttcacttgtttgtatttcatcttgatttttttctttggaaaataaagcattctatttggttcagatttctcagatttgaaaaaggctctatctcagatgtagtaaattatttcctttcagtttgtgaaagcaggatttgactctgaaagaagctttgccaattttacttattcgtgatcaatcaaggaaaatctaataaattttaggccaaataagaatatagcatatttagtatggttatagtcaacacagagatcacaacttagaagaaatataaagaaatggccactccccatcccccacagtcctggagtaaatcaaaatcaatatatgattcttttaaacattaagtttgaaataggaatggttttctcaagaatagatttggtgtgataccttgtgtttgcttacattggcccactatatatacatatatatttatgtagatatacttccatgaaagggctaatacgatgcatatactgaagggcaaggactttgaccatgtcaattttcagccgagaatggtcagaaagatcagtacaaccccatggattaggctgaaacatatgaaattgctgcatttgtagtttaaaaactgtcagcagtttcatatggttccacctaatattattgaagacaattattttcttagctatcaataggcttaatagttttagttattttagcttttgaaagtgttttaaaagatttcctttatcggacaggaccatctttatgacctgctttctgtttttcaatatcatacattggtgtatgtcaaagaataaattagtaaaattagtaaatgaaaaagactcttccgtacatcattatttccatgctaatgtgtgtctgtgatccagaataacttctcccactcatatcttcagttcacctaatgaaatgaatggatagcaagagccctttgttcccaggactttaaggcaaaatattaaaaattattgccaaaattaagaatataatgtttgtataaatgtccttgaatttgccatttaaattaactcattttcttttcactttgatttgaaagctgataagtatttctgcagcagatagaatattaaaatcaggttgtgtgtacacactgcactatgaggtaccttggtgtcctggtgtgaatagacaagaagctgtactatatgttgctctctcagtggcaacaatgaagtttttgcaattctagaacttggatttttttttaacaaaagtcccaaaacaccaaaaatgtaaacaagataagagattaatattgtagtgatgtaatttaattaaagttatattttgggttaattttaacaactgaagtcttattgttgaaacttattttcaacaaaactgtgcagttaaatttgtatacgtattcacatactgaaagatgaaccgttaaaatagcacttaattttgtgtttcttcaatatgtcttgatatactttgtgcaattaatattacacatgtaagttgtatggcagtttacagaactcaatgacttgtcatgaggttttcatatgagctacacattgtgtacattgattgttttttatttttacataaatccattctgtcattttcaactttatatataaatctccaatgttatgggaaacaatagattgacacataatttttaaaaattatatttgtaaaatttctctattgtgaataaagtcttttaatata

SEQ ID NO: 151484 - DNA, 8576 bp, Homo sapiens
  Payload ID: 9824
  Gene Symbol: MAN1A2
  Gene Name: mannosidase, alpha, class 1A, member 2
  Uniprot ID: O60476
  ENST ID: ENST00000356554
  CDS Start-End: 736-2661
agacccgtgcggtagcaacagcggcggcggccgcggcggctggccggactcaggtgtttcggacgctattgcccttcgcgccagccgtcgagtgggcagcagcgggactcagccgggcgccaggttcctgccaggcagcgccgggaagcgcgggcggccgagaactccttcctgctacttcgcccagcgccgctgcttcggcttcccagcgaagtgggagaccttcctccctgtttgcagacgtccgtgggagacccttattttttccaccgctaaggttaagagattctggaatagaagcgtcgaaggagatcaagtgaaccttctacaactcctcggatgtcgccagtctccctttcggggcggaagactacgtttgagcatctcactgaggtgcaggaatggaagaacccaccttgcagcttttctgcagtgtggcttgcctgatctacccctaggaatgaagaggaggcttgtaataatccgatgaagtacagatgttgaagaggatatcgcaggacctaaacttgtgatcgtttgggggaggtcacacacgtttctgagtgggaatggatgggcgtgaatgacgtgccctcttaaaaagcacaacagtcctttaagaggagcaaaattgagttttcccattttggccaagattttgaagacagttcaatgtattctacatttgacataagatgagaactttctaaagtattctctccaagagcgtaaacgatgactaccccagccctgctgcccctctctggacgtaggataccacctctgaacctggggccgccttccttcccacatcacagggctaccttgagactttctgagaagtttattcttctccttattcttagtgccttcatcactctgtgttttggggcattctttttccttccagactcttcaaaacacaaacgctttgatttgggtttagaagatgtgttaattccacatgtagatgccggtaaaggggctaaaaaccccggagtcttcctgatccatggacccgatgaacatagacacagggaagaggaagaacgtctgagaaataaaattcgagctgatcatgagaaggccttggaagaagcaaaagaaaaattaagaaagtcaagagaggaaattcgagcagaaattcagacagagaaaaataaggtagtccaagaaatgaagataaaagagaacaagccactgccaccagtccctattcccaaccttgtaggaatacgtggtggagacccagaagataatgacataagagagaaaagggaaaaaattaaagagatgatgaaacatgcttgggataactataggacatatgggtggggacataatgaactcagacctattgcaaggaaaggacactcccctaacatatttggaagttcacaaatgggtgctaccatagtagatgctttggataccctttatatcatgggacttcatgatgaattcctagatgggcaaagatggattgaagacaaccttgatttcagtgtgaattcagaggtgtctgtgtttgaagtcaacattcgatttattggaggcctacttgcagcatattacctatcaggagaggagatattcaagattaaagcagtgcaattggctgagaaactccttcctgcctttaacacacctactgggattccttgggcaatggtgaatttgaaaagtggagtagggcgaaactggggctgggcatctgcaggtagcagcattctggctgaatttggtacactacatatggagttcatccacctcagctacttgacaggggacctgacttactacaaaaaggttatgcacattcggaaactacttcagaaaatggatcgtccaaatggtctttatccaaattatttgaaccccagaacagggcgctggggtcagtatcatacatctgtcggtggcctgggagacagtttttatgaatacttactgaaagcatggttgatgtcagataaaacagaccatgaggcaagaaagatgtatgatgatgctattgaggctatagaaaaacatcttattaagaagtctcgtggaggtcttacctttattggagaatggaagaatgggcacttggaaaaaaagatggggcatttggcctgctttgctgggggaatgtttgcactaggagcagatggttccagagcagataaagctggtcattatttagagctaggggcagaaattgcacgtacttgtcatgagtcatatgacagaactgcattaaagctaggtcctgaatcattcaagtttgatggtgcagtggaggctgtggctgtccggcaggctgaaaagtattatatcctccgtccagaagtaattgaaacctattggtacctatggcgattcactcacgatccaagatacaggcagtggggctgggaagcagcactggccattgaaaagtattgccgagttaatggtgggttttctggagtcaaagatgtatattcctctactcctacacatgatgatgtacagcagagcttttttcttgctgaaacattaaaatatttgtatctgctgttctccggtgatgaccttttacctttagaccactgggtgtttaatacagaggctcaccctctgcctgtgttacatttagccaacaccacactttcaggtaatcctgctgttcgatgaaagcagttccagaaggaccattctcacctgtgttttgtttacatggaccactacagaaattagtttgaaggggcggcttttgaaaacctggacctctatgtcaacatgacagggtgaaactattccccctaagactgttcaacttgtagatacatcaactttgaaattattccattttatacctgaccaaaacatgttctgatatgtgtaggacagagacctggatgtgctttgatcgttaatgaggtggtcacatgagaaatgatacctgttactactgtattgtttttagagtcctgaagtctggaggctagacttcctgaaagcaagtcaagaatatagagcaccttgcaggagttcaagatggcctttggaaccaattatgtatttgtttcctcctacagtggagcagcattcaaatcaaatatttacatattgcttatcactttttctccattttaataatggaatgaactaaaataaacaagaacaaaagaatagtataattatatcagtaacaagaagactcaaaaaagaaacaggagtacctatccctatctgaattttcaagttccccattggatgaccagactggcaaccatttcaaatcccagtctatttcattgaaatttcttggttaagtttaattttctctgggggcatgatctcacaaagaatactcaagtctttttcttcttatggaatcatcgaaactgctatttatcataatcaccacttatgagcctgggtttgggattttgtgcatgtagttcagtctagtgttggtagcatgacagaaagtggggaaaatgccgcagtttgttgccttgaaacctaagagcaatccttggttttgttgctacattatttttccagaccaacacatctaccaagtaaattttattcactttaatttcataataaagttagtagagtcactcaacttacaactttatttatgtggcttggcaaaaatcactataaggcagctctaaatttgccttgataagctaaataaattacttttataacttactaaagcagaacaaacagtgaaactttctaaaatattctatctggaatagggacaggggatcttttatttataatctcatcagatgagtgagttgttcacagatattttatgtttttttaattttctccaagaatatttatagaattccaaagaatcagaatagtttcaaaataattttcagtgataaaagagtgttgtaattaatcatattacactaaaattgggatacatctaaggaactttatcttactatcagtaggttttgcattgatatttctttttaaataaactactagttctttatattttgacaaaaagaacttaaattttatcaggaactgtaagataaatatctagtgcttataaattttctgtccttaaatttatgtgacagtgcaagatacttttgctcttttcatttaatataggcatcttccattgacattaataaaacttagaaacagtataattagtataacatttactctgaatttgaagatttcctgaaacaaagtttgtacaagaagcccaccttggaattctgaaggcttattttcttgtttgataagcttttcttttaaacttaggttttaagttggggaaagacttaattaactaatatagtattttctaaggttgatcatcttataccacgaatcgttaattttgacagttctactgatccgtaaatgataaccactgcaaattttttcagtataaaatttttcactgcaaaaaaatttcagtagaaaataaggatgcagggccagttacaatagtccttaagagagttaaattatagcacatgttttgacattgtaatatcttttactacttgaacatttaaatttctaaatgagaaaggtatatatattactgtaactgtagaagggaaaagggaaagtatttggttctaaaaaatgttagccttcctcgtaaaagtagcacaagcccacttatgaatcactgagaaaaagtgaaaaacttgagttggcaaagatgcagagcagcagtgcagatggcaatgaactctctgaattctcttttaccttatttagaagaatgcagagtaaagggaccttcttggttctgcaggaacttctcaagggatgaggagacagaacccctacttccaagtgctctatttgtattacccagatgactgaagcttaagagaaggcagggaagtatacaagcagagccagttctggtacaaacaaagaatttgacagggacaatggaagggtcttcttcaccactccttaccttctatgtgatggaaagactagagcttataaaagtacttccatttttttattctcctgaataccaaaggcaattaaagtcagctacaaatgacttgccagtgtcatgttttatttttgttatagatttttaaattatttccttcaagatcaattcttatcccatataatgcttagcttccaagaatattctttactttcttctgtcttttacagctctttgcattttgtagaccttaatactcaggttaaatattcattgcatttataagatcttctgcaaaaagcccagaaatggtccttttcaggtgcctcttcaaagagctgacaccttaccttgtgcctttggcacaaatgtgcagaatagatacatcagttggtgcataatcgaaaaaaataggaattttgaacactgttcttccttctacatttatttctcttcattttagaatcacactttttatgttaaaccagattattattattattattattcaaccagtattaagttgttaaaaccaagggaatggggccctaaccaaaaagaagtctcaactcagaaaaataagtccccagtcaggtggttcttactttcttgtgggttgcacattttgtatctctctaacatcagcgtattcctgactttaagcaggtgtttatatgtaaaataaaacctgggtatcgaagggaaatgcattctttttatggagtattgaccctgatcctctatgatgtcatatagagcaactcagggctatacttgctagattttaaccaagcagtttgaaatattaatcatcatcctctcatcttctccactctccattgccaaagtctttgtcaaaactccaaatttgttgataaaagattgtgtttgccattctcatttataatgcagtttctccttaagcctggagttttttgaatgagtgcatgagtaaatgagagaatgtgtgaacgaacatttatgaagtatctaacatgtgccaagcattgtgcctggcactttcaatcattagaatgttttatgtgattccacagcattttctgtatgagagtagctcacaacattttaaatgtttccaatatgaatcgtgttacaaaattcttaattttatatttcatataaattaaagaggaaaaagaaaaggtttataatatattttaaaacaatgtgttactgtataatacaactataattgtagttaataactaaaacctcttgaaaatgtcaaagaaatacttgatttctgatgcaactttgactaaaatatttactttagaaataaaaacgttcttattttgctatatcactttaattgcataattaaaaagcagtgttttatagaaatgctggttattttatattcaaaaagattttgtcacataattcatgggtaaaacttgcagttgtaaattgtgtctgctctggtatgggccctattaatagtcccatgctgttaaatataaagaaaaatatactaaaatattcaaagttccaaataacagttcctagtaatagtattttgagttatttttctttaggtttccttatactcaaattggctaggtcctatcttttcctctctctctctctctctctctctctctctctctctctctatatatatatatatatatatatatatatgagagatatatgagatatatgagagatcaagatctatatatgtatataaatacaattatacacagataatttttaatactctttgttaacaaacacagttgaaaactggtttcggctgcacaaataagcagaatatttgagtaactatatatgatatggagatattttaatccatttatcctggctcaagaacactgataaagatgattttctgttactttagctcattcagatcaggatggacatgctctttttgatctataactgttcagccagcttccagataatattttaggctatgagagctatacagtctctcttattactcatttctgctgttgaagtatcgaaaacagatagagatactatgtaaagaatgggcgtagctatgttccaggaaaactttatttacaaaagcagatggagggctggatttggtccatgggtcatagttagtgaccctgatcccaagtttattttgtgttagaccctctaacctttgatctgcgtcttttctgttttgatttacataattcatttttaaatcaaaaagatgtgcgtatatatggttgtgtgtatctgtataacctaaagctataatattttgttgtcttgaaagcagatacactcttcctggagtctgttcaggtttcaggacgattgactataatgaaagagacagaatagggtaagggaagatgggtatgctatcagccattttctttgccttgtcatttaatgccataatttcagattctctatgtaaaaagaaggtctgtgtattgtcaaaataatatactctccaagttctcctgctcattgacccttgaaccaggattctggattgctagagctgcagaaattcacccacttgggtactcttagagctctacagcaagaatatgatagaatgtctgatctttgtgctgcagaaagcaaacttttgaagaattctaagcaacagaaaatgggttatgtgactcatctgctatttggcagccactattccttttttagactgcagaacggtactgcccctgttacctctagaatagcctgagtctgaggagtgcagagaaaagatatatccaaaaggagaatccctttctcttgcataactctcaatcctttacaagtaagtagcattatttcagaatgtctatatgcatcattttcaactaaagcatacctcatccttaaacttccactatttaacagctaatccatttcaaacttggtttgagcctagcaattgcagaactcataaaattgcttgtgaaattacacaccatattactagcatatacattgcagtgctccaatcatgctaacagataatagatttttctttaagaattttatcaaatatttcactatttggggaaattttagaggaggggaagcctgtattcaggatgatagagggagcagagacttactgtctctcttccacattataaatgaactgcctttccaggtccaacatgctgtcaggttgcttcagctcggtgtgaatgtaagtgtggggatcaaacacacacacctatacacatacatattaatatgcagaggattttaaataattgcaaatgtcttgtggctgttttatttctacaaaattctgtaagatgtataccagaaaacataataaagataagctcagttcttcattgggaaaaaatatttttaaagaaaatttagaagtttttgctgaattaaagtatcttcaattttaattactggatttggaagttgaaatgccatccttcaatatcactggtctcaaattcattgatagaattttttcttaaactaataagtggggtaagtataatctcctaaattggtacccactggctgctcctaaactggtttccagtcatgtcctccagtatgtgatttttataaattaaaggtaatattgtatattaaagttcaaataaagatgttctttaagtgaaaa

SEQ ID NO: 151485 - DNA, 678 bp, Homo sapiens
  Payload ID: 9824
  Gene Symbol: MAN1A2
  Gene Name: mannosidase, alpha, class 1A, member 2
  ENST ID: ENST00000421535
  CDS Start-End: 1-613
tattaagaagtctcgtggaggtcttacctttattggagaatggaagaatgggcacttggaaaaaaagatggggcatttggcctgctttgctgggggaatgtttgcactaggagcagatggttccagagcagataaagctggtcattatttagagctaggggcagaaattgcacgtacttgtcatgagtcatatgacagaactgcattaaagctaggtcctgaatcattcaagtttgatggtgcagtggaggctgtggctgtccggcaggctgaaaagtattatatcctccgtccagaagtaattgaaacctattggtacctatggcgattcactcacgatccaagatacaggcagtggggctgggaagcagcactggccattgaaaagtattgccgagttaatggtgggttttctggagtcaaagatgtatattcctctactcctacacatgatgatgtacagcagagcttttttcttgctgaaacattaaaatatttgtatctgctgttctccggtgatgaccttttacctttagaccactgggtgtttaatacagaggctcaccctctgcctgtgttacatttagccaacaccacactttcagagtcctgaagtctggaggctagacttcctgaaagcaagtcaagaatatagagcaccttgcaggagttcaagat

SEQ ID NO: 151486 - DNA, 487 bp, Homo sapiens
  Payload ID: 9824
  Gene Symbol: MAN1A2
  Gene Name: mannosidase, alpha, class 1A, member 2
  ENST ID: ENST00000422329
  CDS Start-End: 1-294
gaaaagtattgccgagttaatggtgggttttctggagtcaaagatgtatattcctctactcctacacatgatgatgtacagcagagcttttttcttgctgaaacattaaaatatttgtatctgctgttctccggtgatgaccttttacctttagaccactgggtgtttaatacagaggctcaccctctgcctgtgttacatttagccaacaccacactttcaggaacttctcaagggatgaggagacagaacccctacttccaagtgctctatttgtattacccagatgactgaagcttaagagaaggcagggaagtatacaagcagagccagttctggtacaaacaaagaatttgacagggacaatggaagggtcttcttcaccactccttaccttctatgtgatggaaagactagagcttataaaagtacttccatttttttattctcctgaataccaaaggcaattaaagtcagctacaaatga

SEQ ID NO: 151487 - DNA, 2082 bp, Homo sapiens
  Payload ID: 9824
  Gene Symbol: MAN1A2
  Gene Name: mannosidase, alpha, class 1A, member 2
  ENST ID: ENST00000449370
  CDS Start-End: 1-995
acattcgatttattggaggcctacttgcagcatattacctatcaggagaggagatattcaagattaaagcagtgcaattggctgagaaactccttcctgcctttaacacacctactgggattccttgggcaatggtgaatttgaaaagtggagtagggcgaaactggggctgggcatctgcaggtagcagcattctggctgaatttggtacactacatatggagttcatccacctcagctacttgacaggggacctgacttactacaaaaaggttatgcacattcggaaactacttcagaaaatggatcgtccaaatggtctttatccaaattatttgaaccccagaacagggcgctggggtcagtatcatacatctgtcggtggcctgggagacagtttttatgaatacttactgaaagcatggttgatgtcagataaaacagaccatgaggcaagaaagatgtatgatgatgctattgaggctatagaaaaacatcttattaagaagtctcgtggaggtcttacctttattggagaatggaagaatgggcacttggaaaaaaagatggggcatttggcctgctttgctgggggaatgtttgcactaggagcagatggttccagagcagataaagctggtcattatttagagctaggggcagaaattgcacgtacttgtcatgagtcatatgacagaactgcattaaagctaggtcctgaatcattcaagtttgatggtgcagtggaggctgtggctgtccggcaggctgaaaagtattatatcctccgtccagaagtaattgaaacctattggtacctatggcgattcactcacgatccaagatacaggcagtggggctgggaagcagcactggccattgaaaagtattgccgagttaatggtgggttttctggagtcaaagatgtatattcctctactcctacacatgatgatgtacagcagagcttttttcttgctgaaacattaaattagcctcctaccatgagagaactgtttttccagctggatgaaaagagtagcatcaagtcccctattctgctgttttctgctcacttactcctggagacaagctaagtcaaatcaatatgtacttataagtacctgctttctcagagttgtatttgagaattaaagtatatgaaatgtatactctacccataaatagcttggagtctggtttagaaatctcttacctttaggcatggacaaatttaataaaagtacaaagtatatatgcagttggccctccatgtcaatgggttcatggattcaaccaaacatggattgaagatatagttttttaaaaattacatctgttttgagcatgtatatacctttttcttgtcattattccctaggcaatataacaactatttacatagatttaaagtatgtgggagcatatgcattggttatatgaatatactataccattttatatcaaggatttgagcattcaaggatttttgtatctgcgagaggtcctggaaccaatcccccatagatactgagggacaactgtattcagtgctaaatagaaaataaatgttttagaaattcagagaagggaattttggtgcaggccagagtagtcatgaagaaagactaaaatgatgctgaattagtaagatgttaataggtggggtaaaacagaaagtagctttgtgaaaagaaggattcagcctgaaaaaatacctttaaaaaaacactaaagaaactagaccgactaaagtacattcactaggagaagtagtaggaaataagagctctagaatcaaaatcagggaagcagcatggatgacccttgaggacattatgctaagtgaaataagtcagccataaaaagacaaatatggggtgattccacttctatgaggtctctaaagtagtcacatttatggaaacaaagtagaatgttggttaccagggacctggggaggggaatggaaatgagttttagttttgcaaagaacagtgtgaatatacttaatactactgaactatacgctgaaaaatggtgaagatggtaaactttatgtcatgtgtttattaccacaat

SEQ ID NO: 151488 - DNA, 2769 bp, Homo sapiens
  Payload ID: 9825
  Gene Symbol: MAN1B1
  Gene Name: mannosidase, alpha, class 1B, member 1
  Uniprot ID: Q9UKM7
  ENST ID: ENST00000371589
  CDS Start-End: 74-2173
actggccgcatagagacgcagcgcacgcgcagtcgcgtatccgtgtgatgggcgggctgttgacggcgctgcgatggctgcctgcgagggcaggagaagcggagctctcggttcctctcagtcggacttcctgacgccgccagtgggcggggccccttgggccgtcgccaccactgtagtcatgtacccaccgccgccgccgccgcctcatcgggacttcatctcggtgacgctgagctttggcgagaactatgacaacagcaagagttggcggcggcgctcgtgctggaggaaatggaagcaactgtcgagattgcagcggaatatgattctcttcctccttgcctttctgcttttctgtggactcctcttctacatcaacttggctgaccattggaaagctctggctttcaggctagaggaagagcagaagatgaggccagaaattgctgggttaaaaccagcaaatccacccgtcttaccagctcctcagaaggcggacaccgaccctgagaacttacctgagatttcgtcacagaagacacaaagacacatccagcggggaccacctcacctgcagattagacccccaagccaagacctgaaggatgggacccaggaggaggccacaaaaaggcaagaagcccctgtggatccccgcccggaaggagatccgcagaggacagtcatcagctggaggggagcggtgatcgagcctgagcagggcaccgagctcccttcaagaagagcagaagtgcccaccaagcctcccctgccaccggccaggacacagggcacaccagtgcatctgaactatcgccagaagggcgtgattgacgtcttcctgcatgcatggaaaggataccgcaagtttgcatggggccatgacgagctgaagcctgtgtccaggtccttcagtgagtggtttggcctcggtctcacactgatcgacgcgctggacaccatgtggatcttgggtctgaggaaagaatttgaggaagccaggaagtgggtgtcgaagaagttacactttgaaaaggacgtggacgtcaacctgtttgagagcacgatccgcatcctgggggggctcctgagtgcctaccacctgtctggggacagcctcttcctgaggaaagctgaggattttggaaatcggctaatgcctgccttcagaacaccatccaagattccttactcggatgtgaacatcggtactggagttgcccacccgccacggtggacctccgacagcactgtggccgaggtgaccagcattcagctggagttccgggagctctcccgtctcacaggggataagaagtttcaggaggcagtggagaaggtgacacagcacatccacggcctgtctgggaagaaggatgggctggtgcccatgttcatcaatacccacagtggcctcttcacccacctgggcgtattcacgctgggcgccagggccgacagctactatgagtacctgctgaagcagtggatccagggcgggaagcaggagacacagctgctggaagactacgtggaagccatcgagggtgtcagaacgcacctgctgcggcactccgagcccagtaagctcacctttgtgggggagcttgcccacggccgcttcagtgccaagatggaccacctggtgtgcttcctgccagggacgctggctctgggcgtctaccacggcctgcccgccagccacatggagctggcccaggagctcatggagacttgttaccagatgaaccggcagatggagacggggctgagtcccgagatcgtgcacttcaacctttacccccagccgggccgtcgggacgtggaggtcaagccagcagacaggcacaacctgctgcggccagagaccgtggagagcctgttctacctgtaccgcgtcacaggggaccgcaaataccaggactggggctgggagattctgcagagcttcagccgattcacacgggtcccctcgggtggctattcttccatcaacaatgtccaggatcctcagaagcccgagcctagggacaagatggagagcttcttcctgggggagacgctcaagtatctgttcttgctcttctccgatgacccaaacctgctcagcctggatgcctacgtgttcaacaccgaagcccaccctctgcctatctggacccctgcctagggtggatggctgctggtgtggggacttcgggtgggcagaggcaccttgctgggtctgtggcattttccaagggcccacgtagcaccggcaaccgccaagtggcccaggctctgaactggctctgggctcctcctcgtctctgctttaatcaggacaccgtgaggacaagtgaggccgtcagtcttggtgtgatgcggggtgggctgggccgctggagcctccgcctgcttcctccagaagacacgaatcatgactcacgattgctgaagcctgagcaggtctctgtgggccgaccagaggggggcttcgaggtggtccctggtactggggtgaccgagtggacagcccagggtgcagctctgcccgggctcgtgaagcctcagatgtccccaatccaagggtctggaggggctgccgtgactccagaggcctgaggctccagggctggctctggtgtttacaagctggactcagggatcctcctggccgccccgcagggggcttggagggctggacggcaagtccgtctagctcacgggcccctccagtggaatgggtcttttcggtggagataaaagttgatttgctctaaccgc

SEQ ID NO: 151489 - DNA, 573 bp, Homo sapiens
  Payload ID: 9825
  Gene Symbol: MAN1B1
  Gene Name: mannosidase, alpha, class 1B, member 1
  ENST ID: ENST00000545539
  CDS Start-End: 1-159
ccttgggccgtcgccaccactgtagtcatgtacccaccgccgccgccgccgcctcatcgggacttcatctcggtgacgctgagctttggcgagaactatgacaacagcaagagttggcggcggcgctcgtgctggagggtgagggtcgcgccgggctgactggggcccggggctgccgtgcccgccgccctcccagactgcggctccgagcgggacctgggcgggcggactcgactccccaggcgccgccctctccaccccttccccgcaaaaaggggcaaataaatggaagcaactgtcgagattgcagcggaatatgattctcttcctccttgcctttctgcttttctgtggactcctcttctacatcaacttggctgaccattggaaagctctggctttcaggctagaggaagagcagaagatgaggccagaaattgctgggttaaaaccagcaaatccacccgtcttaccagctcctcagaaggcggacaccgaccctgagaacttacctgagatttcgtcacagaagacacaaagacacatccagcggggaccacctcacctgcagat

SEQ ID NO: 151490 - DNA, 2296 bp, Homo sapiens
  Payload ID: 9825
  Gene Symbol: MAN1B1
  Gene Name: mannosidase, alpha, class 1B, member 1
  ENST ID: ENST00000535144
  CDS Start-End: 29-2116
cccttgggccgtcgccaccactgtagtcatgtacccaccgccgccgccgccgcctcatcgggacttcatctcggtgacgctgagctttggcgagaactatgacaacagcaagagttggcggcggcgctcgtgctggaggaaatggaagcaactgtcgagattgcagcggaatatgattctcttcctccttgcctttctgcttttctgtggactcctcttctacatcaacttggctgaccattggaaagctctggctttcaggctagaggaagagcagaagatgaggccagaaattgctgggttaaaaccagcaaatccacccgtcttaccagctcctcagaaggcggacaccgaccctgagaacttacctgagatttcgtcacagaagacacaaagacacatccagcggggaccacctcacctgcagattagacccccaagccaagacctgaaggatgggacccaggaggaggccacaaaaaggcaagaagcccctgtggatccccgcccggaaggagatccgcagaggacagtcatcagctggaggggagcggtgatcgagcctgagcagggcaccgagctcccttcaagaagagcagaagtgcccaccaagcctcccctgccaccggccaggacacagggcacaccagtgcatctgaactatcgccagaagggcgtgattgacgtcttcctgcatgcatggaaaggataccgcaagtttgcatggggccatgacgagctgaagcctgtgtccaggtccttcagtgagtggtttggcctcggtctcacactgatcgacgcgctggacaccatgtggatcttgggtctgaggaaagaatttgaggaagccaggaagtgggtgtcgaagaagttacactttgaaaaggacgtggacgtcaacctgtttgagagcacgatccgcatcctgggggggctcctgagtgcctaccacctgtctggggacagcctcttcctgaggaaagctgaggattttggaaatcggctaatgcctgccttcagaacaccatccaagattccttactcggatgtgaacatcggtactggagttgcccacccgccacggtggacctccgacagcactgtggccgaggtgaccagcattcagctggagttccgggagctctcccgtctcacaggggataagaagtttcaggaggcagtggagaaggtgacacagcacatccacggcctgtctgggaagaaggatgggctggtgcccatgttcatcaatacccacagtggcctcttcacccacctgggcgtattcacgctgggcgccagggccgacagctactatgagtacctgctgaagcagtggatccagggcgggaagcaggagacacagctgctggaagactacgtggaagccatcgagggtgtcagaacgcacctgctgcggcactccgagcccagtaagctcacctttgtgggggagcttgcccacggccgcttcagtgccaagatggaccacctggtgtgcttcctgccagggacgctggctctgggcgtctaccacggcctgcccgccagccacatggagctggcccaggagctcatggagacttgttaccagatgaaccggcagatggagacggggctgagtcccgagatcgtgcacttcaacctttacccccagccgggccgtcgggacgtggaggtcaagccagcagacaggcacaacctgctgcggccagagaccgtggagagcctgttctacctgtaccgcgtcacaggggaccgcaaataccaggactggggctgggagattctgcagagcttcagccgattcacacgggtgagcacctgtcctcgccccgcgtggtcacggccaccgggccacaggcacggctgggctgtggggctcaggctggctccgctcttggtggtggctgtgacctggatccgggaggggcgggcttgccgcagcctcggggtggccacactgcagcttgggggccctggcatccccatccccactgagcttcatggttgtgggacccagagtacttggaggggctgggcacccctcattttcatttctcagggcctgtctagggagggtctctgctgtgggcccagcatccccccagtttaggaggcacacgcacccatgactggggcaccatccccactgtggaccaggccctgttttaggtcacgccctccacgccagagtgtcacttcctggctctgctgtgatcttggcctgaggcccccgctgcctccgctcccaccgtctgccctgtgccctgtgccctgtgcggcaactgtgagg

SEQ ID NO: 151491 - DNA, 545 bp, Homo sapiens
  Payload ID: 9825
  Gene Symbol: MAN1B1
  Gene Name: mannosidase, alpha, class 1B, member 1
  ENST ID: ENST00000542372
  CDS Start-End: 1-545
ttgggccgtcgccaccactgtagtcatgtacccaccgccgccgccgccgcctcatcgggacttcatctcggtgacgctgagctttggcgagaactatgacaacagcaagagttggcggcggcgctcgtgctggaggaaatggaagcaactgtcgagattgcagcggaatatgattctcttcctccttgcctttctgcttttctgtggactcctcttctacatcaacttggctgaccattggaaagctcctcagaaggcggacaccgaccctgagaacttacctgagatttcgtcacagaagacacaaagacacatccagcggggaccacctcacctgcagattagacccccaagccaagacctgaaggatgggacccaggaggaggccacaaaaaggcaagaagcccctgtggatccccgcccggaaggagatccgcagaggacagtcatcagctggaggggagcggtgatcgagcctgagcagggcaccgagctcccttcaagaagagcagaagtgcccaccaagcctcccctgccaccggcca

SEQ ID NO: 151492 - DNA, 2090 bp, Homo sapiens
  Payload ID: 9825
  Gene Symbol: MAN1B1
  Gene Name: mannosidase, alpha, class 1B, member 1
  ENST ID: ENST00000544448
  CDS Start-End: 16-1668
gttgacggcgctgcgatggctgcctgcgagggcaggagaagcggagctctcggttcctctcagtcggacttcctgacgccgccagtgggcggggccccttgggccgtcgccaccactgtagtcatgtacccaccgccgccgccgccgcctcatcgggacttcatctcggtgacgctgagctttggcgagaactatgacaacagcaagagttggcggcggcgctcgtgctggaggaaatggaagcaactgtcgagattgcagcggaatatgattctcttcctccttgcctttctgcttttctgtggactcctcttctacatcaacttggctgaccattggaaagctctggctttcaggctagaggaagagcagaagatgaggccagaaattgctgggttaaaaccagcaaatccacccgtcttaccagctcctcagaaggcggacaccgaccctgagaacttacctgagatttcgtcacagaagacacaaagacacatccagcggggaccacctcacctgcagattagacccccaagccaagacctgaaggatgggacccaggaggaggccacaaaaaggcaagaagcccctgtggatccccgcccggaaggagatccgcagaggacagtcatcagctggaggggagcggtgatcgagcctgagcagggcaccgagctcccttcaagaagagcagaagtgcccaccaagcctcccctgccaccggccaggacacagggcacaccagtgcatctgaactatcgccagaagggcgtgattgacgtcttcctgcatgcatggaaaggataccgcaagtttgcatggggccatgacgagctgaagcctgtgtccaggtccttcagtgagtggtttggcctcggtctcacactgatcgacgcgctggacaccatgtggatcttgggtctgaggaaagaatttgaggaagccaggaagtgggtgtcgaagaagttacactttgaaaaggacgtggacgtcaacctgtttgagagcacgatccgcatcctgggggggctcctgagtgcctaccacctgtctggggacagcctcttcctgaggaaagctgaggattttggaaatcggctaatgcctgccttcagaacaccatccaagattccttactcggatgtgaacatcggtactggagttgcccacccgccacggtggacctccgacagcactgtggccgaggtgaccagcattcagctggagttccgggagctctcccgtctcacaggggataagaagtttcaggaggcagtggagaaggtgacacagcacatccacggcctgtctgggaagaaggatgggctggtgcccatgttcatcaatacccacagtggcctcttcacccacctgggcgtattcacgctgggcgccagggccgacagctactatgagtacctgctgaagcagtggatccagggcgggaagcaggagacacagctgctggaagactacgtggaagccatcgagggtgtcagaacgcacctgctgcggcactccgagcccagtaagctcacctttgtgggggagcttgcccacggccgcttcagtgccaagatgggacgctggctctgggcgtctaccacggcctgcccgccagccacatggagctggcccaggagctcatggagacttgttaccagatgaaccggcagatggagacggggctgagtcccgagatcgtgcacttcaacctttacccccagccgggccgtcgggacgtggaggtcaagccagcagacaggcacaacctgctgcggccagagaccgtggagagcctgttctacctgtaccgcgtcacaggggaccgcaaataccaggactggggctgggagattctgcagagcttcagccgattcacacgggtcccctcgggtggctattcttccatcaacaatgtccaggatcctcagaagcccgagcctagggacaagatggagagcttcttcctgggggagacgctcaagtatctgttcttgctcttctccgatgacccaaacctgctcagcctggatgcctacgtgttcaacaccgaagcccaccctctgcctatctggacccctgcctag

SEQ ID NO: 151493 - DNA, 905 bp, Homo sapiens
  Payload ID: 9825
  Gene Symbol: MAN1B1
  Gene Name: mannosidase, alpha, class 1B, member 1
  ENST ID: ENST00000475449
  CDS Start-End: 1-811
cttcctgccagggacgctggctctgggcgtctaccacggcctgcccgccagccacatggagctggcccaggagctcatggagacttgttaccagatgaaccggcagatggagacggggctgagtcccgagatcgtgcacttcaacctttacccccagccgggccgtcgggacgtggaggtcaagccagcagacaggcacaacctgctgcggccagagaccgtggagagcctgttctacctgtaccgcgtcacaggggaccgcaaataccaggactggggctgggagattctgcagagcttcagccgattcacacggcctggatgcctacgtgttcaacaccgaagcccaccctctgcctatctggacccctgcctagggtggatggctgctggtgtggggacttcgggtgggcagaggcaccttgctgggtctgtggcattttccaagggcccacgtagcaccggcaaccgccaagtggcccaggctctgaactggctctgggctcctcctcgtctctgctttaatcaggacaccgtgaggacaagtgaggccgtcagtcttggtgtgatgcggggtgggctgggccgctggagcctccgcctgcttcctccagaagacacgaatcatgactcacgattgctgaagcctgagcaggtctctgtgggccgaccagaggggggcttcgaggtggtccctggtactggggtgaccgagtggacagcccagggtgcagctctgcccgggctcgtgaagcctcagatgtccccaatccaagggtctggaggggctgccgtgactccagaggcctgaggctccagggctggctctggtgtttacaagctggactcagggatcctcctggccgccccgcagggggcttggagggctggacggcaagtccgtc

SEQ ID NO: 151494 - DNA, 774 bp, Homo sapiens
  Payload ID: 9825
  Gene Symbol: MAN1B1
  Gene Name: mannosidase, alpha, class 1B, member 1
  ENST ID: ENST00000550113
  CDS Start-End: 1-373
ggagacggggctgagtcccgagatcgtgcacttcaacctttacccccagccgggccgtcgggacgtggaggtcaagccagcagacaggcacaacctgctgcggccagagaccgtggagagcctgttctacctgtaccgcgtcacaggggaccgcaaataccaggactggggctgggagattctgcagagcttcagccgattcacacgggatcctcagaagcccgagcctagggacaagatggagagcttcttcctgggggagacgctcaagtatctgttcttgctcttctccgatgacccaaacctgctcagcctggatgcctacgtgttcaacaccgaagcccaccctctgcctatctggacccctgcctagggtggatggctgctggtgtggggacttcgggtgggcagaggcaccttgctgggtctgtggcattttccaagggcccacgtagcaccggcaaccgccaagtggcccaggctctgaactggctctgggctcctcctcgtctctgctttaatcaggacaccgtgaggacaagtgaggccgtcagtcttggtgtgatgcggggtgggctgggccgctggagcctccgcctgcttcctccagaagacacgaatcatgactcacgattgctgaagcctgagcaggtctctgtgggccgaccagaggggggcttcgaggtggtccctggtactggggtgaccgagtggacagcccagggtgcagctctgcccgggctcgtgaagcctcagatgtccccaatccaaggg

SEQ ID NO: 151495 - DNA, 1485 bp, Homo sapiens
  Payload ID: 9825
  Gene Symbol: MAN1B1
  Gene Name: mannosidase, alpha, class 1B, member 1
  ENST ID: ENST00000371587
  CDS Start-End: 1-348
ccttgggccgtcgccaccactgtagtcatgtacccaccgccgccgccgccgcctcatcgggacttcatctcggtgacgctgagctttggcgagaactatgacaacagcaagagttggcggcggcgctcgtgctggaggaaatggaagcaactgtcgagattgcagcggaatatgattctcttcctccttgcctttctgcttttctgtggactcctcttctacatcaacttggctgaccattggaaagctccaggaggcatatatggcaacgaattggcaagaaatcaagataaagagaaaggtagagctgtatgtaaccacctggctagaacacagatgttaatttgatgctgtctgactactttctaggtctctggtctctggctttcaggctagaggaagagcagaagatgaggccagaaattgctgggttaaaaccagcaaatccacccgtcttaccagctcctcagaaggcggacaccgaccctgagaacttacctgagatttcgtcacagaagacacaaagacacatccagcggggaccacctcacctgcagattagacccccaagccaagacctgaaggatgggacccaggaggaggccacaaaaaggcaagaagcccctgtggatccccgcccggaaggagatccgcagaggacagtcatcagctggaggggagcggtgatcgagcctgagcagggcaccgagctcccttcaagaagagcagaagtgcccaccaagcctcccctgccaccggccaggacacagggcacaccagtgcatctgaactatcgccagaagggcgtgattgacgtcttcctgcatgcatggaaaggataccgcaagtttgcatggggccatgacgagctgaagcctgtgtccaggtccttcagtgagtggtttggcctcggtctcacactgatcgacgcgctggacaccatgtggatcttgggtctgaggaaagaatttgaggaagccaggaagtgggtgtcgaagaagttacactttgaaaaggacgtggacgtcaacctgtttgagagcacgatccgcatcctgggggggctcctgagtgcctaccacctgtctggggacagcctcttcctgaggaaagctgaggattttggaaatcggctaatgcctgccttcagaacaccatccaagattccttactcggatgtgaacatcggtactggagttgcccacccgccacggtggacctccgacagcactgtggccgaggtgaccagcattcagctggagttccgggagctctcccgtctcacaggggataagaagtttcaggtaagggggcaggctttctggctggatgcgcctcccctggagctaccttttgctcatcacagcaggtactgtgtgtgtgtgtgtatgtgcatgtgtgttttcaggttttttactgtgataaaacacacaaaacgcaccaccttaaccatttccaggcgtggtcggtggtgttacattcacg

SEQ ID NO: 151496 - DNA, 2627 bp, Homo sapiens
  Payload ID: 9826
  Gene Symbol: MAN1C1
  Gene Name: mannosidase, alpha, class 1C, member 1
  ENST ID: ENST00000263979
  CDS Start-End: 614-1966
ggctgccgcagaagttcctcttcctcctcttcctctcgggcctggtcaccctgtgcttcggggccctcttcctgctgccccactcctctcgcctcaagcgcctcttcctggccccccggacccagcagcctggtctggaagtggtggctgaaatcgccggccatgccccggcccgcgagcaggagccgcctcccaacccggcccccgccgcgccggccccgggcgaggatgaccccagcagctgggccagtccccgccgcaggaaaggggggctgcggcgcacccgccccactggaccccgcgaggaggccacggcggcccggggcaatagcatcccggcctccaggcccggggacgagggcgtccctttccgctttgacttcaacgcattccggagccgtctccgccacccggtcctgggaacgagggccgatgagagtcaggagccccagagccaagtgcgagcccagcgggagaaaatcaaggagacacagcggtcctggggttgccttccagatgaagatctatcaaagatttgaagtcttgtgtatgtggtcctagaggaccccaggctgttataccgatccatgaggcatctgaccccttccaaaggatgatgcagtttgcttggcagagctataagcgttatgcaatggggaaaaacgaactccgtccactaacaaaagatggctacgagggtaacatgttcggaggcctcagcggggcaacagtcattgactccctcgataccctctacctcatggagctgaaggaggagttccaggaggccaaggcctgggtgggagagagcttccacctgaacgtgagcggagaagcatccttgtttgaggtgaacatccgctacatcgggggactcctctcagccttctacctgacaggagaagaggtgttccgaataaaggccatcaggctgggagagaagctcctgccggcgttcaacacccccacgggaatcccaaagggcgtggtgagcttcaaaagtgggaactggggctgggccacagccggcagcagcagcatcttggcggagtttggatccctgcacttggaattcttacacctcactgaactctctggcaaccaggtcttcgctgaaaaggtcaggaacatccgcaaggtcctcaggaagatcgaaaagccctttggcctctaccccaacttcctcagcccagtgagtgggaactgggtgcaacaccatgtctcagttggaggactcggggacagtttttatgaatatttgatcaaatcctggttgatgtcgggcaagacagatatggaggctaaaaatatgtactacgaagccttggaggcgatagagacctacttgctgaatgtctctcccggggggctgacctacattgccgagtggcgaggggggattctggaccacaagatggggcacctggcctgtttctccgggggcatgatcgcccttggcgccgaggatgccaaggaagaaaagagggcccactaccgagagctcgcagcccagatcaccaagacgtgtcacgagtcatacgcccgctcagacaccaaacttgggcctgaggccttctggtttaactccggcagagaggccgtggccacccagctgagcgagagctactacatcctccggccagaggtggtggagagctacatgtacctgtggcgacagacccacaaccccatctacagggagtggggctgggaggtggtgctggccttggagaaatactgtcggacagaagccggtttctctgggatccaagacgtgtacagtagcacccccaaccacgacaacaagcagcagagcttctttctagcggagacactaaagtatctctatcttctgttctctgaagatgacttgctctccctggaagactgggtgttcaacaccgaggcccacccactcccggtgaaccactcagacagctccggcagagcctggggcagacactgaccccatctcctgccgccgccctggggccgccgcagggatgccttgccttttcaggatttgagactgttctcaaagggattgggaacgaaggccccatctcgggcagacccccagcagatgtgtcggacaagcaacttcttttcctctgtgaggagacaagacttggagactcagcgatgtcaggccagggccatggccacactggcccacacattcctttctacagagaatttctatgaagcccactcacttgccattccagggccaaaggaccggaggtttgcatatccgccccttgtatttgatttgcttccttttggtttcttggtttttgtttttgcttgattttgtcttttctctacagtttagttttgtcacaattacacatatagttttcaaaatcatgcactttctaaaatggtgtcatcctgaaaaacaaaacccagtgtttgcacacacacaaaatcttgaccccgttatctatattttaaatgctttttgcccaacactgaccctatgttcaactttgtgtcatttaccttataatttgaggaggggtttccctttgggcctcagtgttacaaattactagtgctattttcattattattgtaatggaaaaatctgtggactagaataaaagagtttattgaataagaaa

SEQ ID NO: 151497 - DNA, 2461 bp, Homo sapiens
  Payload ID: 9826
  Gene Symbol: MAN1C1
  Gene Name: mannosidase, alpha, class 1C, member 1
  ENST ID: ENST00000374329
  CDS Start-End: 595-1800
gtcctttaagttgcaagggcctggggtggcaggggtagaggaatgcatgaagattcctcaccaatgcctgatactgtcagtcttcgtaacgttagcctttctagcagaaggaaactctatctatctatctatctatctatatttatttattttatttttttgagatggagtctcactcttgtcgcccagactggagtgcagtggcatagtctcggctcactgcaacttctgcctcccgggttcaagcgattctcctgcctcagcctcccgagtagctaggattacaggcgcccgcaaccacgcccagctaatttttgtatttttagtagagacagggtttcactgtgttggccaggctggtctcgaactcctgacctcaggcgatctgcctgccttggcctcccaaagtgctgggattacaggcatgagccactgagcccagctggaaacactatattcttgttgagcccctggaagtttatttatatactcattctgcatttttgttcaatccatactctgctaagcactggagaaaacagaggaggcctcagcggggcaacagtcattgactccctcgataccctctacctcatggagctgaaggaggagttccaggaggccaaggcctgggtgggagagagcttccacctgaacgtgagcggagaagcatccttgtttgaggtgaacatccgctacatcgggggactcctctcagccttctacctgacaggagaagaggtgttccgaataaaggccatcaggctgggagagaagctcctgccggcgttcaacacccccacgggaatcccaaagggcgtggtgagcttcaaaagtgggaactggggctgggccacagccggcagcagcagcatcttggcggagtttggatccctgcacttggaattcttacacctcactgaactctctggcaaccaggtcttcgctgaaaaggtcaggaacatccgcaaggtcctcaggaagatcgaaaagccctttggcctctaccccaacttcctcagcccagtgagtgggaactgggtgcaacaccatgtctcagttggaggactcggggacagtttttatgaatatttgatcaaatcctggttgatgtcgggcaagacagatatggaggctaaaaatatgtactacgaagccttggaggcgatagagacctacttgctgaatgtctctcccggggggctgacctacattgccgagtggcgaggggggattctggaccacaagatggggcacctggcctgtttctccgggggcatgatcgcccttggcgccgaggatgccaaggaagaaaagagggcccactaccgagagctcgcagcccagatcaccaagacgtgtcacgagtcatacgcccgctcagacaccaaacttgggcctgaggccttctggtttaactccggcagagaggccgtggccacccagctgagcgagagctactacatcctccggccagaggtggtggagagctacatgtacctgtggcgacagacccacaaccccatctacagggagtggggctgggaggtggtgctggccttggagaaatactgtcggacagaagccggtttctctgggatccaagacgtgtacagtagcacccccaaccacgacaacaagcagcagagcttctttctagcggagacactaaagtatctctatcttctgttctctgaagatgacttgctctccctggaagactgggtgttcaacaccgaggcccacccactcccggtgaaccactcagacagctccggcagagcctggggcagacactgaccccatctcctgccgccgccctggggccgccgcagggatgccttgccttttcaggatttgagactgttctcaaagggattgggaacgaaggccccatctcgggcagacccccagcagatgtgtcggacaagcaacttcttttcctctgtgaggagacaagacttggagactcagcgatgtcaggccagggccatggccacactggcccacacattcctttctacagagaatttctatgaagcccactcacttgccattccagggccaaaggaccggaggtttgcatatccgccccttgtatttgatttgcttccttttggtttcttggtttttgtttttgcttgattttgtcttttctctacagtttagttttgtcacaattacacatatagttttcaaaatcatgcactttctaaaatggtgtcatcctgaaaaacaaaacccagtgtttgcacacacacaaaatcttgaccccgttatctatattttaaatgctttttgcccaacactgaccctatgttcaactttgtgtcatttaccttataatttgaggaggggtttccctttgggcctcagtgttacaaattactagtgctattttcattattattgtaatggaaaaatctgtggactagaataaaagagtttattgaataagaaa

SEQ ID NO: 151498 - DNA, 4641 bp, Homo sapiens
  Payload ID: 9826
  Gene Symbol: MAN1C1
  Gene Name: mannosidase, alpha, class 1C, member 1
  Uniprot ID: Q9NR34
  ENST ID: ENST00000374332
  CDS Start-End: 331-2223
aaggcgcgggccccggcgcggcggggagggctcggccggaggggaggctgcggcgcgcggccggtcgctgcgggcccgggccccaagccgtgccgctccgctcgcccgggccccgccgaggccgctgcgcccccgcctcctcgcgggaggactcgctccaaactccctgaacttcggggacagtcccccgaagcggcgaaactctcagggttggcaaccctgcccagggacccccatcccgggcggcgctccggacgccctcccctcaccgcgcccccgcagacacgtgcctggactccgagggcttctggagccaccggccgggccacgatgctcatgaggaaagtgcccggcttcgtcccggcctccccgtgggggctgcggctgccgcagaagttcctcttcctcctcttcctctcgggcctggtcaccctgtgcttcggggccctcttcctgctgccccactcctctcgcctcaagcgcctcttcctggccccccggacccagcagcctggtctggaagtggtggctgaaatcgccggccatgccccggcccgcgagcaggagccgcctcccaacccggcccccgccgcgccggccccgggcgaggatgaccccagcagctgggccagtccccgccgcaggaaaggggggctgcggcgcacccgccccactggaccccgcgaggaggccacggcggcccggggcaatagcatcccggcctccaggcccggggacgagggcgtccctttccgctttgacttcaacgcattccggagccgtctccgccacccggtcctgggaacgagggccgatgagagtcaggagccccagagccaagtgcgagcccagcgggagaaaatcaaggagatgatgcagtttgcttggcagagctataagcgttatgcaatggggaaaaacgaactccgtccactaacaaaagatggctacgagggtaacatgttcggaggcctcagcggggcaacagtcattgactccctcgataccctctacctcatggagctgaaggaggagttccaggaggccaaggcctgggtgggagagagcttccacctgaacgtgagcggagaagcatccttgtttgaggtgaacatccgctacatcgggggactcctctcagccttctacctgacaggagaagaggtgttccgaataaaggccatcaggctgggagagaagctcctgccggcgttcaacacccccacgggaatcccaaagggcgtggtgagcttcaaaagtgggaactggggctgggccacagccggcagcagcagcatcttggcggagtttggatccctgcacttggaattcttacacctcactgaactctctggcaaccaggtcttcgctgaaaaggtcaggaacatccgcaaggtcctcaggaagatcgaaaagccctttggcctctaccccaacttcctcagcccagtgagtgggaactgggtgcaacaccatgtctcagttggaggactcggggacagtttttatgaatatttgatcaaatcctggttgatgtcgggcaagacagatatggaggctaaaaatatgtactacgaagccttggaggcgatagagacctacttgctgaatgtctctcccggggggctgacctacattgccgagtggcgaggggggattctggaccacaagatggggcacctggcctgtttctccgggggcatgatcgcccttggcgccgaggatgccaaggaagaaaagagggcccactaccgagagctcgcagcccagatcaccaagacgtgtcacgagtcatacgcccgctcagacaccaaacttgggcctgaggccttctggtttaactccggcagagaggccgtggccacccagctgagcgagagctactacatcctccggccagaggtggtggagagctacatgtacctgtggcgacagacccacaaccccatctacagggagtggggctgggaggtggtgctggccttggagaaatactgtcggacagaagccggtttctctgggatccaagacgtgtacagtagcacccccaaccacgacaacaagcagcagagcttctttctagcggagacactaaagtatctctatcttctgttctctgaagatgacttgctctccctggaagactgggtgttcaacaccgaggcccacccactcccggtgaaccactcagacagctccggcagagcctggggcagacactgaccccatctcctgccgccgccctggggccgccgcagggatgccttgccttttcaggatttgagactgttctcaaagggattgggaacgaaggccccatctcgggcagacccccagcagatgtgtcggacaagcaacttcttttcctctgtgaggagacaagacttggagactcagcgatgtcaggccagggccatggccacactggcccacacattcctttctacagagaatttctatgaagcccactcacttgccattccagggccaaaggaccggaggtttgcatatccgccccttgtatttgatttgcttccttttggtttcttggtttttgtttttgcttgattttgtcttttctctacagtttagttttgtcacaattacacatatagttttcaaaatcatgcactttctaaaatggtgtcatcctgaaaaacaaaacccagtgtttgcacacacacaaaatcttgaccccgttatctatattttaaatgctttttgcccaacactgaccctatgttcaactttgtgtcatttaccttataatttgaggaggggtttccctttgggcctcagtgttacaaattactagtgctattttcattattattgtaatggaaaaatctgtggactagaataaaagagtttattgaataagaaatatgattgggctcattgcacatcagtgactcctagaaaaaccattgcaatgttaccatcagaaataataatcagccagcagttgatttaaggtataatttagtaaacgattccaacttctattacctcccctgaaatcggtcctgatatattcgagaagcatgaggccagcccttcagatgcagttgtttatttatactcaggtttagattgggaagaggcccagggaggagcagcaacttgcctgaggtcacacagcccaaaaaaggcaaaggagagtctcgcccctgccgtctcctggccaccccagttgagtgtccgtctgttccatcattcagcagatgcttggtgagtgcctgcaacggaccagacactgggctagaggccagggacaccgctgagagtgagacagtcataagccctgcagtcaaggggtcaagaggggagaaagcgatggtaagggaaactgacaagtaagtgaagtgactgcaggtcataggaaatgctacaaaggagatagatagacagctgaggacctaccctacggggtcagggagggcctctctgggcaggtgaccttcaagccaagacccagaagataaaaaggagcagccgaaagactatctggcagaagaatgaacttcccataacccagccccctttcccaccctccctgatgccctccctgggagggggcctgaaacactggggctgttgtgcagagcaaggagctcaggtcctaacactgaagtgacagctcttcctcccctgacccttttttttttttgagacccagagtctcgttcagtcgcccaggctggagtgcagtggtgcaatcttggctcactgcaacctccacctcctgggttcaagcagttctcctgcctcagcttccccagtagcagggtgcgtcaccacacccggctaattttttgtatttttagtaaagacgaggttttgccatgttgcctaggctggtcttgaactcctgagctcaggtgatccgcccacctcagcctcccaaagtgcggggattacaggcatgagccaccacacccagtcctttcctggcacatttgcagcttgtcaacacagcggaaatcacgggagaatgttgagcccttccctgggctcagctgcttgctctgttcataagctttaatagcccccggggctctgggccaggtgacccggctttaaatccctgctgtgtgaacttaggcaggtacctcccctctctgggctcttcttttccatcaagcagacagaaaacctcaaccccacaaggttgctgtgagaagaagtgggaagctgctggttccctgggcacaggaagtgcttgttccttgttctggagactcaagacattcccagaatcttcttaagcagagctgctggggagtagcccctgtagcaagtaccatgctcttgacaggcagcatgagagcgtgactcccatgacccacctgtgctcaaaaaaaaaaaaaaaaaaaagcaaaccaggaaaactgactacacaaacattgtagaaagattagaaaatagaagcagaaagaagactcattggccatcccactctctggggtgaatactgttatattttcttctaggcctttttctatgaatatatagaatatagattttgccaccgtggtatcctactatgcacactgttttcttataatctgcttttgcacttaactgtacattgtgaacctctttccatgtcaacaaatacatgtttatctcatcgctgta

SEQ ID NO: 151499 - DNA, 4647 bp, Homo sapiens
  Payload ID: 9826
  Gene Symbol: MAN1C1
  Gene Name: mannosidase, alpha, class 1C, member 1
  ENST ID: ENST00000611903
  CDS Start-End: 961-2049
aaggcgcgggccccggcgcggcggggagggctcggccggaggggaggctgcggcgcgcggccggtcgctgcgggcccgggccccaagccgtgccgctccgctcgcccgggccccgccgaggccgctgcgcccccgcctcctcgcgggaggactcgctccaaactccctgaacttcggggacagtcccccgaagcggcgaaactctcagggttggcaaccctgcccagggacccccatcccgggcggcgctccggacgccctcccctcaccgcgcccccgcagacacgtgcctggactccgagggcttctggagccaccggccgggccacgatgctcatgaggaaagtgcccggcttcgtcccggcctccccgtgggggctgcggctgccgcagaagttcctcttcctcctcttcctctcgggcctggtcaccctgtgcttcggggccctcttcctgctgccccactcctctcgcctcaagcgcctcttcctggccccccggacccagcagcctggtctggaagtggtggctgaaatcgccggccatgccccggcccgcgagcaggagccgcctcccaacccggcccccgccgcgccggccccgggcgaggatgaccccagcagctgggccagtccccgccgcaggaaaggggggctgcggcgcacccgccccactggaccccgcgaggaggccacggcggcccggggcaatagcatcccggcctccaggcccggggacgagggcgtccctttccgctttgacttcaacgcattccggagccgtctccgccacccggtcctgggaacgagggccgatgagagtcaggagccccagagccaagtgcgagcccagcgggagaaaatcaaggagatgatgcagtttgcttggcagagctataagcgttatgcaatggggaaaaacgaactccgtccactaacaaaagatggctacgagggtaacatgttcggaggcctcagcggggcaacagtcattgactccctcgataccctctacctcatggagctgaaggaggagttccaggaggccaaggcctgggtgggagagagcttccacctgaacgtgagcggagaagcatccttgtttgaggtgaacatccgctacatcgggggactcctctcagccttctacctgacaggagaagaggtgttccgaataaaggccatcaggctgggagagaagctcctgccggcgttcaacacccccacgggaatcccaaagggcgtggtgagcttcaaaagtgggaactggggctgggccacagccggcagcagcagcatcttggcggagtttggatccctgcacttggaattcttacacctcactgaactctctggcaaccaggtcttcgctgaaaaggcaacagtcaggaacatccgcaaggtcctcaggaagatcgaaaagccctttggcctctaccccaacttcctcagcccagtgagtgggaactgggtgcaacaccatgtctcagttggaggactcggggacagtttttatgaatatttgatcaaatcctggttgatgtcgggcaagacagatatggaggctaaaaatatgtactacgaagccttggaggcgatagagacctacttgctgaatgtctctcccggggggctgacctacattgccgagtggcgaggggggattctggaccacaagatggggcacctggcctgtttctccgggggcatgatcgcccttggcgccgaggatgccaaggaagaaaagagggcccactaccgagagctcgcagcccagatcaccaagacgtgtcacgagtcatacgcccgctcagacaccaaacttgggcctgaggccttctggtttaactccggcagagaggccgtggccacccagctgagcgagagctactacatcctccggccagaggtggtggagagctacatgtacctgtggcgacagacccacaaccccatctacagggagtggggctgggagggtcaaggtggccttggagaaatactgtcggacagaagccggtttctctgggatccaagacgtgtacagtagcacccccaaccacgacaacaagcagcagagcttctttctagcggagacactaaagtatctctatcttctgttctctgaagatgacttgctctccctggaagactgggtgttcaacaccgaggcccacccactcccggtgaaccactcagacagctccggcagagcctggggcagacactgaccccatctcctgccgccgccctggggccgccgcagggatgccttgccttttcaggatttgagactgttctcaaagggattgggaacgaaggccccatctcgggcagacccccagcagatgtgtcggacaagcaacttcttttcctctgtgaggagacaagacttggagactcagcgatgtcaggccagggccatggccacactggcccacacattcctttctacagagaatttctatgaagcccactcacttgccattccagggccaaaggaccggaggtttgcatatccgccccttgtatttgatttgcttccttttggtttcttggtttttgtttttgcttgattttgtcttttctctacagtttagttttgtcacaattacacatatagttttcaaaatcatgcactttctaaaatggtgtcatcctgaaaaacaaaacccagtgtttgcacacacacaaaatcttgaccccgttatctatattttaaatgctttttgcccaacactgaccctatgttcaactttgtgtcatttaccttataatttgaggaggggtttccctttgggcctcagtgttacaaattactagtgctattttcattattattgtaatggaaaaatctgtggactagaataaaagagtttattgaataagaaatatgattgggctcattgcacatcagtgactcctagaaaaaccattgcaatgttaccatcagaaataataatcagccagcagttgatttaaggtataatttagtaaacgattccaacttctattacctcccctgaaatcggtcctgatatattcgagaagcatgaggccagcccttcagatgcagttgtttatttatactcaggtttagattgggaagaggcccagggaggagcagcaacttgcctgaggtcacacagcccaaaaaaggcaaaggagagtctcgcccctgccgtctcctggccaccccagttgagtgtccgtctgttccatcattcagcagatgcttggtgagtgcctgcaacggaccagacactgggctagaggccagggacaccgctgagagtgagacagtcataagccctgcagtcaaggggtcaagaggggagaaagcgatggtaagggaaactgacaagtaagtgaagtgactgcaggtcataggaaatgctacaaaggagatagatagacagctgaggacctaccctacggggtcagggagggcctctctgggcaggtgaccttcaagccaagacccagaagataaaaaggagcagccgaaagactatctggcagaagaatgaacttcccataacccagccccctttcccaccctccctgatgccctccctgggagggggcctgaaacactggggctgttgtgcagagcaaggagctcaggtcctaacactgaagtgacagctcttcctcccctgacccttttttttttttgagacccagagtctcgttcagtcgcccaggctggagtgcagtggtgcaatcttggctcactgcaacctccacctcctgggttcaagcagttctcctgcctcagcttccccagtagcagggtgcgtcaccacacccggctaattttttgtatttttagtaaagacgaggttttgccatgttgcctaggctggtcttgaactcctgagctcaggtgatccgcccacctcagcctcccaaagtgcggggattacaggcatgagccaccacacccagtcctttcctggcacatttgcagcttgtcaacacagcggaaatcacgggagaatgttgagcccttccctgggctcagctgcttgctctgttcataagctttaatagcccccggggctctgggccaggtgacccggctttaaatccctgctgtgtgaacttaggcaggtacctcccctctctgggctcttcttttccatcaagcagacagaaaacctcaaccccacaaggttgctgtgagaagaagtgggaagctgctggttccctgggcacaggaagtgcttgttccttgttctggagactcaagacattcccagaatcttcttaagcagagctgctggggagtagcccctgtagcaagtaccatgctcttgacaggcagcatgagagcgtgactcccatgacccacctgtgctcaaaaaaaaaaaaaaaaaaaagcaaaccaggaaaactgactacacaaacattgtagaaagattagaaaatagaagcagaaagaagactcattggccatcccactctctggggtgaatactgttatattttcttctaggcctttttctatgaatatatagaatatagattttgccaccgtggtatcctactatgcacactgttttcttataatctgcttttgcacttaactgtacattgtgaacctctttccatgtcaacaaatacatgtttatctcatcgctgt

SEQ ID NO: 151500 - DNA, 4667 bp, Homo sapiens
  Payload ID: 9827
  Gene Symbol: MAN2A1
  Gene Name: mannosidase, alpha, class 2A, member 1
  Uniprot ID: Q16706
  ENST ID: ENST00000261483
  CDS Start-End: 1053-4487
ggcggggccagccgcccgctcggctcaggcgctgcgggcgcctattgacccagcggctgctgcgccgccgctgtctcctcctgctcgtggcgggcggtgctggagcgccaagtggcgctggagaaccggcgcttcctttcgccgcttccgccgccatctccgcgtttgtggggcgggaaagagggagggggctagcggctgcagctggagcgggcttctctccggggacggtcctttcctccctgctctccttttccttctttccgcgttgccgccgcccgccccctgcgcctccccgcggagcctgggtccgggagggggaaggtaggggcggcggggggcgggagagtctggcgagcggacgctagctctgaggaaactcatcaatccgtgagccccggagtccggggtgcacatcggcccagccgcagcgtcggcggcggcggcggcagcagcacgaaggggctcagtcggggtaggcgggggcggtgccggtgccgcgggggcgggcccgaccgtcccgcccagaagttgtagggcttggctcctcgcgatcttgttcctttcccctccgcttctctgacctagctgcgcggccccggcccgggagctgccgaacccgcgcctcccctgggtgaggaggacacgcctgccctcgtcgagaaaacttttcctgccgactcagttggggcggcggtggcaggaagtgcgggcagcgacctctcctccgcctgccccgcgcgccctgccggaggtcggcgctgagcttgcgatcaagtttgtgggggccccccttcccagttgccggcgagtctcgcctcgagaggggcgcccgaccccggggagggcggcaggccagggcgaaggccaagggcgtgtggtggcgccggagactaggtgcggagcaaggcggggactcgcacccgcatccgagagcgcggaggtcgcgcagcccgggagaagggagcctccggcggctgcttcctagagtccacagtgcgctgtctcctttggctgaggagagtgtcctggccccgagtctatcgaggaaaatgaagttaagccgccagttcaccgtgttcggcagtgcgatcttctgtgtggtgattttctcgctctacctgatgctggaccggggtcacttagactaccccaggaacccgcgccgcgagggctccttccctcagggccagctctcaatgttgcaagaaaaaatagaccatttggagcgtttgctagctgagaataatgagatcatctcaaatattagagactcagtcatcaatttgagtgagtctgtggaggatggtccgaaaagttcacaaagcaatttcagccaaggtgctggctcacatcttctgccctcacaattatccctctcagttgacactgcagactgtctgtttgcttcacaaagtggaagtcacaattcagatgtgcagatgttggatgtttacagtctaatttcttttgacaatccagatggtggagtttggaagcaaggatttgacattacttatgaatctaatgaatgggacactgaaccccttcaagtctttgtggtgcctcattcccataacgacccaggttggttgaagactttcaatgactactttagagacaagactcagtatatttttaataacatggtcctaaagctgaaagaagactcacggaggaagtttatttggtctgagatctcttacctttcaaagtggtgggatattatagatattcagaagaaggatgctgttaaaagtttaatagaaaatggtcagcttgaaattgtgacaggtggctgggttatgcctgatgaagctactccacattattttgccttaattgatcaactaattgaaggacatcagtggctggaaaataatataggagtgaaacctcggtccggctgggctattgatccctttggacactcaccaacaatggcttatcttctaaaccgtgctggactttctcacatgcttatccagagagttcattatgcagttaaaaaacactttgcactgcataaaacattggagtttttttggagacagaattgggatctgggatctgtcacagatattttatgccacatgatgcccttctacagctatgacatccctcacacttgtggacctgatcctaaaatatgctgccagtttgattttaaacgtcttcctggaggcagatttggttgtccctggggagtccccccagaaacaatacatcctggaaatgtccaaagcagggctcggatgctactagatcagtaccgaaagaagtcaaagctttttcgtaccaaagttctcctggctccactaggagatgatttccgctactgtgaatacacggaatgggatttacagtttaagaattatcagcagctttttgattatatgaattctcagtccaagtttaaagttaagatacagtttggaactttatcagatttttttgatgcgctggataaagcagatgaaactcagagagacaagggccaatcgatgttccctgttttaagtggagattttttcacttatgccgatcgagatgatcattactggagtggctattttacatccagacccttttacaaacgaatggacagaatcatggaatctcatttaagggctgctgaaattctttactatttcgccctgagacaagctcacaaatacaagataaataaatttctctcatcatcactttacacggcactgacagaagccagaaggaatttgggactgtttcaacatcatgatgctatcacaggaactgcaaaagactgggtggttgtggattatggtaccagactttttcattcgttaatggttttggagaagataattggaaattctgcatttcttcttattttgaaggacaaactcacatacgactcttactctcctgataccttcctggagatggatttgaaacaaaaatcacaagattctctgccacaaaaaaatataataaggctgagtgcggagccaaggtaccttgtggtctataatcctttagaacaagaccgaatctcgttggtctcagtctatgtgagttccccgacagtgcaagtgttctctgcttcaggaaaacctgtggaagttcaagtcagcgcagtttgggatacagcaaatactatttcagaaacagcctatgagatctcttttcgagcacatataccgccattgggactgaaagtgtataagattttggaatcagcaagttcaaattcacatttagctgattatgtcttgtataagaataaagtagaagatagcggaattttcaccataaagaatatgataaatactgaagaaggtataacactagagaactcctttgttttacttcggtttgatcaaactggacttatgaagcaaatgatgactaaagaagatggtaaacaccatgaagtaaatgtgcaattttcatggtatggaaccacaattaaaagagacaaaagtggtgcctacctcttcttacctgatggtaatgccaagccttatgtttacacaacaccgccctttgtcagagtgacacatggaaggatttattcggaagtgacttgcttttttgaccatgttactcatagagtccgactataccacatacagggaatagaaggacagtctgtggaagtttccaatattgtggacatccgaaaagtatataaccgtgagattgcaatgaaaatttcttctgatataaaaagccaaaatagattttatactgacctaaatgggtaccagattcaacctagaatgacactgagcaaattgcctcttcaagcaaatgtctatcccatgaccacaatggcctatatccaggatgccaaacatcgtttgacactgctctctgctcagtcattaggggtttcgagtttgaatagtggtcagattgaagttatcatggatcgaagactcatgcaagatgataatcgtggccttgagcaaggtatccaggataacaagattacagctaatctatttcgaatactactagaaaaaagaagtgctgttaatacggaagaagaaaagaagtcggtcagttatccttctctccttagccacataacttcttctctcatgaatcatccagtcattccaatggcaaataagttctcctcacctacccttgagctgcaaggtgaattctctccattacagtcatctttgccttgtgacattcatctggttaatttgagaacaatacagtcaaaggtgggcaatgggcactccaatgaggcagccttgatcctccacagaaaagggtttgattgtcggttctctagcaaaggcacagggctgttttgttctactactcagggaaagatattggtacagaaacttttaaacaagtttattgtcgaaagtctcacaccttcatcactatccttgatgcattcacctcccggcactcagaatataagtgagatcaacttgagtccaatggaaatcagcacattccgaatccagttgaggtgaacctgactttcacatttggattgagaatcattggcttttatacctttcttggtttgacgtgcaataaagaagcacattattttagcttctggctactgtgagaacatgaattctgtgattctgtgggttttttcttttttcttttaccagtacagtaagaaaaaaaaaaaaaaaaaaaaa

SEQ ID NO: 151501 - DNA, 6268 bp, Homo sapiens
  Payload ID: 9828
  Gene Symbol: MAN2A2
  Gene Name: mannosidase, alpha, class 2A, member 2
  Uniprot ID: P49641
  ENST ID: ENST00000360468
  CDS Start-End: 19-3471
gtgtgtgtggaggccagtatgaagctgaaaaagcaggtgacagtgtgtggggctgccatcttctgtgtggcagtcttctcgctctacctcatgctggaccgagtgcaacacgatcccacccgacaccagaatggtgggaacttcccccggagccaaatttctgtgctgcagaaccgcattgagcagctggagcagcttttggaggagaaccatgagattatcagccatatcaaggactccgtgctggagctgacagccaacgcagagggcccgcccgccatgctgccctactacacggtcaatggctcctgggtggtgccaccggagccccggcccagcttcttctccatctccccgcaggactgccagtttgctttggggggccggggtcagaagccagagctgcagatgctcactgtgtcggaggagctgccgtttgacaacgtggatggtggtgtgtggaggcaaggcttcgacatctcctacgacccgcacgactgggatgctgaagacctgcaggtgtttgtggtgccccactctcacaatgacccaggctggatcaagacctttgacaagtactacacagagcagacccaacacatcctcaatagcatggtgtctaagctgcaggaggacccccggcggcgcttcctctgggcagaggtctccttcttcgccaagtggtgggacaacatcaatgtccaaaagagagcggcagtccgaaggctggtgggaaacgggcagctggagattgcgacaggaggctgggtgatgccagatgaggccaattcccactactttgcattgattgaccagctcatcgaaggacaccagtggctggagagaaatcttggtgcaaccccccgctctggctgggcagtggacccctttggatacagctccaccatgccttacctgctgcgccgtgccaacctcaccagcatgctgattcagagagtgcactatgccatcaagaagcactttgctgccacccacagcctagagttcatgtggaggcagacatgggactcggactccagcacagacatcttctgtcacatgatgcccttctacagctatgacgtcccccatacctgtggcccagatcccaagatctgctgccaatttgatttcaaacgcctgcctggtgggcgcatcaactgcccttggaaggtgccaccccgggccatcacagaggccaacgtggcagagagggcagccctgcttctggaccaataccggaagaagtcccagctgttccgaagcaacgtcctcctggtgcctcttggagatgacttccgatatgacaagccccaggagtgggatgcccagttcttcaactaccaacggctctttgacttcttcaacagcaggcctaacctccatgtgcaggcccagtttggcactctttctgactattttgatgccctgtacaagaggacaggggtggagccaggggcccggcctccagggtttcctgtgctgagcggggatttcttctcctatgcggaccgggaggatcattactggacaggctattacacttcccggcccttctacaagagcttagaccgagtcctggaagcccacctgcggggggcagaggttctgtacagcctggctgcagctcacgctcgccgctctggtctggctggccggtacccactgtctgatttcaccctcctgacggaagctcggcgcacattggggctcttccagcatcacgatgccatcactggcacggccaaggaggctgtggtggtggactatggggtcaggcttctgcgctcccttgtcaacctgaagcaggtcatcattcatgcagcccactatctggtgctgggggacaaggagacctaccactttgaccctgaggcgcccttcctccaagtggatgacactcgcttaagtcacgacgccctcccagagcgcacggtgatccagctggattcctcgcccaggtttgtggtcctattcaacccactggaacaggagcgattcagcatggtgtccctgctggtcaactctccccgcgtgcgtgtcctttcggaggagggtcagcccctggccgtgcagatcagcgcacactggagctctgccaccgaggcggtccctgacgtctaccaggtgtctgtgcctgtccgcctgccagccctgggcctgggcgtgctgcagctacagctgggcctggatgggcaccgcacgctgccctcctctgtgcgcatctacctgcacggccggcagctgtccgtcagcaggcacgaagcgtttcctctccgtgtcattgactctggcaccagcgacttcgccctcagcaaccgctacatgcaggtctggttctcaggccttactgggctcctcaagagcatccgaagggtggatgaggagcacgagcagcaggtggacatgcaggtccttgtctatggcacccgtacgtccaaagacaagagtggagcctacctcttcctgcccgatggcgaggccaagccctacgtccccaaggagccccccgtgctgcgtgtcactgaaggccctttcttctcagaggtggttgcgtactatgagcacattcaccaggcggtccggctttacaatctgccaggggtggaggggctgtctctggacatatcatccctggtggacatccgggactacgtcaacaaggagctggccctgcacatccatacagacatcgacagccagggtatcttcttcacagacctcaatggctttcaggtgcagccccgacggtatctgaagaagctccccctccaggccaacttctaccccatgccagtcatggcctatatccaggacgcacagaagcgcctcacgctgcacactgcccaggccctgggtgtctctagcctcaaagatggccagctggaggtgatcttggaccggcggctgatgcaggatgacaaccggggcctaggccaagggctcaaggacaacaagagaacctgcaaccgtttccgcctcctgctagagcggcgaaccgtgggcagtgaggtccaagatagccactctaccagctacccatccctcctcagccacctgacctccatgtacctgaacgccccggcgctcgctctgcctgtagccaggatgcagctcccaggccctggtctgcgctcatttcatcctctggcttcctcactgccctgtgacttccacctgctcaacctacgtacgctccaggctgaggaggacaccctaccctcggcggagaccgcactcatcttacaccgcaagggttttgactgcggcctggaggccaagaacttgggcttcaactgcaccacaagccaaggcaaggtagccctgggcagccttttccatggcctggatgtggtattccttcagccaacctccttgacgttactgtaccctctggcctccccgtccaacagcactgacgtctatttggagcccatggagattgctacctttcgcctccgcttgggttagggcttcttgtggcctgaagagaaagttcattcacagagactgcctcttaacatgaagatcattggacaagccacacgggtatcccatcccgatctgcctcccagaactgtgacacactgggctctgccctcattttctgtttattgctgctgctgtgttttcggcgcaacccacaaacccagtgatgggtaaatagggcagacgccagtgagatcagggagagaaggcccttggtcagagtgggcagtgccaggctctgctttgggttgtgagtggacacccaactgggcacaggctcaggcacccatcctttttccaaacagggatatagaagtggtggaagcagacagaagaggtaagggaggctaagtgggtaacagcccagcatcagggtcactgtggcaacagcaggctctaggggaatcctgtggttatgtagagactccatgtcctggtgtgatgagcaggatcagagtgactctgggaggacaggggtggggacccagagttagcagtggggatggagcagtagaaggaatcactgtttctcctaggagtctgaaggcctcgctgctttctgtgatggctttgcagtaagtgccgcctggcctgcatgcattggctaacaggctgcagaatggcaggaaggactcgctagagattgtcatggccagagatcataggtcacttcaggtagcaagacccctggcaaactgggcacttggcctatgtactgatttgtgggatggtggcaggggtgtggggtccttcaccctgcctgaattctctttggcttctgtgctctgtatgctgctgtccccaagggctctttcttattatggcagggagtggggattggtcctactttctttctctggaaaggaaagcctccaagactccatgtgcttgggcagcttgagaaggcgttcagcaccacgcctagcaggcagaccttgaagcctcacctttagtctatctgcagaggtattcagttcctggcacaggggactaggggcatgtagagtatatgaggaggcagtatggctgtgcaggagccttcatttcagcttcaattaatagggaagaatttatgatagctctatagatgctgaaaaggtatttcgtaagatttaaaatccatcccttattaaaactcttagtaaattaagtctggaaagaaacaccctaatctagataaaggtctgtttcagaaaccaacagtgatggcattctaaagagtcagacgccacaggcattcccattaaagtcagaaactagccaagggcaagctattattcagcagtgtcccggcactactaacccctgcaacaagccagatgaggaacataaggaagaattataattgtcattatttgtagacaataaaactgcctacctgtaaaacctaagaatcaactgaagacctgttaagagtattctgtaagtcaacccaatgatacacatcatgttcctgtccacatactggttttccccaaatcagctgataaattcagtgtaattccaatgagattgaaactttggaattgacagttctaaagtgcatttgggagagtgaatgtgtgagaacactaagaccactctgaacgatgataatgagttggggggtggactgctcgggggtgatcctgccagattcccagaggattctcacgccaccattacctcactcagtgtgacctggagggggtcagacagacgggagagtccagaaacagacccagggctacaggaatttagtatatggtaagagggatgttttaagtggggaaaaaggtggattatttaataaacagcacttttagacaactagctatcaaagctagatctcagctgggtgcgatggctcacgcctgtaatcccggcactttgggaggccaaggtgggtggatcacttgaggtcaggagttcgagaccagcctggccaagatggcgaaaccctgtgtctactaaaaatacaaaaactagccaggaatggtggcgcgcgcctgtaatcccagttacttaggaggctgaggcaggagaatcacatcaacctgggaggcggaggttgcagtgagcttagatcatgccaccatgccactgcactccagcctgggtgacacagccaaaaaaaaaaccactaagttagatctctacctcacagtgtccatacaaattagttccagagggaagatataccacaaaattactcaaaaatttttatacctctggtgtgggacggtcttttctaaactttaacatgagacttaaaagatataataagggaaaagataagcagatttcgcaaccaaaaaatatcgaaagtctctgtgtgatggaaaacatcaaggttaaaacacaaatgacagatatggaagaaaatatttgcagcacataaaaaaatcaacgagtacaattactttaggagaaaagcttgcttcagggtccttagagaaagtcactggggcctgccaagctgccacctaaagacaagagtgagagggctgagttcttccaggtcatcagagttgttgctgcccgtattaggccacacagtggaaccccatttatatcatagcagaagaaataggattatcaatgtgaactgcttagcatggtgcctggtatatacgagagctccacaaatgtgagctataatcctactagtaaaggatgctaagcagttccactgtggcaggtgtcatttgctagtagaatttgtaatcaaacaataggaggggaatctgtgaacgcctagaaaatgagcagaataaaggatattatctttggaagtctt

SEQ ID NO: 151502 - DNA, 4918 bp, Homo sapiens
  Payload ID: 9828
  Gene Symbol: MAN2A2
  Gene Name: mannosidase, alpha, class 2A, member 2
  ENST ID: ENST00000558161
  CDS Start-End: 69-2459
ggcagctcggccgactgggcccggagcggcgcggaggccgggcgctgacggtgtgtgtggaggccagtatgaagctgaaaaagcaggtgacagtgtgtggggctgccatcttctgtgtggcagtcttctcgctctacctcatgctggaccgagtgcaacacgatcccacccgacaccagaatggtgggaacttcccccggagccaaatttctgtgctgcagaaccgcattgagcagctggagcagcttttggaggagaaccatgagattatcagccatatcaaggactccgtgctggagctgacagccaacgcagagggcccgcccgccatgctgccctactacacggtcaatggctcctgggtggtgccaccggagccccggcccagcttcttctccatctccccgcaggactgccagtttgctttggggggccggggtcagaagccagagctgcagatgctcactgtgtcggaggagctgccgtttgacaacgtggatggtggtgtgtggaggcaaggcttcgacatctcctacgacccgcacgactgggatgctgaagacctgcaggtgtttgtggtgccccactctcacaatgacccaggctggatcaagacctttgacaagtactacacagagcagacccaacacatcctcaatagcatggtgtctaagctgcaggaggacccccggcggcgcttcctctgggcagaggtctccttcttcgccaagtggtgggacaacatcaatgtccaaaagagagcggcagtccgaaggctggtgggaaacgggcagctggagattgcgacaggaggctgggtgatgccagatgaggccaattcccactactttgcattgattgaccagctcatcgaaggacaccagtggctggagagaaatcttggtgcaaccccccgctctggctgggcagtggacccctttggatacagctccaccatgccttacctgctgcgccgtgccaacctcaccagcatgctgattcagagagtgcactatgccatcaagaagcactttgctgccacccacagcctagagttcatgtggaggcagacatgggactcggactccagcacagacatcttctgtcacatgatgcccttctacagctatgacgtcccccatacctgtggcccagatcccaagatctgctgccaatttgatttcaaacgcctgcctggtgggcgcatcaactgcccttggaaggtgccaccccgggccatcacagaggccaacgtggcagagagggcagccctgcttctggaccaataccggaagaagtcccagctgttccgaagcaacgtcctcctggtgcctcttggagatgacttccgatatgacaagccccaggagtgggatgcccagttcttcaactaccaacggctctttgacttcttcaacagcaggcctaacctccatgtgcaggcccagtttggcactctttctgactattttgatgccctgtacaagaggacaggggtggagccaggggcccggcctccagggtttcctgtgctgagcggggatttcttctcctatgcggaccgggaggatcattactggacaggctattacacttcccggcccttctacaagagcttagaccgagtcctggaagcccacctgcggggggcagaggttctgtacagcctggctgcagctcacgctcgccgctctggtctggctggccggtacccactgtctgatttcaccctcctgacggaagctcggcgcacattggggctcttccagcatcacgatgccatcactggcacggccaaggaggctgtggtggtggactatggggtcaggcttctgcgctcccttgtcaacctgaagcaggtcatcattcatgcagcccactatctggtgctgggggacaaggagacctaccactttgaccctgaggcgcccttcctccaagtggatgacactcgcttaagtcacgacgccctcccagagcgcacggtgatccagctggattcctcgcccaggtttgtggtcctattcaacccactggaacaggagcgattcagcatggtgtccctgctggtcaactctccccgcgtgcgtgtcctttcggaggagggtcagcccctggccgtgcagatcagcgcacactggagctctgccaccgaggcggtccctgacgtctaccaggtgtctgtgcctgtccgcctgccagccctgggcctgggcgtgctgcagctacagctgggcctggatgggcaccgcacgctgccctcctctgtgcgcatctacctgcacggccggcagctgtccgtcagcaggcacgaagcgtttcctctccgtgtcattgactctggcaccagcgacttcgccctcagcaaccgctacatgcaggtctggttctcaggccttactgggctcctcaaggggtcagggctgtgttttttggcagagcatccgaagggtggatgaggagcacgagcagcaggtggacatgcaggtccttgtctatggcacccgtacgtccaaagacaagagtggagcctacctcttcctgcccgatggcgaggccaagccctacgtccccaaggagccccccgtgctgcgtgtcactgaaggccctttcttctcagaggtggttgcgtactatgagcacattcaccaggcggtccggctttacaatctgccaggggtggaggggctgtctctggacatatcatccctggtggacatccgggactacgtcaacaaggagctggccctgcacatccatacagacatcgacagccagggtgcagccccgacggtatctgaagaagctccccctccaggccaacttctaccccatgccagtcatggcctatatccaggacgcacagaagcgcctcacgctgcacactgcccaggccctgggtgtctctagcctcaaagatggccagctggaggtgatcttggaccggcggctgatgcaggatgacaaccggggcctaggccaagggctcaaggacaacaagagaacctgcaaccgtttccgcctcctgctagagcggcgaaccgtgggcagtgaggtccaagatagccactctaccagctacccatccctcctcagccacctgacctccatgtacctgaacgccccggcgctcgctctgcctgtagccaggatgcagctcccaggccctggtctgcgctcatttcatcctctggcttcctcactgccctgtgacttccacctgctcaacctacgtacgctccaggctgaggaggacaccctaccctcggcggagaccgcactcatcttacaccgcaagggttttgactgcggcctggaggccaagaacttgggcttcaactgcaccacaagccaaggcaaggtagccctgggcagccttttccatggcctggatgtggtattccttcagccaacctccttgacgttactgtaccctctggcctccccgtccaacagcactgacgtctatttggagcccatggagattgctacctttcgcctccgcttgggttagggcttcttgtggcctgaagagaaagttcattcacagagactgcctcttaacatgaagatcattggacaagccacacgggtatcccatcccgatctgcctcccagaactgtgacacactgggctctgccctcattttctgtttattgctgctgctgtgttttcggcgcaacccacaaacccagtgatgggtaaatagggcagacgccagtgagatcagggagagaaggcccttggtcagagtgggcagtgccaggctctgctttgggttgtgagtggacacccaactgggcacaggctcaggcacccatcctttttccaaacagggatatagaagtggtggaagcagacagaagaggtaagggaggctaagtgggtaacagcccagcatcagggtcactgtggcaacagcaggctctaggggaatcctgtggttatgtagagactccatgtcctggtgtgatgagcaggatcagagtgactctgggaggacaggggtggggacccagagttagcagtggggatggagcagtagaaggaatcactgtttctcctaggagtctgaaggcctcgctgctttctgtgatggctttgcagtaagtgccgcctggcctgcatgcattggctaacaggctgcagaatggcaggaaggactcgctagagattgtcatggccagagatcataggtcacttcaggtagcaagacccctggcaaactgggcacttggcctatgtactgatttgtgggatggtggcaggggtgtggggtccttcaccctgcctgaattctctttggcttctgtgctctgtatgctgctgtccccaagggctctttcttattatggcagggagtggggattggtcctactttctttctctggaaaggaaagcctccaagactccatgtgcttgggcagcttgagaaggcgttcagcaccacgcctagcaggcagaccttgaagcctcacctttagtctatctgcagaggtattcagttcctggcacaggggactaggggcatgtagagtatatgaggaggcagtatggctgtgcaggagccttcatttcagcttcaattaatagggaagaatttatgatagctctatagatgctgaaaaggtatttcgtaagatttaaaatccatcccttattaaaactcttagtaaattaagtctggaaagaaacaccctaatctagataaaggtctgtttcagaaaccaacagtgatggcattctaaagagtcagacgccacaggcattcccattaaagtcagaaactagccaagggcaagctattattcagcagtgtcccggcactactaacccctgcaacaagccagatgaggaacataaggaagaattataattgtcattatttgtagacaataaaactgcctacctgtaaaa

SEQ ID NO: 151503 - DNA, 624 bp, Homo sapiens
  Payload ID: 9828
  Gene Symbol: MAN2A2
  Gene Name: mannosidase, alpha, class 2A, member 2
  ENST ID: ENST00000558853
  CDS Start-End: 473-624
aaacagccaagaaaagtctgtgtcttgttcactcgctggcaggaaacatagagcaggcacggaaaggaaagggactcgaggaatgcgctgtaccgacaggaggcagcacccctttgcccgaggggcgcaacgacagagacctaaggctacctgggccggagccgggtgaggccgcggagaacgcaccccgctacgcgtctgccgagacggaggcgggcgtttcgaccactgcccgatcatgcgcttactcaactccacccacattggcctagacccagtctctaagggctgaaaatattgcccggaagctcccgagcagaatcagatcgcgctaagtagggcacaacgcagaggcgacaaagctcctcggccccagggcccgcggagcagactccggagcgcggtcccgcccacgctcggctccgcagttagcgtcctccttcctcctgagcaggtgtgtgtggaggccagtatgaagctgaaaaagcaggtgacagtgtgtggggctgccatcttctgtgtggcagtcttctcgctctacctcatgctggaccgagtgcaacacgatcccacccgacaccagaatggtgggaacttcccccggagccaaatttctgtgctgca

SEQ ID NO: 151504 - DNA, 1443 bp, Homo sapiens
  Payload ID: 9828
  Gene Symbol: MAN2A2
  Gene Name: mannosidase, alpha, class 2A, member 2
  ENST ID: ENST00000561448
  CDS Start-End: 1-1081
gtttcctctccgtgtcattgactctggcaccagcgacttcgccctcagcaaccgctacatgcaggtctggttctcaggccttactgggctcctcaagccctacgtccccaaggagccccccgtgctgcgtgtcactgaaggccctttcttctcagaggtggttgcgtactatgagcacattcaccaggcggtccggctttacaatctgccaggggtggaggggctgtctctggacatatcatccctggtggacatccgggactacgtcaacaaggagctggccctgcacatccatacagacatcgacagccagggtatcttcttcacagacctcaatggctttcaggtgcagccccgacggtatctgaagaagctccccctccaggccaacttctaccccatgccagtcatggcctatatccaggacgcacagaagcgcctcacgctgcacactgcccaggccctgggtgtctctagcctcaaagatggccagctggaggtgatcttggaccggcggctgatgcaggatgacaaccggggcctaggccaagggctcaaggacaacaagagaacctgcaaccgtttccgcctcctgctagagcggcgaaccgtgggcagtgaggtccaagatagccactctaccagctacccatccctcctcagccacctgacctccatgtacctgaacgccccggcgctcgctctgcctgtagccaggatgcagctcccaggccctggtctgcgctcatttcatcctctggcttcctcactgccctgtgacttccacctgctcaacctacgtacgctccaggctgaggaggacaccctaccctcggcggagaccgcactcatcttacaccgcaagggttttgactgcggcctggaggccaagaacttgggcttcaactgcaccacaagccaaggcaaggtagccctgggcagccttttccatggcctggatgtggtattccttcagccaacctccttgacgttactgtaccctctggcctccccgtccaacagcactgacgtctatttggagcccatggagattgctacctttcgcctccgcttgggttagggcttcttgtggcctgaagagaaagttcattcacagagactgcctcttaacatgaagatcattggacaagccacacggggatatagaagtggtggaagcagacagaagaggtaagggaggctaagtgggtaacagcccagcatcagggtcactgtggcaacagcaggctctaggggaatcctgtggttatgtagagactccatgtcctggtgtgatgagcaggatcagagtgactctgggaggacaggggtggggacccagagttagcagtggggatggagcagtagaaggaatcactgtttctcctaggagtctgaaggcctcgctgctttctgtgatggctttgcagtaagtgccgcctg

SEQ ID NO: 151505 - DNA, 988 bp, Homo sapiens
  Payload ID: 9828
  Gene Symbol: MAN2A2
  Gene Name: mannosidase, alpha, class 2A, member 2
  ENST ID: ENST00000560616
  CDS Start-End: 1-988
tcccaagatctgctgccaatttgatttcaaacgcctgcctggtgggcgcatcaactgcccttggaaggtgccaccccgggccatcacagaggccaacgtggcagagagggcagccctgcttctggaccaataccggaagaagtcccagctgttccgaagcaacgtcctcctggtgcctcttggagatgacttccgatatgacaagccccaggagtgggatgcccagttcttcaactaccaacggctctttgacttcttcaacagcaggcctaacctccatgtgcaggggggcagaggttctgtacagcctggctgcagctcacgctcgccgctctggtctggctggccggtacccactgtctgatttcaccctcctgacggaagctcggcgcacattggggctcttccagcatcacgatgccatcactggcacggccaaggaggctgtggtggtggactatggggtcaggcttctgcgctcccttgtcaacctgaagcaggtcatcattcatgcagcccactatctggtgctgggggacaaggagacctaccactttgaccctgaggcgcccttcctccaagtggatgacactcgcttaagtcacgacgccctcccagagcgcacggtgatccagctggattcctcgcccaggtttgtggtcctattcaacccactggaacaggagcgattcagcatggtgtccctgctggtcaactctccccgcgtgcgtgtcctttcggaggagggtcagcccctggccgtgcagatcagcgcacactggagctctgccaccgaggcggtccctgacgtctaccaggtgtctgtgcctgtccgcctgccagccctgggcctgggcgtgctgcagctacagctgggcctggatgggcaccgcacgctgccctcctctgtgcgcatctacctgcacggccggcagctgtccgtcagcaggcacgaagcgtttcctctccgtgtcattgactctggcac

SEQ ID NO: 151506 - DNA, 583 bp, Homo sapiens
  Payload ID: 9828
  Gene Symbol: MAN2A2
  Gene Name: mannosidase, alpha, class 2A, member 2
  ENST ID: ENST00000559132
  CDS Start-End: 1-583
catgctgccctactacacggtcaatggctcctgggtggtgccaccggagccccggcccagcttcttctccatctccccgcaggactgccagtttgctttggggggccggggtcagaagccagagctgcagatgctcactgtgtcggaggagctgccgtttgacaacgtggatggtggtgtgtggaggcaaggcttcgacatctcctacgacccgcacgactgggatgctgaagacctgcaggaggacccccggcggcgcttcctctgggcagaggtctccttcttcgccaagtggtgggacaacatcaatgtccaaaagagagcggcagtccgaaggctggtgggaaacgggcagctggagattgcgacaggaggctgggtgatgccagatgaggccaattcccactactttgcattgattgaccagctcatcgaaggacaccagtggctggagagaaatcttggtgcaaccccccgctctggctgggcagtggacccctttggatacagctccaccatgccttacctgctgcgccgtgccaacctcaccagcatgctgattcagagagtgcactatgccatc

SEQ ID NO: 151507 - DNA, 790 bp, Homo sapiens
  Payload ID: 9828
  Gene Symbol: MAN2A2
  Gene Name: mannosidase, alpha, class 2A, member 2
  ENST ID: ENST00000558171
  CDS Start-End: 1-790
ggcccggcctccagggtttcctgtgctgagcggggatttcttctcctatgcggaccgggaggatcattactggacaggctattacacttcccggcccttctacaagagcttagaccgagtcctggaagcccacctgcggggggcagaggttctgtacagcctggctgcagctcacgctcgccgctctggtctggctggccggtacccactgtctgatttcaccctcctgacggaagctcggcgcacattggggctcttccagcatcacgatgccatcactggcacggccaaggaggctgtggtggtggactatggggtcaggcttctgcgctcccttgtcaacctgaagcaggtcatcattcatgcagcccactatctggtgctgggggacaaggagacctaccactttgaccctgaggcgcccttcctccaagtggatgacactcgcttaagtcacgacgccctcccagagcgcacggtgatccagctggattcctcgcccagcccaccttctacgcacaggtttgtggtcctattcaacccactggaacaggagcgattcagcatggtgtccctgctggtcaactctccccgcgtgcgtgtcctttcggaggagggtcagcccctggccgtgcagatcagcgcacactggagctctgccaccgaggcggtccctgacgtctaccaggtgtctgtgcctgtccgcctgccagccctgggcctgggcgtgctgcagctacagctgggcctggatgggcaccgcacgctgccctcctctgtgcgcatctac

SEQ ID NO: 151508 - DNA, 6704 bp, Homo sapiens
  Payload ID: 9828
  Gene Symbol: MAN2A2
  Gene Name: mannosidase, alpha, class 2A, member 2
  Uniprot ID: P49641
  ENST ID: ENST00000559717
  CDS Start-End: 460-3912
gcgcgcgggagggctccggctgccccgacagaggccgggctcgggcggcgggagtgcgagcgccactgcggcgtcagaggggccaggaagggacaggaggctgcctgaggcccgtacctggcgcctgtctctgcggtccccggggccgacgaagtcggagcgggtggggagggagccgggcgggcggccagagacctggcggcaggtgcctgccctctgtgatccaactctctccccagctccacccacattggcctagacccagtctctaagggctgaaaatattgcccggaagctcccgagcagaatcagatcgcgctaagtagggcacaacgcagaggcgacaaagctcctcggccccagggcccgcggagcagactccggagcgcggtcccgcccacgctcggctccgcagttagcgtcctccttcctcctgagcaggtgtgtgtggaggccagtatgaagctgaaaaagcaggtgacagtgtgtggggctgccatcttctgtgtggcagtcttctcgctctacctcatgctggaccgagtgcaacacgatcccacccgacaccagaatggtgggaacttcccccggagccaaatttctgtgctgcagaaccgcattgagcagctggagcagcttttggaggagaaccatgagattatcagccatatcaaggactccgtgctggagctgacagccaacgcagagggcccgcccgccatgctgccctactacacggtcaatggctcctgggtggtgccaccggagccccggcccagcttcttctccatctccccgcaggactgccagtttgctttggggggccggggtcagaagccagagctgcagatgctcactgtgtcggaggagctgccgtttgacaacgtggatggtggtgtgtggaggcaaggcttcgacatctcctacgacccgcacgactgggatgctgaagacctgcaggtgtttgtggtgccccactctcacaatgacccaggctggatcaagacctttgacaagtactacacagagcagacccaacacatcctcaatagcatggtgtctaagctgcaggaggacccccggcggcgcttcctctgggcagaggtctccttcttcgccaagtggtgggacaacatcaatgtccaaaagagagcggcagtccgaaggctggtgggaaacgggcagctggagattgcgacaggaggctgggtgatgccagatgaggccaattcccactactttgcattgattgaccagctcatcgaaggacaccagtggctggagagaaatcttggtgcaaccccccgctctggctgggcagtggacccctttggatacagctccaccatgccttacctgctgcgccgtgccaacctcaccagcatgctgattcagagagtgcactatgccatcaagaagcactttgctgccacccacagcctagagttcatgtggaggcagacatgggactcggactccagcacagacatcttctgtcacatgatgcccttctacagctatgacgtcccccatacctgtggcccagatcccaagatctgctgccaatttgatttcaaacgcctgcctggtgggcgcatcaactgcccttggaaggtgccaccccgggccatcacagaggccaacgtggcagagagggcagccctgcttctggaccaataccggaagaagtcccagctgttccgaagcaacgtcctcctggtgcctcttggagatgacttccgatatgacaagccccaggagtgggatgcccagttcttcaactaccaacggctctttgacttcttcaacagcaggcctaacctccatgtgcaggcccagtttggcactctttctgactattttgatgccctgtacaagaggacaggggtggagccaggggcccggcctccagggtttcctgtgctgagcggggatttcttctcctatgcggaccgggaggatcattactggacaggctattacacttcccggcccttctacaagagcttagaccgagtcctggaagcccacctgcggggggcagaggttctgtacagcctggctgcagctcacgctcgccgctctggtctggctggccggtacccactgtctgatttcaccctcctgacggaagctcggcgcacattggggctcttccagcatcacgatgccatcactggcacggccaaggaggctgtggtggtggactatggggtcaggcttctgcgctcccttgtcaacctgaagcaggtcatcattcatgcagcccactatctggtgctgggggacaaggagacctaccactttgaccctgaggcgcccttcctccaagtggatgacactcgcttaagtcacgacgccctcccagagcgcacggtgatccagctggattcctcgcccaggtttgtggtcctattcaacccactggaacaggagcgattcagcatggtgtccctgctggtcaactctccccgcgtgcgtgtcctttcggaggagggtcagcccctggccgtgcagatcagcgcacactggagctctgccaccgaggcggtccctgacgtctaccaggtgtctgtgcctgtccgcctgccagccctgggcctgggcgtgctgcagctacagctgggcctggatgggcaccgcacgctgccctcctctgtgcgcatctacctgcacggccggcagctgtccgtcagcaggcacgaagcgtttcctctccgtgtcattgactctggcaccagcgacttcgccctcagcaaccgctacatgcaggtctggttctcaggccttactgggctcctcaagagcatccgaagggtggatgaggagcacgagcagcaggtggacatgcaggtccttgtctatggcacccgtacgtccaaagacaagagtggagcctacctcttcctgcccgatggcgaggccaagccctacgtccccaaggagccccccgtgctgcgtgtcactgaaggccctttcttctcagaggtggttgcgtactatgagcacattcaccaggcggtccggctttacaatctgccaggggtggaggggctgtctctggacatatcatccctggtggacatccgggactacgtcaacaaggagctggccctgcacatccatacagacatcgacagccagggtatcttcttcacagacctcaatggctttcaggtgcagccccgacggtatctgaagaagctccccctccaggccaacttctaccccatgccagtcatggcctatatccaggacgcacagaagcgcctcacgctgcacactgcccaggccctgggtgtctctagcctcaaagatggccagctggaggtgatcttggaccggcggctgatgcaggatgacaaccggggcctaggccaagggctcaaggacaacaagagaacctgcaaccgtttccgcctcctgctagagcggcgaaccgtgggcagtgaggtccaagatagccactctaccagctacccatccctcctcagccacctgacctccatgtacctgaacgccccggcgctcgctctgcctgtagccaggatgcagctcccaggccctggtctgcgctcatttcatcctctggcttcctcactgccctgtgacttccacctgctcaacctacgtacgctccaggctgaggaggacaccctaccctcggcggagaccgcactcatcttacaccgcaagggttttgactgcggcctggaggccaagaacttgggcttcaactgcaccacaagccaaggcaaggtagccctgggcagccttttccatggcctggatgtggtattccttcagccaacctccttgacgttactgtaccctctggcctccccgtccaacagcactgacgtctatttggagcccatggagattgctacctttcgcctccgcttgggttagggcttcttgtggcctgaagagaaagttcattcacagagactgcctcttaacatgaagatcattggacaagccacacgggtatcccatcccgatctgcctcccagaactgtgacacactgggctctgccctcattttctgtttattgctgctgctgtgttttcggcgcaacccacaaacccagtgatgggtaaatagggcagacgccagtgagatcagggagagaaggcccttggtcagagtgggcagtgccaggctctgctttgggttgtgagtggacacccaactgggcacaggctcaggcacccatcctttttccaaacagggatatagaagtggtggaagcagacagaagaggtaagggaggctaagtgggtaacagcccagcatcagggtcactgtggcaacagcaggctctaggggaatcctgtggttatgtagagactccatgtcctggtgtgatgagcaggatcagagtgactctgggaggacaggggtggggacccagagttagcagtggggatggagcagtagaaggaatcactgtttctcctaggagtctgaaggcctcgctgctttctgtgatggctttgcagtaagtgccgcctggcctgcatgcattggctaacaggctgcagaatggcaggaaggactcgctagagattgtcatggccagagatcataggtcacttcaggtagcaagacccctggcaaactgggcacttggcctatgtactgatttgtgggatggtggcaggggtgtggggtccttcaccctgcctgaattctctttggcttctgtgctctgtatgctgctgtccccaagggctctttcttattatggcagggagtggggattggtcctactttctttctctggaaaggaaagcctccaagactccatgtgcttgggcagcttgagaaggcgttcagcaccacgcctagcaggcagaccttgaagcctcacctttagtctatctgcagaggtattcagttcctggcacaggggactaggggcatgtagagtatatgaggaggcagtatggctgtgcaggagccttcatttcagcttcaattaatagggaagaatttatgatagctctatagatgctgaaaaggtatttcgtaagatttaaaatccatcccttattaaaactcttagtaaattaagtctggaaagaaacaccctaatctagataaaggtctgtttcagaaaccaacagtgatggcattctaaagagtcagacgccacaggcattcccattaaagtcagaaactagccaagggcaagctattattcagcagtgtcccggcactactaacccctgcaacaagccagatgaggaacataaggaagaattataattgtcattatttgtagacaataaaactgcctacctgtaaaacctaagaatcaactgaagacctgttaagagtattctgtaagtcaacccaatgatacacatcatgttcctgtccacatactggttttccccaaatcagctgataaattcagtgtaattccaatgagattgaaactttggaattgacagttctaaagtgcatttgggagagtgaatgtgtgagaacactaagaccactctgaacgatgataatgagttggggggtggactgctcgggggtgatcctgccagattcccagaggattctcacgccaccattacctcactcagtgtgacctggagggggtcagacagacgggagagtccagaaacagacccagggctacaggaatttagtatatggtaagagggatgttttaagtggggaaaaaggtggattatttaataaacagcacttttagacaactagctatcaaagctagatctcagctgggtgcgatggctcacgcctgtaatcccggcactttgggaggccaaggtgggtggatcacttgaggtcaggagttcgagaccagcctggccaagatggcgaaaccctgtgtctactaaaaatacaaaaactagccaggaatggtggcgcgcgcctgtaatcccagttacttaggaggctgaggcaggagaatcacatcaacctgggaggcggaggttgcagtgagcttagatcatgccaccatgccactgcactccagcctgggtgacacagccaaaaaaaaaaccactaagttagatctctacctcacagtgtccatacaaattagttccagagggaagatataccacaaaattactcaaaaatttttatacctctggtgtgggacggtcttttctaaactttaacatgagacttaaaagatataataagggaaaagataagcagatttcgcaaccaaaaaatatcgaaagtctctgtgtgatggaaaacatcaaggttaaaacacaaatgacagatatggaagaaaatatttgcagcacataaaaaaatcaacgagtacaattactttaggagaaaagcttgcttcagggtccttagagaaagtcactggggcctgccaagctgccacctaaagacaagagtgagagggctgagttcttccaggtcatcagagttgttgctgcccgtattaggccacacagtggaaccccatttatatcatagcagaagaaataggattatcaatgtgaactgcttagcatggtgcctggtatatacgagagctccacaaatgtgagctataatcctactagtaaaggatgctaagcagttccactgtggcaggtgtcatttgctagtagaatttgtaatcaaacaataggaggggaatctgtgaacgcctagaaaatgagcagaataaaggatattatctttggaa

SEQ ID NO: 151509 - DNA, 529 bp, Homo sapiens
  Payload ID: 9828
  Gene Symbol: MAN2A2
  Gene Name: mannosidase, alpha, class 2A, member 2
  ENST ID: ENST00000559999
  CDS Start-End: 169-529
gcagcacccctttgcccgaggggcgcaacgacagagacctaaggctacctgggccggagccgggtgaggccgcggagaacgcaccccgctacgcgtctgccgagacggaggcgggcgtttcgaccactgcccgatcatgcgcttactcaagtgtgtgtggaggccagtatgaagctgaaaaagcaggtgacagtgtgtggggctgccatcttctgtgtggcagtcttctcgctctacctcatgctggaccgagtgcaacacgatcccacccgacaccagaatggtgggaacttcccccggagccaaatttctgtgctgcagaaccgcattgagcagctggagcagcttttggaggagaaccatgagattatcagccatatcaaggactccgtgctggagctgacagccaacgcagagggcccgcccgccatgctgccctactacacggtcaatggctcctgggtggtgccaccggagccccggcccagcttcttctccatctccccgcaggactgccagtttgctttgg

SEQ ID NO: 151510 - DNA, 2671 bp, Homo sapiens
  Payload ID: 9828
  Gene Symbol: MAN2A2
  Gene Name: mannosidase, alpha, class 2A, member 2
  ENST ID: ENST00000557865
  CDS Start-End: 1-2382
tatgccatcaagaagcactttgctgccacccacagcctagagttcatgtggaggcagacatgggactcggactccagcacagacatcttctgtcacatgatgcccttctacagctatgacgtcccccatacctgtggcccagatcccaagatctgctgccaatttgatttcaaacgcctgcctggtgggcgcatcaactgcccttggaaggtgccaccccgggccatcacagaggccaacgtggcagagagggcagccctgcttctggaccaataccggaagaagtcccagctgttccgaagcaacgtcctcctggtgcctcttggagatgacttccgatatgacaagccccaggagtgggatgcccagttcttcaactaccaacggctctttgacttcttcaacagcaggcctaacctccatgtgcaggatcattactggacaggctattacacttcccggcccttctacaagagcttagaccgagtcctggaagcccacctgcggggggcagaggttctgtacagcctggctgcagctcacgctcgccgctctggtctggctggccggtacccactgtctgatttcaccctcctgacggaagctcggcgcacattggggctcttccagcatcacgatgccatcactggcacggccaaggaggctgtggtggtggactatggggtcaggcttctgcgctcccttgtcaacctgaagcaggtcatcattcatgcagcccactatctggtgctgggggacaaggagacctaccactttgaccctgaggcgcccttcctccaagtggatgacactcgcttaagtcacgacgccctcccagagcgcacggtgatccagctggattcctcgcccaggtttgtggtcctattcaacccactggaacaggagcgattcagcatggtgtccctgctggtcaactctccccgcgtgcgtgtcctttcggaggagggtcagcccctggccgtgcagatcagcgcacactggagctctgccaccgaggcggtccctgacgtctaccaggtgtctgtgcctgtccgcctgccagccctgggcctgggcgtgctgcagctacagctgggcctggatgggcaccgcacgctgccctcctctgtgcgcatctacctgcacggccggcagctgtccgtcagcaggcacgaagcgtttcctctccgtgtcattgactctggcaccagcgacttcgccctcagcaaccgctacatgcaggtctggttctcaggccttactgggctcctcaagagcatccgaagggtggatgaggagcacgagcagcaggtggacatgcaggtccttgtctatggcacccgtacgtccaaagacaagagtggagcctacctcttcctgcccgatggcgaggccaagccctacgtccccaaggagccccccgtgctgcgtgtcactgaaggccctttcttctcagaggtggttgcgtactatgagcacattcaccaggcggtccggctttacaatctgccaggggtggaggggctgtctctggacatatcatccctggtggacatccgggactacgtcaacaaggagctggccctgcacatccatacagacatcgacagccagggtatcttcttcacagacctcaatggctttcaggtgcagccccgacggtatctgaagaagctccccctccaggccaacttctaccccatgccagtcatggcctatatccaggacgcacagaagcgcctcacgctgcacactgcccaggccctgggtgtctctagcctcaaagatggccagctggaggtgatcttggaccggcggctgatgcaggatgacaaccggggcctaggccaagggctcaaggacaacaagagaacctgcaaccgtttccgcctcctgctagagcggcgaaccgtgggcagtgaggtccaagatagccactctaccagctacccatccctcctcagccacctgacctccatgtacctgaacgccccggcgctcgctctgcctgtagccaggatgcagctcccaggccctggtctgcgctcatttcatcctctggcttcctcactgccctgtgacttccacctgctcaacctacgtacgctccaggctgaggaggacaccctaccctcggcggagaccgcactcatcttacaccgcaagggttttgactgcggcctggaggccaagaacttgggcttcaactgcaccacaagccaaggcaaggtagccctgggcagccttttccatggcctggatgtggtattccttcagccaacctccttgacgttactgtaccctctggcctccccgtccaacagcactgacgtctatttggagcccatggagattgctacctttcgcctccgcttgggttagggcttcttgtggcctgaagagaaagttcattcacagagactgcctcttaacatgaagatcattggacaagccacacgggtatcccatcccgatctgcctcccagaactgtgacacactgggctctgccctcattttctgtttattgctgctgctgtgttttcggcgcaacccacaaacccagtgatgggtaaatagggcagacgccagtgagatcagggagagaaggcccttggtcagagtgggcagtgccaggctctgctttgggttgtgagtggacacccaactggg

SEQ ID NO: 151511 - DNA, 492 bp, Homo sapiens
  Payload ID: 9828
  Gene Symbol: MAN2A2
  Gene Name: mannosidase, alpha, class 2A, member 2
  ENST ID: ENST00000560147
  CDS Start-End: 1-492
tacgtccccaaggagccccccgtgctgcgtgtcactgaaggccctttcttctcagaggtggttgcgtactatgagcacattcaccaggcggtccggctttacaatctgccaggtgcagccccgacggtatctgaagaagctccccctccaggccaacttctaccccatgccagtcatggcctatatccaggacgcacagaagcgcctcacgctgcacactgcccaggccctgggtgtctctagcctcaaagatggccagctggaggtgatcttggaccggcggctgatgcaggatgacaaccggggcctaggccaagggctcaaggacaacaagagaacctgcaaccgtttccgcctcctgctagagcggcgaaccgtgggcagtgaggtccaagatagccactctaccagctacccatccctcctcagccacctgacctccatgtacctgaacgccccggcgctcgctctgcctgtagccaggatgcagct

SEQ ID NO: 151512 - DNA, 956 bp, Homo sapiens
  Payload ID: 9828
  Gene Symbol: MAN2A2
  Gene Name: mannosidase, alpha, class 2A, member 2
  ENST ID: ENST00000557990
  CDS Start-End: 1-956
caaggagccccccgtgctgcgtgtcactgaaggccctttcttctcagaggtggttgcgtactatgagcacattcaccaggcggtccggctttacaatctgccaggggtggaggggctgtctctggacatatcatccctggtggacatccgggactacgtcaacaaggagctggccctgcacatccatacagacatcgacagccagggtatcttcttcacagacctcaatggctttcaggtgcagccccgacggtatctgaagaagctccccctccaggccaacttctaccccatgccagtcatggcctatatccaggacgcacagaagcgcctcacgctgcacactgcccaggccctgggtgtctctagcctcaaagatggccagctggaggtgatcttggaccggcggctgatgcaggatgacaaccggggcctaggccaagggctcaaggacaacaagagaacctgcaaccgtttccgcctcctgctagagcggcgaaccgtgggcagtgagcctgactttttctccaaactggcagccatgtttaggggcttgatctttcacagcagcaggagcggtaaccgagaggtccaagatagccactctaccagctacccatccctcctcagccacctgacctccatgtacctgaacgccccggcgctcgctctgcctgtagccaggatgcagctcccaggccctggtctgcgctcatttcatcctctggcttcctcactgccctgtgacttccacctgctcaacctacgtacgctccaggctgaggaggacaccctaccctcggcggagaccgcactcatcttacaccgcaagggttttgactgcggcctggaggccaagaacttgggcttcaactgcaccacaagccaaggcaaggtagccctgggcagccttttccatggcctggatgtggtattccttcagccaacctccttga

SEQ ID NO: 151513 - DNA, 449 bp, Homo sapiens
  Payload ID: 9828
  Gene Symbol: MAN2A2
  Gene Name: mannosidase, alpha, class 2A, member 2
  ENST ID: ENST00000559704
  CDS Start-End: 1-175
ctgcaccacaagccaaggcaaggtagccctgggcagccttttccatggcctggatgtggtattccttcagccaacctccttgacgttactgtaccctctggcctccccgtccaacagcactgacgtctatttggagcccatggagattgctacctttcgcctccgcttgggttagggcttcttgtggcctgaagagaaagttcattcacagagactgcctcttaacatgaagatcattggacaagccacacggaaaccaacagtgatggcattctaaagagtcagacgccacaggcattcccattaaagtcagaaactagccaagggcaagctattattcagcagtgtcccggcactactaacccctgcaacaagccagatgaggaacataaggaagaattataattgtcattatttgtagacaataaaactgcctacctgtaaaacct

SEQ ID NO: 151514 - DNA, 1049 bp, Homo sapiens
  Payload ID: 9828
  Gene Symbol: MAN2A2
  Gene Name: mannosidase, alpha, class 2A, member 2
  ENST ID: ENST00000558290
  CDS Start-End: 832-1049
attgcagtatggattacactgaaaaactgtaaacaacctagatgcccagtaaaagggaaacagccaagaaaagtctgtgtcttgttcactcgctggcaggaaacatagagcaggcacggaaaggaaagggactcgaggaatgcgctgtaccgacaggaggcagcacccctttgcccgaggggcgcaacgacagagacctaaggctacctgggccggagccgggtgaggccgcggagaacgcaccccgctacgcgtctgccgagacggaggcgggcgtttcgaccactgcccgatcatgcgcttactcaactccacccacattggcctagacccagtctctaagggctgaaaatattgcccggaagctcccgagcagaatcagatcgcgctaagtagggcacaacgcagaggcgacaaagctcctcggccccagggcccgcggagcagactccggagcgcggtcccgcccacgctcggctccgcagttagcgtcctccttcctcctgagcaggcaagcggagcccgagggcggtggcggcggggggcacgggtcccctgaagttgcctcgcagctgagcactgggccccgtctctcccttcccagggggccttcggcgtcactgcaggcttcctaggggtcccctaagtgctctgcaaaccgcggctggaagtttcccactgcagtgaacagtagagaaacagggagaacacacagggcttgctttatgctagaaacacaagcatctttcttctttattagaaagaaactcattctgtgtttctgagaaaggatcgtgccaggcactgtttctggtgtgtgtggaggccagtatgaagctgaaaaagcaggtgacagtgtgtggggctgccatcttctgtgtggcagtcttctcgctctacctcatgctggaccgagtgcaacacgatcccacccgacaccagaatggtgggaacttcccccggagccaaatttctgtgctgcagaaccgcattgagcagctggagcagcttttggaggagaaccatgagattatcagccatatcaagga

SEQ ID NO: 151515 - DNA, 537 bp, Homo sapiens
  Payload ID: 9828
  Gene Symbol: MAN2A2
  Gene Name: mannosidase, alpha, class 2A, member 2
  ENST ID: ENST00000559965
  CDS Start-End: 310-537
agtttgacccgaaagggcactgagaaaggctttcctatcagtctctttgggttctggctaaacttttaaatcaaacaaaatagagactagcttattcacctgaaactagaagcacatggccgaggagcctgaacaggcacctcctatctaggcagggaagctgtgtaatcaggagcttgtgtggtgcgctccagtcggagctgggactcttatcctgggcccgtttttcatagcaccagccaaaggagagcgtcctctccaccctagcggcagagctgctaccaggaccaggtgtgtgtggaggccagtatgaagctgaaaaagcaggtgacagtgtgtggggctgccatcttctgtgtggcagtcttctcgctctacctcatgctggaccgagtgcaacacgatcccacccgacaccagaatggtgggaacttcccccggagccaaatttctgtgctgcagaaccgcattgagcagctggagcagcttttggaggagaaccatgagattatcagccatatcaaggactccgtgctg

SEQ ID NO: 151516 - DNA, 5124 bp, Homo sapiens
  Payload ID: 9828
  Gene Symbol: MAN2A2
  Gene Name: mannosidase, alpha, class 2A, member 2
  ENST ID: ENST00000560451
  CDS Start-End: 300-3116
caggccggggcgggcggcgcggctgtccccgccccgcacgctgctgggcccggcagcttcagaggctggcggacccgcgcggggccggcgcagcggagcgcgccggcggcccggggcccagcgggagcgcggcagcggcgcgcggagcagggggctacgggtgggcgggcgcccgccttcgcctgcgtcgctgcctgcacgcgggccgccgtccccgggcgtgtgagagccggcagctcggccgactgggcccggagcggcgcggaggccgggcgctgacggtgtgtgtggaggccagtatgaagctgaaaaagcaggtgacagtgtgtggggctgccatcttctgtgtggcagtcttctcgctctacctcatgctggaccgagtgcaacacgatcccacccgacaccagaatggtgggaacttcccccggagccaaatttctgtgctgcagaaccgcattgagcagctggagcagcttttggaggagaaccatgagattatcagccatatcaaggactccgtgctggagctgacagccaacgcagagggcccgcccgccatgctgccctactacacggtcaatggctcctgggtggtgccaccggagccccggcccagcttcttctccatctccccgcaggactgccagtttgctttggggggccggggtcagaagccagagctgcagatgctcactgtgtcggaggagctgccgtttgacaacgtggatggtggtgtgtggaggcaaggcttcgacatctcctacgacccgcacgactgggatgctgaagacctgcaggtgtttgtggtgccccactctcacaatgacccaggctggatcaagacctttgacaagtactacacagagcagacccaacacatcctcaatagcatggtgtctaagctgcaggaggacccccggcggcgcttcctctgggcagaggtctccttcttcgccaagtggtgggacaacatcaatgtccaaaagagagcggcagtccgaaggctggtgggaaacgggcagctggagattgcgacaggaggctgggtgatgccagatgaggccaattcccactactttgcattgattgaccagctcatcgaaggacaccagtggctggagagaaatcttggtgcaaccccccgctctggctgggcagtggacccctttggatacagctccaccatgccttacctgctgcgccgtgccaacctcaccagcatgctgattcagagagtgcactatgccatcaagaagcactttgctgccacccacagcctagagttcatgtggaggcagacatgggactcggactccagcacagacatcttctgtcacatgatgcccttctacagctatgacgtcccccatacctgtggcccagatcccaagatctgctgccaatttgatttcaaacgcctgcctggtgggcgcatcaactgcccttggaaggtgccaccccgggccatcacagaggccaacgtggcagagagggcagccctgcttctggaccaataccggaagaagtcccagctgttccgaagcaacgtcctcctggtgcctcttggagatgacttccgatatgacaagccccaggagtgggatgcccagttcttcaactaccaacggctctttgacttcttcaacagcaggcctaacctccatgtgcaggcccagtttggcactctttctgactattttgatgccctgtacaagaggacaggggtggagccaggggcccggcctccagggtttcctgtgctgagcggggatttcttctcctatgcggaccgggaggatcattactggacaggctattacacttcccggcccttctacaagagcttagaccgagtcctggaagcccacctgcggggggcagaggttctgtacagcctggctgcagctcacgctcgccgctctggtctggctggccggtacccactgtctgatttcaccctcctgacggaagctcggcgcacattggggctcttccagcatcacgatgccatcactggcacggccaaggaggctgtggtggtggactatggggtcaggcttctgcgctcccttgtcaacctgaagcaggtcatcattcatgcagcccactatctggtgctgggggacaaggagacctaccactttgaccctgaggcgcccttcctccaagtggatgacactcgcttaagtcacgacgccctcccagagcgcacggtgatccagctggattcctcgcccaggtttgtggtcctattcaacccactggaacaggagcgattcagcatggtgtccctgctggtcaactctccccgcgtgcgtgtcctttcggaggagggtcagcccctggccgtgcagatcagcgcacactggagctctgccaccgaggcggtccctgacgtctaccaggtgtctgtgcctgtccgcctgccagccctgggcctgggcgtgctgcagctacagctgggcctggatgggcaccgcacgctgccctcctctgtgcgcatctacctgcacggccggcagctgtccgtcagcaggcacgaagcgtttcctctccgtgtcattgactctggcaccagcgacttcgccctcagcaaccgctacatgcaggtctggttctcaggccttactgggctcctcaagagcatccgaagggtggatgaggagcacgagcagcaggtggacatgcaggtccttgtctatggcacccgtacgtccaaagacaagagtggagcctacctcttcctgcccgatggcgaggccaagccctacgtccccaaggagccccccgtgctgcgtgtcactgaaggccctttcttctcagaggtggttgcgtactatgagcacattcaccaggcggtccggctttacaatctgccaggggtggaggggctgtctctggacatatcatccctggtggacatccgggactacgtcaacaaggagctggccctgcacatccatacagacatcgacagccagggtgcagccccgacggtatctgaagaagctccccctccaggccaacttctaccccatgccagtcatggcctatatccaggacgcacagaagcgcctcacgctgcacactgcccaggccctgggtgtctctagcctcaaagatggccagctggaggtgatcttggaccggcggctgatgcaggatgacaaccggggcctaggccaagggctcaaggacaacaagagaacctgcaaccgtttccgcctcctgctagagcggcgaaccgtgggcagtgaggtccaagatagccactctaccagctacccatccctcctcagccacctgacctccatgtacctgaacgccccggcgctcgctctgcctgtagccaggatgcagctcccaggccctggtctgcgctcatttcatcctctggcttcctcactgccctgtgacttccacctgctcaacctacgtacgctccaggctgaggaggacaccctaccctcggcggagaccgcactcatcttacaccgcaagggttttgactgcggcctggaggccaagaacttgggcttcaactgcaccacaagccaaggcaaggtagccctgggcagccttttccatggcctggatgtggtattccttcagccaacctccttgacgttactgtaccctctggcctccccgtccaacagcactgacgtctatttggagcccatggagattgctacctttcgcctccgcttgggttagggcttcttgtggcctgaagagaaagttcattcacagagactgcctcttaacatgaagatcattggacaagccacacgggtatcccatcccgatctgcctcccagaactgtgacacactgggctctgccctcattttctgtttattgctgctgctgtgttttcggcgcaacccacaaacccagtgatgggtaaatagggcagacgccagtgagatcagggagagaaggcccttggtcagagtgggcagtgccaggctctgctttgggttgtgagtggacacccaactgggcacaggctcaggcacccatcctttttccaaacagggatatagaagtggtggaagcagacagaagaggtaagggaggctaagtgggtaacagcccagcatcagggtcactgtggcaacagcaggctctaggggaatcctgtggttatgtagagactccatgtcctggtgtgatgagcaggatcagagtgactctgggaggacaggggtggggacccagagttagcagtggggatggagcagtagaaggaatcactgtttctcctaggagtctgaaggcctcgctgctttctgtgatggctttgcagtaagtgccgcctggcctgcatgcattggctaacaggctgcagaatggcaggaaggactcgctagagattgtcatggccagagatcataggtcacttcaggtagcaagacccctggcaaactgggcacttggcctatgtactgatttgtgggatggtggcaggggtgtggggtccttcaccctgcctgaattctctttggcttctgtgctctgtatgctgctgtccccaagggctctttcttattatggcagggagtggggattggtcctactttctttctctggaaaggaaagcctccaagactccatgtgcttgggcagcttgagaaggcgttcagcaccacgcctagcaggcagaccttgaagcctcacctttagtctatctgcagaggtattcagttcctggcacaggggactaggggcatgtagagtatatgaggaggcagtatggctgtgcaggagccttcatttcagcttcaattaatagggaagaatttatgatagctctatagatgctgaaaaggtatttcgtaagatttaaaatccatcccttattaaaactcttagtaaattaagtctggaaagaaacaccctaatctagataaaggtctgtttcagaaaccaacagtgatggcattctaaagagtcagacgccacaggcattcccattaaagtcagaaactagccaagggcaagctattattcagcagtgtcccggcactactaacccctgcaacaagccagatgaggaacataaggaagaattataattgtcattatttgtagacaataaaactgcctacctgtaaaa

SEQ ID NO: 151517 - DNA, 3170 bp, Homo sapiens
  Payload ID: 9829
  Gene Symbol: MAN2B1
  Gene Name: mannosidase, alpha, class 2B, member 1
  Uniprot ID: O00754
  ENST ID: ENST00000221363
  CDS Start-End: 34-3066
ggccggggaaccccaggaggaagctgctgagccatgggcgcctacgcgcgggcttcgggggtctgcgctcgcggctgcctggactcagcaggcccctggaccatgtcccgcgccctgcggccaccgctcccgcctctctgctttttccttttgttgctggcggctgccggtgctcgggccgggggatacgagacatgccccacagtgcagccgaacatgctgaacgtgcacctgctgcctcacacacatgatgacgtgggctggctcaaaaccgtggaccagtacttttatggaatcaagaatgacatccagcacgccggtgtgcagtacatcctggactcggtcatctctgccttgctggcagatcccacccgtcgcttcatttacgtggagattgccttcttctcccgttggtggcaccagcagacaaatgccacacaggaagtcgtgcgagaccttgtgcgccaggggcgcctggagttcgccaatggtggctgggtgatgaacgatgaggcagccacccactacggtgccatcgtggaccagatgacacttgggctgcgctttctggaggacacatttggcaatgatgggcgaccccgtgtggcctggcacattgaccccttcggccactctcgggagcaggcctcgctgtttgcgcagatgggcttcgacggcttcttctttgggcgccttgattatcaagataagtgggtacggatgcagaagctggagatggagcaggtgtggcgggccagcaccagcctgaagcccccgaccgcggacctcttcactggtgtgcttcccaatggttacaacccgccaaggaatctgtgctgggatgtgctgtgtgtcgatcagccgctggtggaggaccctcgcagccccgagtacaacgccaaggagctggtcgattacttcctaaatgtggccactgcccagggccggtattaccgcaccaaccacactgtgatgaccatgggctcggacttccaatatgagaatgccaacatgtggttcaagaaccttgacaagctcatccggctggtaaatgcgcaggcaaaaggaagcagtgtccatgttctctactccacccccgcttgttacctctgggagctgaacaaggccaacctcacctggtcagtgaaacatgacgacttcttcccttacgcggatggcccccaccagttctggaccggttacttttccagtcggccggccctcaaacgctacgagcgcctcagctacaacttcctgcaggtgtgcaaccagctggaggcgctggtgggcctggcggccaacgtgggaccctatggctccggagacagtgcacccctcaatgaggcgatggctgtgctccagcatcacgacgccgtcagcggcacctcccgccagcacgtggccaacgactacgcgcgccagcttgcggcaggctgggggccttgcgaggttcttctgagcaacgcgctggcgcggctcagaggcttcaaagatcacttcaccttttgccaacagctaaacatcagcatctgcccgctcagccagacggcggcgcgcttccaggtcatcgtttataatcccctggggcggaaggtgaattggatggtacggctgccggtcagcgaaggcgttttcgttgtgaaggaccccaatggcaggacagtgcccagcgatgtggtaatatttcccagctcagacagccaggcgcaccctccggagctgctgttctcagcctcactgcccgccctgggcttcagcacctattcagtagcccaggtgcctcgctggaagccccaggcccgcgcaccacagcccatccccagaagatcctggtcccctgctttaaccatcgaaaatgagcacatccgggcaacgtttgatcctgacacagggctgttgatggagattatgaacatgaatcagcaactcctgctgcctgttcgccagaccttcttctggtacaacgccagtataggtgacaacgaaagtgaccaggcctcaggtgcctacatcttcagacccaaccaacagaaaccgctgcctgtgagccgctgggctcagatccacctggtgaagacacccttggtgcaggaggtgcaccagaacttctcagcttggtgttcccaggtggttcgcctgtacccaggacagcggcacctggagctagagtggtcggtggggccgatacctgtgggcgacacctgggggaaggaggtcatcagccgttttgacacaccgctggagacaaagggacgcttctacacagacagcaatggccgggagatcctggagaggaggcgggattatcgacccacctggaaactgaaccagacggagcccgtggcaggaaactactatccagtcaacacccggatttacatcacggatggaaacatgcagctgactgtgctgactgaccgctcccaggggggcagcagcctgagagatggctcgctggagctcatggtgcaccgaaggctgctgaaggacgatggacgcggagtatcggagccactaatggagaacgggtcgggggcgtgggtgcgagggcgccacctggtgctgctggacacagcccaggctgcagccgccggacaccggctcctggcggagcaggaggtcctggcccctcaggtggtgctggccccgggtggcggcgccgcctacaatctcggggctcctccgcgcacgcagttctcagggctgcgcagggacctgccgccctcggtgcacctgctcacgctggccagctggggccccgaaatggtgctgctgcgcttggagcaccagtttgccgtaggagaggattccggacgtaacctgagcgcccccgttaccttgaacttgagggacctgttctccaccttcaccatcacccgcctgcaggagaccacgctggtggccaaccagctccgcgaggcagcctccaggctcaagtggacaacaaacacaggccccacaccccaccaaactccgtaccagctggacccggccaacatcacgctggaacccatggaaatccgcactttcctggcctcagttcaatggaaggaggtggatggttaggtctgctgggatgggccctccaagcccaagcctcctgctccgggggcagaccagactctgactctcctcttggggctgctgccattaaaacgctactactaaga

SEQ ID NO: 151518 - DNA, 3184 bp, Homo sapiens
  Payload ID: 9829
  Gene Symbol: MAN2B1
  Gene Name: mannosidase, alpha, class 2B, member 1
  Uniprot ID: O00754
  ENST ID: ENST00000456935
  CDS Start-End: 42-3077
ctttccagggccggggaaccccaggaggaagctgctgagccatgggcgcctacgcgcgggcttcgggggtctgcgctcgcggctgcctggactcagcaggcccctggaccatgtcccgcgccctgcggccaccgctcccgcctctctgctttttccttttgttgctggcggctgccggtgctcgggccgggggatacgagacatgccccacagtgcagccgaacatgctgaacgtgcacctgctgcctcacacacatgatgacgtgggctggctcaaaaccgtggaccagtacttttatggaatcaagaatgacatccagcacgccggtgtgcagtacatcctggactcggtcatctctgccttgctggcagatcccacccgtcgcttcatttacgtggagattgccttcttctcccgttggtggcaccagcagacaaatgccacacaggaagtcgtgcgagaccttgtgcgccaggggcgcctggagttcgccaatggtggctgggtgatgaacgatgaggcagccacccactacggtgccatcgtggaccagatgacacttgggctgcgctttctggaggacacatttggcaatgatgggcgaccccgtgtggcctggcacattgaccccttcggccactctcgggagcaggcctcgctgtttgcgcagatgggcttcgacggcttcttctttgggcgccttgattatcaagataagtgggtacggatgcagaagctggagatggagcaggtgtggcgggccagcaccagcctgaagcccccgaccgcggacctcttcactggtgtgcttcccaatggttacaacccgccaaggaatctgtgctgggatgtgctgtgtgtcgatcagccgctggtggaggaccctcgcagccccgagtacaacgccaaggagctggtcgattacttcctaaatgtggccactgcccagggccggtattaccgcaccaaccacactgtgatgaccatgggctcggacttccaatatgagaatgccaacatgtggttcaagaaccttgacaagctcatccggctggtaaatgcgcagcaggcaaaaggaagcagtgtccatgttctctactccacccccgcttgttacctctgggagctgaacaaggccaacctcacctggtcagtgaaacatgacgacttcttcccttacgcggatggcccccaccagttctggaccggttacttttccagtcggccggccctcaaacgctacgagcgcctcagctacaacttcctgcaggtgtgcaaccagctggaggcgctggtgggcctggcggccaacgtgggaccctatggctccggagacagtgcacccctcaatgaggcgatggctgtgctccagcatcacgacgccgtcagcggcacctcccgccagcacgtggccaacgactacgcgcgccagcttgcggcaggctgggggccttgcgaggttcttctgagcaacgcgctggcgcggctcagaggcttcaaagatcacttcaccttttgccaacagctaaacatcagcatctgcccgctcagccagacggcggcgcgcttccaggtcatcgtttataatcccctggggcggaaggtgaattggatggtacggctgccggtcagcgaaggcgttttcgttgtgaaggaccccaatggcaggacagtgcccagcgatgtggtaatatttcccagctcagacagccaggcgcaccctccggagctgctgttctcagcctcactgcccgccctgggcttcagcacctattcagtagcccaggtgcctcgctggaagccccaggcccgcgcaccacagcccatccccagaagatcctggtcccctgctttaaccatcgaaaatgagcacatccgggcaacgtttgatcctgacacagggctgttgatggagattatgaacatgaatcagcaactcctgctgcctgttcgccagaccttcttctggtacaacgccagtataggtgacaacgaaagtgaccaggcctcaggtgcctacatcttcagacccaaccaacagaaaccgctgcctgtgagccgctgggctcagatccacctggtgaagacacccttggtgcaggaggtgcaccagaacttctcagcttggtgttcccaggtggttcgcctgtacccaggacagcggcacctggagctagagtggtcggtggggccgatacctgtgggcgacacctgggggaaggaggtcatcagccgttttgacacaccgctggagacaaagggacgcttctacacagacagcaatggccgggagatcctggagaggaggcgggattatcgacccacctggaaactgaaccagacggagcccgtggcaggaaactactatccagtcaacacccggatttacatcacggatggaaacatgcagctgactgtgctgactgaccgctcccaggggggcagcagcctgagagatggctcgctggagctcatggtgcaccgaaggctgctgaaggacgatggacgcggagtatcggagccactaatggagaacgggtcgggggcgtgggtgcgagggcgccacctggtgctgctggacacagcccaggctgcagccgccggacaccggctcctggcggagcaggaggtcctggcccctcaggtggtgctggccccgggtggcggcgccgcctacaatctcggggctcctccgcgcacgcagttctcagggctgcgcagggacctgccgccctcggtgcacctgctcacgctggccagctggggccccgaaatggtgctgctgcgcttggagcaccagtttgccgtaggagaggattccggacgtaacctgagcgcccccgttaccttgaacttgagggacctgttctccaccttcaccatcacccgcctgcaggagaccacgctggtggccaaccagctccgcgaggcagcctccaggctcaagtggacaacaaacacaggccccacaccccaccaaactccgtaccagctggacccggccaacatcacgctggaacccatggaaatccgcactttcctggcctcagttcaatggaaggaggtggatggttaggtctgctgggatgggccctccaagcccaagcctcctgctccgggggcagaccagactctgactctcctcttggggctgctgccattaaaacgctactactaagactc

SEQ ID NO: 151519 - DNA, 340 bp, Homo sapiens
  Payload ID: 9829
  Gene Symbol: MAN2B1
  Gene Name: mannosidase, alpha, class 2B, member 1
  ENST ID: ENST00000596591
  CDS Start-End: 1-203
ccagcgatgtggtaatatttcccagctcagacagccaggcgcaccctccggagctgctgttctcagcctcactgcccgccctgggcttcagcacctattcagtagcccaggtgcctcgctggaagccccaggcccgcgcaccacagcccatccccagaagatcctggtcccctgctttaaccatcgaaaatgagggctgttgatggagattatgaacatgaatcagcaactcctgctgcctgttcgccagaccttcttctggtacaacgccagtataggtgacaacgaaagtgaccaggcctcaggtgcctacatcttcagacccaaccaacagaaaccg

SEQ ID NO: 151520 - DNA, 535 bp, Homo sapiens
  Payload ID: 9829
  Gene Symbol: MAN2B1
  Gene Name: mannosidase, alpha, class 2B, member 1
  ENST ID: ENST00000486847
  CDS Start-End: 42-535
ctttccagggccggggaaccccaggaggaagctgctgagccatgggcgcctacgcgcgggcttcgggggtctgcgctcgcggctgcctggactcagcaggcccctggaccatgtcccgcgccctgcggccaccgctcccgcctctctgctttttccttttgttgctggcggctgccggtgctcgggccgggggatacgagtcaagaatgacatccagcacgccggtgtgcagtacatcctggactcggtcatctctgccttgctggcagatcccacccgtcgcttcatttacgtggagattgccttcttctcccgttggtggcaccagcagacaaatgccacacaggaagtcgtgcgagaccttgtgcgccaggatgggcttcgacggcttcttctttgggcgccttgattatcaagataagtgggtacggatgcagaagctggagatggagcaggtgtggcgggccagcaccagcctgaagcccccgaccgcggacctcttcactggtgtgcttcccaatggttacaacccgcc

SEQ ID NO: 151521 - DNA, 551 bp, Homo sapiens
  Payload ID: 9829
  Gene Symbol: MAN2B1
  Gene Name: mannosidase, alpha, class 2B, member 1
  ENST ID: ENST00000598876
  CDS Start-End: 36-551
agggccggggaaccccaggaggaagctgctgagccatgggcgcctacgcgcgggcttcgggggtctgcgctcgcggctgcctggactcagcaggcccctggaccatgtcccgcgccctgcggccaccgctcccgcctctctgctttttccttttgttgctggcggctgccggtgctcgggccgggggatacgaggtatgtgtgtttggggtccctgtgcagacatgccccacagtgcagccgaacatgctgaacgtgcacctgctgcctcacacacatgatgacgtgggctggctcaaaaccgtggaccagtacttttatggaatcaagaatgacatccagcacgccggtgtgcagtacatcctggactcggtcatctctgccttgctggcagatcccacccgtcgcttcatttacgtggagattgccttcttctcccgttggtggcaccagcagacaaatgccacacaggaagtcgtgcgagaccttgtgcgccaggggcgcctggagttcgccaatggtggctgggtgatgaacgatgaggcagccacc

SEQ ID NO: 151522 - DNA, 537 bp, Homo sapiens
  Payload ID: 9829
  Gene Symbol: MAN2B1
  Gene Name: mannosidase, alpha, class 2B, member 1
  ENST ID: ENST00000593686
  CDS Start-End: 1-422
agcttgcggcaggctgggggccttgcgaggttcttctgagcaacgcgctggcgcggctcagaggcttcaaagatcacttcaccttttgccaacagctaaacatcagcatctgcccgctcagccagacggcggcgcgcttccaggtcatcgtttataatcccctggggcggaaggtgaattggatggtacggctgccggtcagcgaaggcgttttcgttgtgaaggaccccaatggcaggacagtgcccagcgatctcagacagccaggcgcaccctccggagctgctgttctcagcctcactgcccgccctgggcttcagcacctattcagtagcccaggtgcctcgctggaagccccaggcccgcgcaccacagcccatccccagaagatcctggtcccctgctttaaccatcgaaaatgagcacatccgggcaacgtttgatcctgacacagggctgttgatggagattatgaacatgaatcagcaactcctgctgcctgttcgccagaccttcttctggtacaacgccagtata

SEQ ID NO: 151523 - DNA, 5143 bp, Homo sapiens
  Payload ID: 9830
  Gene Symbol: MAN2B2
  Gene Name: mannosidase, alpha, class 2B, member 2
  Uniprot ID: Q9Y2E5
  ENST ID: ENST00000285599
  CDS Start-End: 37-3066
gaagtgggcctggcaccttcccggcctgccgcagggatggggcagctgtgctggctgccgctgctggcaccgctcctgttgctgcgaccgccaggggtccagtccgccggccccatccgggccttcgtggtgccccacagccacatggacgtgggctgggtctacactgtgcaggaaagcatgcgggcgtacgccgccaatgtctacacctcagtggtggaagagctggcccgcggccagcagcgccggttcatcgctgtggagcaggagtttttccggctgtggtgggatggcgtcgcctcggaccagcagaaataccaggtccgccagctcctggaggaaggacgcctggaatttgtcatcggaggccaggtcatgcatgacgaggctgtgacgcaccttgatgaccagatcctgcagctcacagaaggacacgggtttctctatgaaacatttgggatccggccacagttctcctggcacgttgacccgtttggcgcctctgccacgacgcccaccctatttgcgctggcgggcttcaatgcccacctcggctcccggatcgactacgacctgaaggcagccatgcaggaggcccgggggctgcagttcgtgtggcgagggtccccatccctctcagagcggcaggaaatcttcacgcacatcatggaccagtacagctactgcaccccgtcccacatccctttctccaacaggtcaggattttactggaatggcgtggctgtcttccccaagcctccccaagatggggtgtaccccaacatgagtgagcctgtcaccccagccaacatcaacctctatgccgaggccctggtggccaacgtgaagcagagggccgcctggttccggacaccgcacgtcctctggccctggggatgtgacaagcagttcttcaatgcctcggtgcagtttgccaacatggacccgctgctggaccacatcaacagccatgctgccgagctcggtgtctcggtgcagtatgccacgctgggcgactacttccgtgccctgcacgctctcaatgtcacctggcgtgtccgcgaccaccacgacttcctgccctattccacagaaccattccaggcctggacgggcttctacacgtcccgcagctcactgaaggggctggcccggcgagccagcgccttgttgtatgccggggagtccatgttcacacgctacctgtggccggccccccgtgggcatctggaccccacctgggccctgcagcagctccagcagcttcgctgggccgtctccgaggtccagcaccatgatgccatcactgggactgagtcccccaaggtgagagacatgtacgcaacgcacctggcctcggggatgctgggcatgcgcaagctgatggcctccatcgtcctagatgagctccagccccaggcacccatggcggccagctccgatgcaggacctgcaggacattttgcctcggtctacaacccgctggcctggacggtcaccaccatcgtcaccctgactgttggtttccctggagtccgcgtcacagatgaggcgggccacccagtgccctcgcagatccagaactcaacagagaccccatctgcgtatgacctgcttattctgaccacaatcccaggcctcagttaccggcactacaacatcagacccactgcaggggcccaagagggcacccaggagccggctgccactgtggcgagcacccttcaatttggccgcaggctgaggagacgcaccagccatgcgggcaggtacttggtgcctgtggcaaacgactgctacattgtgctgctcgaccaggataccaacctgatgcacagcatctgggagagacagagtaaccgaacggtgcgcgtgacccaggaattcctggagtaccacgtcaacggggatgtgaaacagggccccatttccgataactacctgttcacaccgggcaaggccgcggtgcctgcgtgggaagctgtggaaatggagattgtggcgggacagcttgtgactgagatccggcagtacttctacaggaacatgacagcacagaattacacgtatgcaatccgctcccggctcacccatgtgccgcagggccatgacggggagctgctctgccaccggatagagcaggagtaccaagccggccccctggagctgaaccgtgaggctgtcctgaggaccagcaccaacctaaacagccagcaggtcatctactcagacaacaacggctaccagatgcagcggaggccctacgtttcctatgtgaacaacagcatcgcccggaattactaccccatggttcagtcggccttcatggaggatggcaaaagcaggcttgtgttgctgtcggagcgggcacatggcatctccagccaagggaatgggcaggtggaggtcatgctccaccggcggctgtggaacaacttcgactgggacctgggctacaacctcacgctgaacgacacctcagtcgtccacccagtgctctggcttctgctgggatcctggtccctcaccactgccctgcgccagaggagcgcactggcgctgcagcacaggcccgtggtgctgttcggagacctcgctgggactgcgccgaagctcccaggaccccagcagcaagaggccgtgacgctgcccccgaatcttcacctgcagatcctgagcatccctggctggcgctacagctccaaccacacggagcactctcagaatctccggaaaggccatcgaggggaagcccaggctgacctccgccgtgtcctgctgcggctctaccacctatatgaagtgggcgaggacccagtcctgtctcagccagtgacagtgaatctggaggctgtgctgcaggcgctggggtccgtggtggcagtggaggagcgctcgctcacagggacctgggatttgagcatgctgcaccgctggagctggaggacggggcctggccgccacagaggtgacaccacctctccctcgaggccaccaggaggccccatcatcaccgtccacccaaaggaaatccggacgttctttattcactttcaacagcagtgagccctgggcagatgccccggccccagggcttcccccaggaactccatgtaacagaacagacccaggacagggaaaagcagtgcggagggatgggactggggagtcagctgctcatctgcaggctaatggcaggaaatggtcatatttggggtttttccctaatttttttaaacaaaaattacattacaagatccaggttcttcccccccacactcaatcaagccagccctctcctcttctgtcacgtaaaggatatttggcacactcatgcgtcattcattcacaaaacacaaacccaggactttctgcctaaggcagagcacaagactcacagcagcaccgaagcgcatctgccgtccgggccctgccaggcttgccaggctgccagtggtaactgtggacctactgcgtgccacgtgttttcatagactcatcccatgctggcaacagccctgcaaggggcttggctctgccacagggcaggagaggaagttgtagcgcctagcgagagttccagccccagacgcccacctgtgcctcagggcaccgcctgccgagcagagaaggcacagcagccgtcagagtccatgagaggtgaaaccacacagcagggatgtccaatatcagaactattaatatcaataaaagtataaccttcccaggtctatgcccaagagaattgaaaacatccatccacacaatacctgtgctcccgcgttcatagcagcattactcaaaagtcaaacggtagcaacaacccaaatgtccatccacagatgaattaagacatgaagtgtgttctgtccatacaatggaatattatttggccataaaaaggaaggaaattctgacgcatgccacagcctgagtgaatcctacaaatattacgctaagtgaaagaagccaatcacgagtttatgtgaaatgtccagaataggcaaatctgtgtatcagagacaaagcacattggtggttgccaggtactggaggaagagagaagaggcatgacagctaacagggacgggctttctttggaagatgatgaaattgtggaatgatggttgcacaactttgtgaatatactagaaaccaatgaattaaaaactttggaagatgaattttatggtctgtgaattatatctcaattttaaaacttttttttttttttcccgagacagagtctcactctgtcgcccaggctggagtgcagtgtcaagatctcagctcactgcgacctgcacctcctgggttcaagcaattctccagcctctgcctcccgagtagctgctactagagatgcaccactgcgtcagctaatttttgtatttttagtagagacggggattcaccatgttggccaggctgatctggaactcctgacctcaggtgatctgcctgccccggcctcccaaagtgccaggattacaggcgtgagccaatgtgcccggcctaaaccgttttaaagagtaaactgtaagatgtaggaaattatttggtactctagggctgaaggaaagtacccagaaaggaccagcttggaaggagtcagacctctggacaacgtgcagtttggccaccagacagcaaagacagtctctggtttggccaggcaggagctgggctggagttgctgaccaagcaataggccacccctgtgaggtggggtcaggtgagcagccaccagaggcatggatgtgcagtgggaggttgaggcacaaggagtgaggcaggagccctttagagcatgtgggctgcatgaggcttggtttctgtgtcaagaagactatggaggctgggcagtggttcatgccttaatcccagcactttgggaggccaaagcaaccggatcactggtggtcagtagttcaagaccaggctggccaacatggtgaaaccccatctctactaaaaatacaaagttaaccgggtgtggtggtgtgcgcctgtagtcccagctactcgggaggctgaggcaggagaatcaatcacttgaacctgggaggcggaggagacctccgcctctgcactccagcctgggtgacaagagtgagactccgtctcaaaaaaaaaaaaaaaa

SEQ ID NO: 151524 - DNA, 2968 bp, Homo sapiens
  Payload ID: 9830
  Gene Symbol: MAN2B2
  Gene Name: mannosidase, alpha, class 2B, member 2
  ENST ID: ENST00000504248
  CDS Start-End: 23-2899
accttcccggcctgccgcagggatggggcagctgtgctggctgccgctgctggcaccgctcctgttgctgcgaccgccaggggtccagtccgccggccccatccgggccttcgtggtgccccacagccacatggacgtgggctgggtctacactgtgcaggaaagcatgcgggcgtacgccgccaatgtctacacctcagtggtggaagagctggcccgcggccagcagcgccggttcatcgctgtggagcaggagtttttccggctgtggtgggatggcgtcgcctcggaccagcagaaataccaggtccgccagctcctggaggaaggacgcctggaatttgtcatcggaggccaggtcatgcatgacgaggctgtgacgcaccttgatgaccagatcctgcagctcacagaaggacacgggtttctctatgaaacatttgggatccggccacagttctcctggcacgttgacccgtttggcgcctctgccacgacgcccaccctatttgcgctggcgggcttcaatgcccacctcggctcccggatcgactacgacctgaaggcagccatgcaggaggcccgggggctgcagttcgtgtggcgagggtccccatccctctcagagcggcaggaaatcttcacgcacatcatggaccagtacagctactgcaccccgtcccacatccctttctccaacaggtcaggattttactggaatggcgtggctgtcttccccaagcctccccaagatggggtgtaccccaacatgagtgagcctgtcaccccagccaacatcaacctctatgccgagctcggtgtctcggtgcagtatgccacgctgggcgactacttccgtgccctgcacgctctcaatgtcacctggcgtgtccgcgaccaccacgacttcctgccctattccacagaaccattccaggcctggacgggcttctacacgtcccgcagctcactgaaggggctggcccggcgagccagcgccttgttgtatgccggggagtccatgttcacacgctacctgtggccggccccccgtgggcatctggaccccacctgggccctgcagcagctccagcagcttcgctgggccgtctccgaggtccagcaccatgatgccatcactgggactgagtcccccaaggtgagagacatgtacgcaacgcacctggcctcggggatgctgggcatgcgcaagctgatggcctccatcgtcctagatgagctccagccccaggcacccatggcggccagctccgatgcaggacctgcaggacattttgcctcggtctacaacccgctggcctggacggtcaccaccatcgtcaccctgactgttggtttccctggagtccgcgtcacagatgaggcgggccacccagtgccctcgcagatccagaactcaacagagaccccatctgcgtatgacctgcttattctgaccacaatcccaggcctcagttaccggcactacaacatcagacccactgcaggggcccaagagggcacccaggagccggctgccactgtggcgagcacccttcaatttggccgcaggctgaggagacgcaccagccatgcgggcaggtacttggtgcctgtggcaaacgactgctacattgtgctgctcgaccaggataccaacctgatgcacagcatctgggagagacagagtaaccgaacggtgcgcgtgacccaggaattcctggagtaccacgtcaacggggatgtgaaacagggccccatttccgataactacctgttcacaccgggcaaggccgcggtgcctgcgtgggaagctgtggaaatggagattgtggcgggacagcttgtgactgagatccggcagtacttctacaggaacatgacagcacagaattacacgtatgcaatccgctcccggctcacccatgtgccgcagggccatgacggggagctgctctgccaccggatagagcaggagtaccaagccggccccctggagctgaaccgtgaggctgtcctgaggaccagcaccaacctaaacagccagcaggtcatctactcagacaacaacggctaccagatgcagcggaggccctacgtttcctatgtgaacaacagcatcgcccggaattactaccccatggttcagtcggccttcatggaggatggcaaaagcaggcttgtgttgctgtcggagcgggcacatggcatctccagccaagggaatgggcaggtggaggtcatgctccaccggcggctgtggaacaacttcgactgggacctgggctacaacctcacgctgaacgacacctcagtcgtccacccagtgctctggcttctgctgggatcctggtccctcaccactgccctgcgccagaggagcgcactggcgctgcagcacaggcccgtggtgctgttcggagacctcgctgggactgcgccgaagctcccaggaccccagcagcaagaggccgtgacgctgcccccgaatcttcacctgcagatcctgagcatccctggctggcgctacagctccaaccacacggagcactctcagaatctccggaaaggccatcgaggggaagcccaggctgacctccgccgtgtcctgctgcggctctaccacctatatgaagtgggcgaggacccagtcctgtctcagccagtgacagtgaatctggaggctgtgctgcaggcgctggggtccgtggtggcagtggaggagcgctcgctcacagggacctgggatttgagcatgctgcaccgctggagctggaggacggggcctggccgccacagaggtgacaccacctctccctcgaggccaccaggaggccccatcatcaccgtccacccaaaggaaatccggacgttctttattcactttcaacagcagtgagccctgggcagatgccccggccccagggcttcccccaggaactccatgtaacagaacagacccaggaca

SEQ ID NO: 151525 - DNA, 7719 bp, Homo sapiens
  Payload ID: 9830
  Gene Symbol: MAN2B2
  Gene Name: mannosidase, alpha, class 2B, member 2
  ENST ID: ENST00000505907
  CDS Start-End: 1-2861
ggcagctgtgctggctgccgctgctggcaccgctcctgttgctgcgaccgccaggggtccagtccgccggccccatccgggccttcgtggtgccccacagccacatggacgtgggctgggtctacactgtgcaggaaagcatgcgggcgtacgccgccaatgtctacacctcagtggtggaagagctggcccgcggccagcagcgccggttcatcgctgtggagcaggagtttttccggctgtggtgggatggcgtcgcctcggaccagcagaaataccaggtccgccagctcctggaggaaggacgcctggaatttgtcatcggaggccaggtcatgcatgacgaggctgtgacgcaccttgatgaccagatcctgcagctcacagaaggacacgggtttctctatgaaacatttgggatccggccacagttctcctggcacgttgacccgtttggcgcctctgccacgacgcccaccctatttgcgctggcgggcttcaatgcccacctcggctcccggatcgactacgacctgaaggcagccatgcaggaggcccgggggctgcagttcgtgtggcgagggtccccatccctctcagagcggcaggaaatcttcacgcacatcatggaccagtacagctactgcaccccgtcccacatccctttctccaacaggtcaggattttactggaatggcgtggctgtcttccccaagcctccccaagatggggtgtaccccaacatgagtgagcctgtcaccccagccaacatcaacctctatgccgaggccctggtggccaacgtgaagcagagggccgcctggttccggacaccgcacgtcctctggccctggggatgtgacaagcagttcttcaatgcctcggtgcagtttgccaacatggacccgctgctggaccacatcaacagccatgctgccgagctcggtgtctcggtgcagtatgccacgctgggcgactacttccgtgccctgcacgctctcaatgtcacctggcgtgtccgcgaccaccacgacttcctgccctattccacagaaccattccaggcctggacgggcttctacacgtcccgcagctcactgaaggggctggcccggcgagccagcgccttgttgtatgccggggagtccatgttcacacgctacctgtggccggccccccgtgggcatctggaccccacctgggccctgcagcagctccagcagcttcgctgggccgtctccgaggtccagcaccatgatgccatcactgggactgagtcccccaaggtgagagacatgtacgcaacgcacctggcctcggggatgctgggcatgcgcaagctgatggcctccatcgtcctagatgagctccagccccaggcacccatggcggccagctccgatgcaggacctgcaggacattttgcctcggtctacaacccgctggcctggacggtcaccaccatcgtcaccctgactgttggtttccctggagtccgcgtcacagatgaggcgggccacccagtgccctcgcagatccagaactcaacagagaccccatctgcgtatgacctgcttattctgaccacaatcccaggcctcagttaccggcactacaacatcagacccactgcaggggcccaagagggcacccaggagccggctgccactgtggcgagcacccttcaatttggccgcaggctgaggagacgcaccagccatgcgggcaggtacttggtgcctgtggcaaacgactgctacattgtgctgctcgaccaggataccaacctgatgcacagcatctgggagagacagagtaaccgaacggtgcgcgtgacccaggaattcctggagtaccacgtcaacggggatgtgaaacagggccccatttccgataactacctgttcacaccgggcaaggccgcggtgcctgcgtgggaagctgtggaaatggagattgtggcgggacagcttgtgactgagatccggcagtacttctacaggaacatgacagcacagaattacacgtatgcaatccgctcccggctcacccatgtgccgcagggccatgacggggagctgctctgccaccggatagagcaggagtaccaagccggccccctggagctgaaccgtgaggctgtcctgaggaccagcaccaacctaaacagccagcaggtcatctactcagacaacaacggctaccagatgcagcggaggccctacgtttcctatgtgaacaacagcatcgcccggaattactaccccatggttcagtcggccttcatggaggatggcaaaagcaggcttgtgttgctgtcggagcgggcacatggcatctccagccaagggaatgggcaggtggaggtcatgctccaccggcggctgtggaacaacttcgactgggacctgggctacaacctcacgctgaacgacacctcagtcgtccacccagtgctctggcttctgctgggatcctggtccctcaccactgccctgcgccagaggagcgcactggcgctgcagcacaggcccgtggtgctgttcggagacctcgctgggactgcgccgaagctcccaggaccccagcagcaagaggccgtgacgctgcccccgaatcttcacctgcagatcctgagcatccctggctggcgctacagctccaaccacacggagcactctcagaatctccggaaaggccatcgaggggaagcccaggctgacctccgccgtgtcctgctgcggctctaccacctatatgaagtgggcgaggacccagtcctgtctcagccagtgacagtgaatctggaggtgaacttccccacccccatccagaccataagccagggaagcaaaccctagatgaagccccaagaaactgccttggcaaagagatccacgagggcttcctcccaaatggacgctggtatgggccccaccccgcccttcttcatggtcttctgggtttgtcaggtattacaactggcctggttttttagggttttttgtgtatatgtgagacaggatctcactctgttgcccagtctggggtgcagtggcacaatctcagctcactgcaacctctgcctccctggctcaagtgatcctcccacctcaacctcccaagtaactgggatcacaggggcgcgccaccacgatggctaagtttttttttttttttttgagaccgagtttcgctctcgtcccccaggctggagtgcaatggtgcgctctcagctggctgcaacctccatctcccaggttcaagtgattctcctgcctcagcctcccgagtagctgggattacaggcatgtgccaccacgcccggctaatttttttgtacttttagtagagacagggtttctccatgttggtcaggctggtcacgaacccctgacttcaggtgatccacctgcctcggcctcgcaaagtgctgggattacaggcgtgagccaccaagcctggcctagtttttttatttttagtagagacacggtcttgctgtgttgctcaggctggtctcgaacgtctggcctcaagcaatctgcctgtcttagcctcctgaagtgctgggattacaggcgtgagtggcctgtattttctttcttatttattctgtggtaaaacttttaaaacacagacaacatctgtgtaatccaaaaacaaaacagattccccatagagttgctttgaaaggtgacttagagtcagacaatccagggtccacacccaggcccctctacgggggcatctccggcaccccatgcctctgggcctcagtttccccccatgtaaaatggggagaggtgagagttctttgcccagaaggttgctgagaggccctggcactaaggggcctcgtgcagtgtcagggcccccaggcctcgtccccttccaggttcccctcttggctgatgttgccctctcagctctactatcaggcgaggcttccgccacctggcctgcccacgctccctccccagaaggcatgacctgagccgcctcatttctttcccagtttgcattctttctatttcatttcctgctcatggagaatttctgtgaatctctgtgtttctgccttgggcctccttcgacatctgagtcttcaggggaatccagagaagccccagtaccttttcgccatgatgtcttactgggccacccacctcctctttcatgatcctcgccacggaggatcctttcctcacggtccctggcctgcctgagagcaggtctaggccatggcgggtaccagtgcccagcacagggccagcctgccctgggaagcaaggaggccagcgtgggacctggaagttggtcatctgatgctcccccgtttcacagatggaagcaccaaggccctgagacaaggagacggttgggatggacaccatgactccctgcccaacgtggacggtggtggggtggaaagaccattgagttaggaacgcagtgagtttggctgcaagtcacaaaacacctaacagatgtgcttagaacagaggacagagtgttttctcaccgaacaggcatgtccgatggaccccaagcgctgtcaccgtgggcccgatcactgtcatcttcccgccatcgccggcagactggcttttgtcttttgccgtctgcttgtttgcggtcacaagatggcacaggcctccctcatgagcaaatttcaaggcagggtagggctcagcagtagtggccagaaaggccttgccctagcgtggctctctccctccgtcagcacacagaagcttctccaagagccacccccagccctcctgctccacagacttttccagacccctaagggcctcctgcctcccctaggtgtaagggaggctgggacaaggcctattgggaaagggggatggggtaactgtggctggcttcctccctggactgggcacggggccacctgagcaatgtggggagaggagaactccgcggtggggtgggcagctcaaaatgccacacctcccgggctgctcctccagctcggccacctggtaaagcatgcacctcccgcttcagtgtcctcatctgtaaagtacacggccagtcctgtcctcgcagatgtgctgtgagaagcagatgagggagctgtgtcaggcaccaggggaggacctgggctcctgaggacaccgagttcgtggtgtgtctgccctgctgctgtcttggttctctgctcagctctggaacttggtgcagctcactctccctctgctcctctccctgcaggctgtgctgcaggcgctggggtccgtggtggcagtggaggagcgctcgctcacagggacctgggatttgagcatgctgcaccgctggagctggaggacggggcctggccgccacagaggtttggggacccccgcttcagctccctacccaggactcccagccaggctcagcagctggtcagacccggtgcacatccaaccatctgcctgtcccggcctgtgcgaccttgcgaggctgctttcctactctgaacccgcagccctcccaaatctactacagtcggttaagaaaggctttgggttagtctctgcctgccagggctccacacaggcgtgtgtgtgcacttgtacgtgtgcacacgcagaccacacgccctgcctgtgccctgggtgacagctaggggcccaggggcttctgcccaccttggccctgctgacctcagcccatcagccggtccctgcctcatacgacatgtgccaccgtgagctcctgcactacaggcagcttccaggctccactccctgtccgcaccatgccctctgcctgggacgcacaggtcccattcactctggccagcacctgctcaagctccccaggatgcctccccagagtcaccaaccaggccaagtgcctcctccactctcctggccccaggggtttcttctgtcctgtgcagctcgttgtccactacacacagcatggtggcgggtgcatggtgcacgctcagttggtggtgggaggaaggaagggacggagggagggagggagggaagatgatgttggttggaaagaaggaaggaagatggatgagtgatagataagtggacggctccctcccaagatcgaagcccaaccccagggcatgccttcaggggagcctggtgaggcaagggcagactcaccagatggtctcagaaagctcttgggctttgagggcaacacccatgaggaattgaggccactagggccaggaccaacctatgaattgccctcagggtgggcagaaacgccaagaggcccacaggagtcctggcagaaggggatgccataggccgttgccacggtgggagccacagcagactgtagccaggtgcagtgtggtgagaaggaggctgggagccacagcagattgtagacaggtgcaggagggtgagagggaggctgggagccacagcagactgtagacaggtgcagggggtgagagggaggctgggaggaggcatcccaggccacactggacagatcacctctgttcccctaggtgacaccacctctccctcgaggccaccaggaggccccatcatcaccgtccacccaaaggaaatccggacgttctttattcactttcaacagcagtgagccctgggcagatgccccggccccagggcttcccccaggaactccatgtaacagaacagacccaggacagggaaaagcagtgcggagggatgggactggggagtcagctgctcatctgcaggctaatggcaggaaatggtcatatttggggtttttccctaatttttttaaacaaaaattacattacaagatccaggttcttcccccccacactcaatcaagccagccctctcctcttctgtcacgtaaaggatatttggcacactcatgcgtcattcattcacaaaacacaaacccaggactttctgcctaaggcagagcacaagactcacagcagcaccgaagcgcatctgccgtccgggccctgccaggcttgccaggctgccagtggtaactgtggacctactgcgtgccacgtgttttcatagactcatcccatgctggcaacagccctgcaaggggcttggctctgccacagggcaggagaggaagttgtagcgcctagcgagagttccagccccagacgcccacctgtgcctcagggcaccgcctgccgagcagagaaggcacagcagccgtcagagtccatgagaggtgaaaccacacagcagggatgtccaatatcagaactattaatatcaataaaagtataaccttcccaggtctatgcccaagagaattgaaaacatccatccacacaatacctgtgctcccgcgttcatagcagcattactcaaaagtcaaacggtagcaacaacccaaatgtccatccacagatgaattaagacatgaagtgtgttctgtccatacaatggaatattatttggccataaaaaggaaggaaattctgacgcatgccacagcctgagtgaatcctacaaatattacgctaagtgaaagaagccaatcacgagtttatgtgaaatgtccagaataggcaaatctgtgtatcagagacaaagcacattggtggttgccaggtactggaggaagagagaagaggcatgacagctaacagggacgggctttctttggaagatgatgaaattgtggaatgatggttgcacaactttgtgaatatactagaaaccaatgaattaaaaactttggaagatg

SEQ ID NO: 151526 - DNA, 3284 bp, Homo sapiens
  Payload ID: 9831
  Gene Symbol: MAN2C1
  Gene Name: mannosidase, alpha, class 2C, member 1
  Uniprot ID: Q9NTJ4
  ENST ID: ENST00000267978
  CDS Start-End: 48-3170
aacggtagcgccaggggccttccggaaagaggagcgagagcccggcgatggcggctgcgccggccttgaagcactggcgcaccacgctggagcgggtggagaagttcgtgtcgccgctctactttaccgactgtaacctccgcggcaggctttttggggccagctgccctgtggctgtgctctccagcttcctgacgccggagagacttccctaccaggaggcagtccagcgggacttccgccccgcgcaggtcggcgacagcttcggacccacatggtggacctgctggttccgggtggagctgaccatcccagaggcatgggtgggccaggaagttcacctttgctgggaaagtgatggagaaggtctggtgtggcgtgatggagaacctgtccagggtttaaccaaagagggtgagaagaccagctatgtcctgactgacaggctgggggaaagagacccccgaagcctcactctctatgtggaagtagcctgcaatgggctcctgggggccgggaagggaagcatgattgcagcccctgaccctgagaagatgttccagctgagccgggctgagctagctgtgttccaccgggatgtccacatgctcctggtggatctggagctgctgctgggcatagccaagggcctcgggaaggacaaccagcgcagcttccaggccctgtacacagccaatcagatggtgaacgtgtgtgaccctgcccagcccgagaccttcccagtggcccaggccctggcctccaggttctttggccaacatgggggtgaaagccaacacaccattcatgccacagggcactgccacattgatacagcctggctttggcccttcaaagagactgtgaggaaatgtgcccggagctgggtgaccgccctgcagctcatggagcggaaccctgagttcatctttgcctgctcccaggcgcagcagctggaatgggtgaagagccgctaccctggcctgtactcccgcatccaggagtttgcgtgccgtgggcagtttgtgcctgtggggggcacctgggtggagatggatgggaacctgcccagtggagaggccatggtgaggcagtttttgcagggccagaacttctttctgcaggagtttgggaagatgtgctctgagttctggctgccggacacctttggctactcagcacagctcccccagatcatgcacggctgtggcatcaggcgctttctcacccagaaattgagctggaatttggtgaactccttcccacaccatacatttttctgggagggcctggatggctcccgtgtactggtccacttcccacctggcgactcctatgggatgcagggcagcgtggaggaggtgctgaagaccgtggccaacaaccgggacaaggggcgggccaaccacagtgccttcctctttggctttggggatgggggtggtggccccacccagaccatgctggaccgcctgaagcgcctgagcaatacggatgggctgcccagggtgcagctatcttctccaagacagctcttctcagcactggagagtgactcagagcagctgtgcacgtgggttggggagctcttcttggagctgcacaatggcacatacaccacccatgcccagatcaagaaggggaaccgggaatgtgagcggatcctgcacgacgtggagctgctcagtagcctggccctggcccgcagtgcccagttcctatacccagcagcccagctgcagcacctctggaggctccttcttctgaaccagttccatgatgtggtgactggaagctgcatccagatggtggcagaggaagccatgtgccattatgaagacatccgttcccatggcaatacactgctcagcgctgcagccgcagccctgtgtgctggggagccaggtcctgagggcctcctcatcgtcaacacactgccctggaagcggatcgaagtgatggccctgcccaaaccgggcggggcccacagcctagccctggtgacagtgcccagcatgggctatgctcctgttcctccccccacctcactgcagcccctgctgccccagcagcctgtgttcgtagtgcaagagactgatggctccgtgactctggacaatggcatcatccgagtgaagctggacccaactggtcgcctgacgtccttggtcctggtggcctctggcagggaggccattgctgagggcgccgtggggaaccagtttgtgctatttgatgatgtccccttgtactgggatgcatgggacgtcatggactaccacctggagacacggaagcctgtgctgggccaggcagggaccctggcagtgggcaccgagggcggcctgcggggcagcgcctggttcttgctacagatcagccccaacagtcggcttagccaggaggttgtgctggacgttggctgcccctatgtccgcttccacaccgaggtacactggcatgaggcccacaagttcctgaaggtggagttccctgctcgcgtgcggagttcccaggccacctatgagatccagtttgggcacctgcagcgacctacccactacaatacctcttgggactgggctcgatttgaggtgtgggcccatcgctggatggatctgtcagaacacggctttgggctggccctgctcaacgactgcaagtatggcgcgtcagtgcgaggcagcatcctcagcctctcgctcttgcgggcgcctaaagccccggacgctactgctgacacggggcgccacgagttcacctatgcactgatgccgcacaagggctctttccaggatgctggcgttatccaagctgcctacagcctaaacttccccctgttggctctgccagcccccagcccagcgcccgccacctcctggagtgcgttttccgtgtcttcacccgcggtcgtattggagaccgtcaagcaggcggagagcagcccccagcgccgctcgctggtcctgaggctgtatgaggcccacggcagccacgtggactgctggctgcacttgtcgctgccggttcaggaggccatcctctgcgatctcttggagcgaccagaccctgctggccacttgacccttcgggacaaccgcctgaagctcaccttttctcccttccaagtgctgtccctgttgctcgtgcttcagcctccgccacactgagtccctggggctggggttttgtttgtagaaggctctggggactcctaatttctgcttccccagcctaaagcagggatcagtcttttcttgtggaataaatccttggatcgggaa

SEQ ID NO: 151527 - DNA, 1111 bp, Homo sapiens
  Payload ID: 9831
  Gene Symbol: MAN2C1
  Gene Name: mannosidase, alpha, class 2C, member 1
  ENST ID: ENST00000421803
  CDS Start-End: 23-652
aaagaggagcgagagcccggcgatggcggctgcgccggccttgaagcactggcgcaccacgctggagcgggtggagaagttcgtgtcgccgctctactttaccgactgtaacctccgcggcaggctttttggggccagctgccctgtggctgtgctctccagcttcctgacgccggagagacttccctaccaggaggcagtccagcgggacttccgccccgcgcaggtcggcgacagcttcggacccacatggtggacctgctggttccgggtggagctgaccatcccagaggcatgggtgggccaggaagttcacctttgctgggaaagtgatggagaaggtctggtgtggcgtgatggagaacctgtccagggtttaaccaaagagggtgagaagaccagctatgtcctgactgacaggctgggggaaagagacccccgaagcctcactctctatgtggaagtagcctgcaatgggctcctgggggccgggaagggaagcatgattgcagcccctgaccctgagaagatgttccagctgagccgggctgagctagctgtgttccaccgggatgtccacatgctcctggtggatctggagctgctgctgggcatagccaagcctggctttggcccttcaaagagactgtgaggaaatgtgcccggagctgggtgaccgccctgcagctcatggagcggaaccctgagttcatctttgcctgctcccaggcgcagcagctggaatgggtgaagagccgctaccctggcctgtactcccgcatccaggagtttgcgtgccgtgggcagtttgtgcctgtggggggcacctgggtggagatggatgggaacctgcccagtggagaggccatggtgaggcagtttttgcagggccagaacttctttctgcaggagtttgggaagatgtgctctgagttctggctgccggacacctttggctactcagcacagctcccccagatcatgcacggctgtggcatcaggcgctttctcacccagaaattgagctggaatttggtgaactccttcccacaccatacatttttctgggagggcctggatggctcccgtgtactggtccacttcccacctg

SEQ ID NO: 151528 - DNA, 867 bp, Homo sapiens
  Payload ID: 9831
  Gene Symbol: MAN2C1
  Gene Name: mannosidase, alpha, class 2C, member 1
  ENST ID: ENST00000569355
  CDS Start-End: 27-569
ccggaaagaggagcgagagcccggcgatggcggctgcgccggccttgaagcactggcgcaccacgctggagcgggtggagaagttcgtgtcgccgctctactttaccgactgtaacctccgcggcaggctttttggggccagctgccctgtggctgtgctctccagcttcctgacgccggagagacttccctaccaggaggcagtccagcgggacttccgccccgcgcaggtcggcgacagcttcggacccacatggtggacctgctggttccgggtggagctgaccatcccagaggcatgggtgggccaggaagttcacctttgctgggaaagtgatggagaaggtctggtgtggcgtgatggagaacctgtccagggtttaaccaaagagggtgagaagaccagctatgtcctgactgacaggctgggggaaagagacccccgaaggctggagtgcaatggcacgatctcggctcactgcgaccgccgcctcccaggttcaagcaattctcctgcctcagcctccctactagctgagattacagcctcactctctatgtggaagtagcctgcaatgggctcctgggggccgggaagggaagcatgattgcagcccctgaccctgagaagatgttccagctgagccgggctgagctagctgtgttccaccgggatgtccacatgctcctggtggatctggagctgctgctgggcatagccaagggcctcgggaaggacaaccagcgcagcttccaggccctgtacacagccaatcagatggtgaacgtgtgtgaccctgcccagcccgagaccttcccagtggcccaggccctggcctccaggttctttggccaacatgggggtga

SEQ ID NO: 151529 - DNA, 2961 bp, Homo sapiens
  Payload ID: 9831
  Gene Symbol: MAN2C1
  Gene Name: mannosidase, alpha, class 2C, member 1
  Uniprot ID: Q9NTJ4
  ENST ID: ENST00000563622
  CDS Start-End: 22-2847
aagaggagcgagagcccggcgatggcggctgcgccggccttgaagcactggcgcaccacgctggagcgggtggagaagttcgtgtcgccgctctactttaccgactgtaacctccgcggcaggctttttggggccagctgccctgtggctgtgctctccagcttcctgacgccggagagacttccctaccaggaggcagtccagcgggacttccgccccgcgcaggtcggcgacagcttcggacccacatggtggacctgctggttccgggtggagctgaccatcccagaggcatgggtgggccaggaagttcacctttgctgggaaagtgatggagaaggtctggtgtggcgtgatggagaacctgtccagggtttaaccaaagagggtgagaagaccagctatgtcctgactgacaggctgggggaaagagacccccgaagcctcactctctatgtggaagtagcctgcaatgggctcctgggggccgggaagggaagcatgattgcagcccctgaccctgagaagatgttccagctgagccgggctgagctagctgtgttccaccgggatgtccacatgctcctggtggatctggagctgctgctgggcatagccaaggcgcagcagctggaatgggtgaagagccgctaccctggcctgtactcccgcatccaggagtttgcgtgccgtgggcagtttgtgcctgtggggggcacctgggtggagatggatgggaacctgcccagtggagaggccatggtgaggcagtttttgcagggccagaacttctttctgcaggagtttgggaagatgtgctctgagttctggctgccggacacctttggctactcagcacagctcccccagatcatgcacggctgtggcatcaggcgctttctcacccagaaattgagctggaatttggtgaactccttcccacaccatacatttttctgggagggcctggatggctcccgtgtactggtccacttcccacctggcgactcctatgggatgcagggcagcgtggaggaggtgctgaagaccgtggccaacaaccgggacaaggggcgggccaaccacagtgccttcctctttggctttggggatgggggtggtggccccacccagaccatgctggaccgcctgaagcgcctgagcaatacggatgggctgcccagggtgcagctatcttctccaagacagctcttctcagcactggagagtgactcagagcagctgtgcacgtgggttggggagctcttcttggagctgcacaatggcacatacaccacccatgcccagatcaagaaggggaaccgggaatgtgagcggatcctgcacgacgtggagctgctcagtagcctggccctggcccgcagtgcccagttcctatacccagcagcccagctgcagcacctctggaggctccttcttctgaaccagttccatgatgtggtgactggaagctgcatccagatggtggcagaggaagccatgtgccattatgaagacatccgttcccatggcaatacactgctcagcgctgcagccgcagccctgtgtgctggggagccaggtcctgagggcctcctcatcgtcaacacactgccctggaagcggatcgaagtgatggccctgcccaaaccgggcggggcccacagcctagccctggtgacagtgcccagcatgggctatgctcctgttcctccccccacctcactgcagcccctgctgccccagcagcctgtgttcgtagtgcaagagactgatggctccgtgactctggacaatggcatcatccgagtgaagctggacccaactggtcgcctgacgtccttggtcctggtggcctctggcagggaggccattgctgagggcgccgtggggaaccagtttgtgctatttgatgatgtccccttgtactgggatgcatgggacgtcatggactaccacctggagacacggaagcctgtgctgggccaggcagggaccctggcagtgggcaccgagggcggcctgcggggcagcgcctggttcttgctacagatcagccccaacagtcggcttagccaggaggttgtgctggacgttggctgcccctatgtccgcttccacaccgaggtacactggcatgaggcccacaagttcctgaaggtggagttccctgctcgcgtgcggagttcccaggccacctatgagatccagtttgggcacctgcagcgacctacccactacaatacctcttgggactgggctcgatttgaggtgtgggcccatcgctggatggatctgtcagaacacggctttgggctggccctgctcaacgactgcaagtatggcgcgtcagtgcgaggcagcatcctcagcctctcgctcttgcgggcgcctaaagccccggacgctactgctgacacggggcgccacgagttcacctatgcactgatgccgcacaagggctctttccaggatgctggcgttatccaagctgcctacagcctaaacttccccctgttggctctgccagcccccagcccagcgcccgccacctcctggagtgcgttttccgtgtcttcacccgcggtcgtattggagaccgtcaagcaggcggagagcagcccccagcgccgctcgctggtcctgaggctgtatgaggcccacggcagccacgtggactgctggctgcacttgtcgctgccggttcaggaggccatcctctgcgatctcttggagcgaccagaccctgctggccacttgacccttcgggacaaccgcctgaagctcaccttttctcccttccaagtgctgtccctgttgctcgtgcttcagcctccgccacactgagtccctggggctggggttttgtttgtagaaggctctggggactcctaatttctgcttccccagcctaaagcagggatcagtcttttcttgtggaataaatccttggatcgggaa

SEQ ID NO: 151530 - DNA, 580 bp, Homo sapiens
  Payload ID: 9831
  Gene Symbol: MAN2C1
  Gene Name: mannosidase, alpha, class 2C, member 1
  ENST ID: ENST00000566256
  CDS Start-End: 30-580
cttccggaaagaggagcgagagcccggcgatggcggctgcgccggccttgaagcactggcgcaccacgctggagcgggtggagaagttcgtgtcgccgctctactttaccgactgtaacctccgcggcagcttcctgacgccggagagacttccctaccaggaggcagtccagcgggacttccgccccgcgcaggtcggcgacagcttcggacccacatggtggacctgctggttccgggtggagctgaccatcccagaggcatgggtgggccaggaagttcacctttgctgggaaagtgatggagaaggtctggtgtggcgtgatggagaacctgtccagggtttaaccaaagagggtgagaagaccagctatgtcctgactgacaggctgggggaaagagacccccgaagcctcactctctatgtggaagtagcctgcaatgggctcctgggggccgggaagggaagcatgattgcagcccctgaccctgagaagatgttccagctgagccgggctgagctagctgtgttccaccgggatgtccacatgctcctggtggatctggagctgctgctggg

SEQ ID NO: 151531 - DNA, 602 bp, Homo sapiens
  Payload ID: 9831
  Gene Symbol: MAN2C1
  Gene Name: mannosidase, alpha, class 2C, member 1
  ENST ID: ENST00000562071
  CDS Start-End: 30-299
cttccggaaagaggagcgagagcccggcgatggcggctgcgccggccttgaagcactggcgcaccacgctggagcgggtggagaagttcgtgtcgccgctctactttaccgactgtaacctccgcggcaggctttttggggccagctgccctgtggctgtgctctccagcttcctgacgccggagagacttccctaccaggaggcagtccagcgggacttccgccccgcgcaggtcggcgacagcttcggacccacctctcttgcagatggtggacctgctggttccgggtggagctgaccatcccagaggcatgggtgggccaggaagttcacctttgctgggaaagtgatggagaaggtctggtgtggcgtgatggagaacctgtccagggtttaaccaaagagggtgagaagaccagctatgtcctgactgacaggctgggggaaagagacccccgaagcctcactctctatgtggaagtagcctgcaatgggctcctgggggccgggaagggaagcatgattgcagcccctgaccctgagaagatgttccagctgagccgggctgagctagctgtgttccaccgggatgtccacatgc

SEQ ID NO: 151532 - DNA, 3177 bp, Homo sapiens
  Payload ID: 9831
  Gene Symbol: MAN2C1
  Gene Name: mannosidase, alpha, class 2C, member 1
  Uniprot ID: Q9NTJ4
  ENST ID: ENST00000569482
  CDS Start-End: 10-3063
agcccggcgatggcggctgcgccggccttgaagcactggcgcaccacgctggagcgggtggagaagttcgtgtcgccgctctactttaccgactgtaacctccgcggcaggctttttggggccagctgccctgtggctgtgctctccagcttcctgacgccggagagacttccctaccaggaggcagtccagcgggacttccgccccgcgcaggtcggcgacagcttcggacccacatggtggacctgctggttccgggtggagctgaccatcccagaggcatgggtgggccaggaagttcacctttgctgggaaagtgatggagaaggtctggtgtggcgtgatggagaacctgtccagggtttaaccaaagagggtgagaagaccagctatgtcctgactgacaggctgggggaaagagacccccgaagcctcactctctatgtggaagtagcctgcaatgggctcctgggggccgggaagggaagcatgattgcagcccctgaccctgagaagatgttccagctgagccgggctgagctagctgtgttccaccgggatgtccacatgctcctggtggatctggagctgctgctgggcatagccaagggcctcgggaaggacaaccagcgcagcttccaggccctgtacacagccaatcagatggtgaacgtgtgtgaccctgcccagcccgagaccttcccagtggcccaggccctggcctccaggttctttggccaacatgggggtgaaagccaacacaccattcatgccacagggcactgccacattgatacagcctggctttggcccttcaaagagactgtgaggaaatgtgcccggagctgggtgaccgccctgcagctcatggagcggaaccctgagttcatctttgcctgctcccaggcgcagcagctggaatgggtgaagagccgctaccctggcctgtactcccgcatccaggagtttgcgtgccgtgggcagtttgtgcctgtggggggcacctgggtggagatggatgggaacctgcccagtggagaggccatggtgaggcagtttttgcagggccagaacttctttctgcaggagtttgggaagatgtgctctgagttctggctgccggacacctttggctactcagcacagctcccccagatcatgcacggctgtggcatcaggcgctttctcacccagaaattgagctggaatttggtgaactccttcccacaccatacatttttctgggagggcctggatggctcccgtgtactggtccacttcccacctggcgactcctatgggatgcagggcagcgtggaggaggtgctgaagaccgtggccaacaaccgggacaaggggcgggccaaccacagtgccttcctctttggctttggggatgggggtggtggccccacccagaccatgctggaccgcctgaagcgcctgagcaatacggatgggctgcccagggtgcagctatcttctccaagacagctcttctcagcactggagagtgactcagagcagctgtgcacgtgggttggggagctcttcttggagctgcacaatggcacatacaccacccatgcccagatcaagaaggggaaccgggaatgtgagcggatcctgcacgacgtggagctgctcagtagcctggccctggcccgcagtgcccagttcctatacccagcagcccagctgcagcacctctggaggctccttcttctgaaccagttccatgatgtggtgactggaagctgcatccagatggtggcagaggaagccatgtgccattatgaagacatccgttcccatggcaatacactgctcagcgctgcagccgcagccctgtgtgctggggagccaggtcctgagggcctcctcatcgtcaacacactgccctggaagcggatcgaagtgatggccctgcccaaaccgggcggggcccacagcctagccctggtgacagtgcccagcatgggctatgctcctgttcctccccccacctcactgcagcccctgctgccccagcagcctgtgttcgtagtgcaagagactgatggctccgtgactctggacaatggcatcatccgagtgaagctggacccaactggtcgcctgacgtccttggtcctggtggcctctggcagggaggccattgctgagggcgccgtggggaaccagtttgtgctatttgatgatgtccccttgtactgggatgcatgggacgtcatggactaccacctggagacacggaagcctgtgctgggccaggcagggaccctggcagtgggcaccgagggcggcctgcggggcagcgcctggttcttgctacagatcagccccaacagtcggcttagccaggaggttgtgctggacgttggctgcccctatgtccgcttccacaccgaggtacactggcatgaggcccacaagttcctgaaggtggagttccctgctcgcgtgcggagttcccaggccacctatgagatccagtttgggcacctgcagcgacctacccactacaatacctcttgggactgggctcgatttgaggtgtgggcccatcgctggatggatctgtcagaacacggctttgggctggccctgctcaacgactgcaagtatggcgcgtcagtgcgaggcagcatcctcagcctctcgctcttgcgggcgcctaaagccccggacgctactgctgacacggggcgccacgagttcacctatgcactgatgccgcacaaggcccccagcccagcgcccgccacctcctggagtgcgttttccgtgtcttcacccgcggtcgtattggagaccgtcaagcaggcggagagcagcccccagcgccgctcgctggtcctgaggctgtatgaggcccacggcagccacgtggactgctggctgcacttgtcgctgccggttcaggaggccatcctctgcgatctcttggagcgaccagaccctgctggccacttgacccttcgggacaaccgcctgaagctcaccttttctcccttccaagtgctgtccctgttgctcgtgcttcagcctccgccacactgagtccctggggctggggttttgtttgtagaaggctctggggactcctaatttctgcttccccagcctaaagcagggatcagtcttttcttgtggaataaatccttggatcgggaa

SEQ ID NO: 151533 - DNA, 569 bp, Homo sapiens
  Payload ID: 9831
  Gene Symbol: MAN2C1
  Gene Name: mannosidase, alpha, class 2C, member 1
  ENST ID: ENST00000568374
  CDS Start-End: 23-569
aaagaggagcgagagcccggcgatggcggctgcgccggccttgaagcactggcgcaccacgctggagcgggtggagaagttcgtgtcgccgctctactttaccgactgtaacctccgcggcagatggtggacctgctggttccgggtggagctgaccatcccagaggcatgggtgggccaggaagttcacctttgctgggaaagtgatggagaaggtctggtgtggcgtgatggagaacctgtccagggtttaaccaaagagggtgagaagaccagctatgtcctgactgacaggctgggggaaagagacccccgaagcctcactctctatgtggaagtagcctgcaatgggctcctgggggccgggaagggaagcatgattgcagcccctgaccctgagaagatgttccagctgagccgggctgagctagctgtgttccaccgggatgtccacatgctcctggtggatctggagctgctgctgggcatagccaagggcctcgggaaggacaaccagcgcagcttccaggccctgtacacagccaatcagatggtgaacgtgtgtgacc

SEQ ID NO: 151534 - DNA, 571 bp, Homo sapiens
  Payload ID: 9831
  Gene Symbol: MAN2C1
  Gene Name: mannosidase, alpha, class 2C, member 1
  ENST ID: ENST00000565784
  CDS Start-End: 23-256
aaagaggagcgagagcccggcgatggcggctgcgccggccttgaagcactggcgcaccacgctggagcgggtggagaagttcgtgtcgccgctctactttaccgactgtaacctccgcggcaggctttttggggccagctgccctgtggctgtgctctccagcttcctgacgccggagagacttccctaccaggaggcagtccagcgggacttccgccccgcgcaggtcggcgacagcttcggacccacatggtgaacgtgtgtgaccctgcccagcccgagaccttcccagtggcccaggccctggcctccaggttctttggccaacatgggggtgaaagccaacacaccattcatgccacagggcactgccacattgatacagcctggctttggcccttcaaagagactgtgaggaaatgtgcccggagctgggtgaccgccctgcagctcatggagcggaaccctgagttcatctttgcctgctcccaggcgcagcagctggaatgggtgaagagccgctaccctggcctgtactcccgcatccaggagtttgcgtgccgtgggcagt

SEQ ID NO: 151535 - DNA, 992 bp, Homo sapiens
  Payload ID: 9831
  Gene Symbol: MAN2C1
  Gene Name: mannosidase, alpha, class 2C, member 1
  ENST ID: ENST00000570257
  CDS Start-End: 1-519
ggtttaaccaaagagggtgagaagaccagctatgtcctgactgacaggctgggggaaagagacccccgaagcctcactctctatgtggaagtagcctgcaatgggctcctgggggccgggaagggaagcatgattgcagcccctgaccctgagaagatgttccagctgagccgggctgagctagctgtgttccaccgggatgtccacatgctcctggtggatctggagctgctgctgggcatagccaagggcctcgggaaggacaaccagcgcagcttccaggccctgtacacagccaatcagatggtgaacgtgtgtgaccctgcccagcccgagaccttcccagtggcccaggccctggcctccaggttctttggccaacatgggggtgaaagccaacacaccattcatgccacagggcactgccacattgatacagctcctgaaggtattgattctgatgcagccgaagttttgggatcacagaacaagggctttctctgctgtgccaagatgtaggcctggctttggcccttcaaagagactgtgaggaaatgtgcccggagctgggtgaccgccctgcagctcatggagcggaaccctgagttcatctttgcctgctcccaggcgcagcagctggaatgggtgaagagccgctaccctggcctgtactcccgcatccaggagtttgcgtgccgtgggcagtttgtgcctgtggggggcacctgggtggagatgggattgggttggcctgagcgcctgcctgctccccgtccagcgctgacctgggctgcctcccacttccttcactgccaggatgggaacctgcccagtggagaggccatggtgaggcagtttttgcagggccagaacttctttctgcaggagtttgggaagatgtgctctgagttctggctgccggacacctttggctactcagcacagctcccccagatcatgcacggctgtggcatcaggcgctttctcaccca

SEQ ID NO: 151536 - DNA, 1540 bp, Homo sapiens
  Payload ID: 9831
  Gene Symbol: MAN2C1
  Gene Name: mannosidase, alpha, class 2C, member 1
  ENST ID: ENST00000566634
  CDS Start-End: 23-256
aaagaggagcgagagcccggcgatggcggctgcgccggccttgaagcactggcgcaccacgctggagcgggtggagaagttcgtgtcgccgctctactttaccgactgtaacctccgcggcaggctttttggggccagctgccctgtggctgtgctctccagcttcctgacgccggagagacttccctaccaggaggcagtccagcgggacttccgccccgcgcaggtcggcgacagcttcggacccacatggtgaacgtgtgtgaccctgcccagcccgagaccttcccagtggcccaggccctggcctccaggttctttggccaacatgggggtgaaagccaacacaccattcatgccacagggcactgccacattgatacagcctggctttggcccttcaaagagactgtgaggaaatgtgcccggagctgggtgaccgccctgcagctcatggagcggaaccctgagttcatctttgcctgctcccaggcgcagcagctggaatgggtgaagagccgctaccctggcctgtactcccgcatccaggagtttgcgtgccgtgggcagtttgtgcctgtggggggcacctgggtggagatggatgggaacctgcccagtggagaggccatggtgaggcagtttttgcagggccagaacttctttctgcaggagtttgggaagatgtgctctgagttctggctgccggacacctttggctactcagcacagctcccccagatcatgcacggctgtggcatcaggcgctttctcacccagaaattgagctggaatttggtgaactccttcccacaccatacatttttctgggagggcctggatggctcccgtgtactggtccacttcccacctggcgactcctatgggatgcagggcagcgtggaggaggtgctgaagaccgtggccaacaaccgggacaaggggcgggccaaccacagtgccttcctctttggctttggggatgggggtggtggccccacccagaccatgctggaccgcctgaagcgcctgagcaatacggatgggctgcccagggtgcagctatcttctccaagacagctcttctcagcactggagagtgactcagagcagctgtgcacgtgggttggggagctcttcttggagctgcacaatggcacatacaccacccatgcccagatcaagaaggggaaccgggaatgtgagcggatcctgcacgacgtggagctgctcagtagcctggccctggcccgcagtgcccagttcctatacccagcagcccagctgcagcacctctggaggctccttcttctgaaccagttccatgatgtggtgactggaagctgcatccagatggtggcagaggaagccatgtgccattatgaagacatccgttcccatggcaatacactgctcagcgctgcagccgcagccctgtgtgctggggagccaggtcctgagggcctcctcatcgtcaacacactgccctggaagcggatcgaagtgatggccctgcccaaaccgggcggggcccacagcc

SEQ ID NO: 151537 - DNA, 3300 bp, Homo sapiens
  Payload ID: 9831
  Gene Symbol: MAN2C1
  Gene Name: mannosidase, alpha, class 2C, member 1
  Uniprot ID: Q9NTJ4
  ENST ID: ENST00000565683
  CDS Start-End: 13-3186
gagagcccggcgatggcggctgcgccggccttgaagcactggcgcaccacgctggagcgggtggagaagttcgtgtcgccgctctactttaccgactgtaacctccgcggcaggctttttggggccagctgccctgtggctgtgctctccagcttcctgacgccggagagacttccctaccaggaggcagtccagcgggacttccgccccgcgcaggtcggcgacagcttcggacccacatggtggacctgctggttccgggtggagctgaccatcccagaggcatgggtgggccaggaagttcacctttgctgggaaagtgatggagaaggtctggtgtggcgtgatggagaacctgtccagggtttaaccaaagagggtgagaagaccagctatgtcctgactgacaggctgggggaaagagacccccgaagcctcactctctatgtggaagtagcctgcaatgggctcctgggggccgggaagggaagcatgattgcagcccctgaccctgagaagatgttccagctgagccgggctgagctagctgtgttccaccgggatgtccacatgctcctggtggatctggagctgctgctgggcatagccaagggcctcgggaaggacaaccagcgcagcttccaggccctgtacacagccaatcagatggtgaacgtgtgtgaccctgcccagcccgagaccttcccagtggcccaggccctggcctccaggttctttggccaacatgggggtgaaagccaacacaccattcatgccacagggcactgccacattgatacagcctggctttggcccttcaaagagactgtgaggaaatgtgcccggagctgggtgaccgccctgcagctcatggagcggaaccctgagttcatctttgcctgctcccaggcgcagcagctggaatgggtgaagagccgctaccctggcctgtactcccgcatccaggagtttgcgtgccgtgggcagtttgtgcctgtggggggcacctgggtggagatggatgggaacctgcccagtggagaggccatggtgaggcagtttttgcagggccagaacttctttctgcaggagtttgggaagatgtgctctgagttctggctgccggacacctttggctactcagcacagctcccccagatcatgcacggctgtggcatcaggcgctttctcacccagaaattgagctggaatttggtgaactccttcccacaccatacatttttctgggagggcctggatggctcccgtgtactggtccacttcccacctggcgactcctatgggatgcagggcagcgtggaggaggtgctgaagaccgtggccaacaaccgggacaaggggcgggccaaccacagtgccttcctctttggctttggggatgggggtggtggccccacccagaccatgctggaccgcctgaagcgcctgagcaatacggatgggctgcccagggtgcagctatcttctccaagacagctcttctcagcactggagagtgactcagagcagctgtgcacgtgggttggggagctcttcttggagctgcacaatggcacatacaccacccatgcccagatcaagaaggggaaccgggaatgtgagcggatcctgcacgacgtggagctgctcagtagcctggccctggcccgcagtgcccagttcctatacccagcagcccagctgcagcacctctggaggctccttcttctgaaccagttccatgatgtggtgactggaagctgcatccagatggtggcagaggaagccatgtgccattatgaagacatccgttcccatggcaatacactgctcagcgctgcagccgcagccctgtgtgctggggagccaggtcctgagggcctcctcatcgtcaacacactgccctggaagcggatcgaagtgatggccctgcccaaaccgggcggggcccacagcctaggcctcacccccagccctggtgacagtgcccagcatgggctatgctcctgttcctccccccacctcactgcagcccctgctgccccagcagcctgtgttcgtagtgcaagagcccctacagactcagcctcaaggcctcctcccacaaagactgatggctccgtgactctggacaatggcatcatccgagtgaagctggacccaactggtcgcctgacgtccttggtcctggtggcctctggcagggaggccattgctgagggcgccgtggggaaccagtttgtgctatttgatgatgtccccttgtactgggatgcatgggacgtcatggactaccacctggagacacggaagcctgtgctgggccaggcagggaccctggcagtgggcaccgagggcggcctgcggggcagcgcctggttcttgctacagatcagccccaacagtcggcttagccaggaggttgtgctggacgttggctgcccctatgtccgcttccacaccgaggtacactggcatgaggcccacaagttcctgaaggtggagttccctgctcgcgtgcggagttcccaggccacctatgagatccagtttgggcacctgcagcgacctacccactacaatacctcttgggactgggctcgatttgaggtgtgggcccatcgctggatggatctgtcagaacacggctttgggctggccctgctcaacgactgcaagtatggcgcgtcagtgcgaggcagcatcctcagcctctcgctcttgcgggcgcctaaagccccggacgctactgctgacacggggcgccacgagttcacctatgcactgatgccgcacaagggctctttccaggatgctggcgttatccaagctgcctacagcctaaacttccccctgttggctctgccagcccccagcccagcgcccgccacctcctggagtgcgttttccgtgtcttcacccgcggtcgtattggagaccgtcaagcaggcggagagcagcccccagcgccgctcgctggtcctgaggctgtatgaggcccacggcagccacgtggactgctggctgcacttgtcgctgccggttcaggaggccatcctctgcgatctcttggagcgaccagaccctgctggccacttgacccttcgggacaaccgcctgaagctcaccttttctcccttccaagtgctgtccctgttgctcgtgcttcagcctccgccacactgagtccctggggctggggttttgtttgtagaaggctctggggactcctaatttctgcttccccagcctaaagcagggatcagtcttttcttgtggaataaatccttggatcgggaa

SEQ ID NO: 151538 - DNA, 568 bp, Homo sapiens
  Payload ID: 9831
  Gene Symbol: MAN2C1
  Gene Name: mannosidase, alpha, class 2C, member 1
  ENST ID: ENST00000561615
  CDS Start-End: 21-568
agaggagcgagagcccggcgatggcggctgcgccggccttgaagcactggcgcaccacgctggagcgggtggagaagttcgtgtcgccgctctactttaccgactgtaacctccgcggcaggctttttggggccagctgccctgtggctgtgctctccagcttcctgacgccggagagacttccctaccaggaggcagtccagcgggacttccgccccgcgcaggtcggcgacagcttcggacccacatggtggacctgctggttccgggtggagctgaccatcccagaggcatgggtgggccaggaagttcacctttgctgggaaagtgatggagaaggtctggtgtggcgtgatggagaacctgtccagggtttaaccaaagagggtgagaagaccagctatgtcctgactgacaggctgggggaaagagacccccgaaggttcaagcgattctcatgcctcagcttcccgagtagcagggattacagcctcactctctatgtggaagtagcctgcaatgggctcctgggggccgggaagggaagcatgattgcagcccctgaccc

SEQ ID NO: 151539 - DNA, 1346 bp, Homo sapiens
  Payload ID: 9831
  Gene Symbol: MAN2C1
  Gene Name: mannosidase, alpha, class 2C, member 1
  ENST ID: ENST00000618257
  CDS Start-End: 25-1302
ctgccctggaagcggatcgaagtgatggccctgcccaaaccgggcggggcccacagcctagccctggtgacagtgcccagcatgggctatgctcctgttcctccccccacctcactgcagcccctgctgccccagcagcctgtgttcgtagtgcaagagactgatggctccgtgactctggacaatggcatcatccgagtgaagctggacccaactggtcgcctgacgtccttggtcctggtggcctctggcagggaggccattgctgagggcgccgtggggaaccagtttgtgctatttgatgatgtccccttgtactgggatgcatgggacgtcatggactaccacctggagacacggaagcctgtgctgggccaggcagggaccctggcagtgggcaccgagggcggcctgcggggcagcgcctggttcttgctacagatcagccccaacagtcggcttagccaggaggttgtgctggacgttggctgcccctatgtccgcttccacaccgaggtacactggcatgaggcccacaagttcctgaaggtggagttccctgctcgcgtgcggagttcccaggccacctatgagatccagtttgggcacctgcagcgacctacccactacaatacctcttgggactgggctcgatttgaggtgtgggcccatcgctggatggatctgtcagaacacggctttgggctggccctgctcaacgactgcaagtatggcgcgtcagtgcgaggcagcatcctcagcctctcgctcttgcgggcgcctaaagccccggacgctactgctgacacggggcgccacgagttcacctatgcactgatgccgcacaagggctctttccaggatgctggcgttatccaagctgcctacagcctaaacttccccctgttggctctgccagcccccagcccagcgcccgccacctcctggagtgcgttttccgtgtcttcacccgcggtcgtattggagaccgtcaagcaggcggagagcagcccccagcgccgctcgctggtcctgaggctgtatgaggcccacggcagccacgtggactgctggctgcacttgtcgctgccggttcaggaggccatcctctgcgatctcttggagcgaccagaccctgctggccacttgacctcgggacaaccgcctgaagctcaccttttctcccttccaagtgctgtccctgttgctcgtgcttcagcctccgccacactgagtccctggggctggggttttgtttgtagaaggctctggggactcctaatttctgcttccccagcctaaagcagggatcagtcttttcttgtggaataaatccttggatcggg

SEQ ID NO: 151540 - DNA, 2904 bp, Homo sapiens
  Payload ID: 9832
  Gene Symbol: MANBA
  Gene Name: mannosidase, beta A, lysosomal
  Uniprot ID: O00462
  ENST ID: ENST00000226578
  CDS Start-End: 101-2740
aaagcctcggctacttccgagggggtgagtggcttcaccgccggtcccttgcagcgctgcctttcgatctctccacatctcggtggcgcgggatctcaagatgcgcctccacctgctcctgctgctcgcgctgtgcggtgcaggcaccaccgccgcggagctcagttacagcttgcgtggcaactggagcatctgcaatgggaacggctcgctggagctgcccggggcggtccctggctgcgtgcacagcgccttgttccagcagggcctgatccaggattcttactacagatttaatgaccttaactacagatgggtctctttggataactggacctatagcaaagaatttaaaatcccctttgaaattagcaaatggcaaaaagtaaatttgattcttgagggagtggatacggtttcaaaaatcctgttcaatgaagtcactattggggaaacagacaatatgttcaatagatatagctttgatattaccaacgtggtcagggacgtgaactccattgagctgcgtttccagtcagcggtgttgtatgcagcacagcagagcaaagctcacactcgctaccaggttcccccagactgccctccacttgtgcagaagggtgaatgccatgtcaactttgttcggaaggagcaatgttcctttagttgggactgggggccttcctttcctacccagggaatctggaaagatgttagaattgaagcctataatatttgtcacctgaactacttcacattttccccaatatatgataagagtgcccaggagtggaatctggaaatagagtctacatttgatgttgtcagctcaaagccagttggtggtcaagtgatcgtagccatccctaagttgcaaacacaacagacatacagcattgaacttcaacctgggaaaaggattgttgagctatttgtgaacattagcaagaatattactgtagaaacttggtggcctcatggacatggaaaccagactgggtacaacatgactgttctttttgaactggatggaggcttaaatattgaaaaatcagctaaggtttattttaggacagtggaacttatagaagagcctataaaagggtctcctggtttgagtttctatttcaaaattaatggatttcccatatttctaaaaggctcaaactggatcccagcagattcattccaggaccgagtaacctctgagttgttacggctccttttacagtctgttgtggatgctaatatgaatactcttcgggtttggggaggaggaatttatgagcaggatgaattctatgaactctgtgatgaactaggaataatggtatggcaggattttatgtttgcctgtgccctttatccaactgatcagggcttcctggattcagtgacagcagaagttgcctaccagatcaagagactgaaatctcatccttctatcatcatatggagtggcaataatgaaaatgaggaggcgctgatgatgaattggtatcatatcagtttcactgaccggccaatctacatcaaggactatgtgacactctatgtgaaaaacatcagagagctcgtactggcaggagacaagagtcgtccttttattacgtccagtcctacaaatggggctgaaactgttgcagaagcctgggtctctcaaaaccctaatagcaattattttggtgatgtacatttttatgactatatcagtgattgctggaactggaaagttttcccaaaagctcgatttgcatctgaatatggatatcagtcctggccgtccttcagtacattagaaaaggtctcgtctacagaggactggtctttcaatagcaagttttcacttcatcgacaacatcacgaaggtggtaacaaacaaatgctttatcaggctggacttcatttcaaactcccccaaagcacagatccattacgcacatttaaagataccatctaccttactcaggtgatgcaggcccagtgtgtcaaaacagaaactgaattctaccgccgtagtcgcagcgagatagtggatcagcaagggcacacgatgggggcactttattggcagttgaatgacatctggcaagctccttcctgggcttctcttgagtacggaggaaagtggaaaatgcttcattactttgctcagaatttctttgctccactgttgccagtaggctttgagaatgaaaacacgttctatatctatggtgtgtcagatcttcactcggattattcgatgacactcagtgtgagagtccatacatggagctccctggagcccgtgtgctctcgtgtgactgaacgttttgtgatgaaaggaggagaggctgtctgcctttatgaggagccagtgtctgaattgctgaggagatgtgggaattgcacacgggaaagctgtgtggtttccttttacctttcagctgaccatgaactcctgagcccgaccaactaccacttcttgtcctcaccgaaggaggccgtggggctctgcaaggcgcagatcactgccatcatctctcagcaaggtgacatatttgtttttgacctggagacctcagctgtcgctccctttgtttggttggatgtaggaagcatcccagggagatttagtgacaatggtttcctcatgactgagaagacacgaactatattattttacccttgggagcccaccagcaagaatgagttggagcaatcttttcatgtgacctccttaacagatatttactgaaggaatctaggttgtattttcagtggacaatgggaataaagcatttctaaagcaccgactggagaggaaggcaacagagacaaggagagaagccgagagacatgtctgcgtgctgccacgcatttgagcgattgctctgtgaagagttgtacactgaacacttt

SEQ ID NO: 151541 - DNA, 628 bp, Homo sapiens
  Payload ID: 9832
  Gene Symbol: MANBA
  Gene Name: mannosidase, beta A, lysosomal
  ENST ID: ENST00000511813
  CDS Start-End: 90-296
tacttccgagggggtgagtggcttcaccgccggtcccttgcagcgctgcctttcgatctctccacatctcggtggcgcgggatctcaagatgcgcctccacctgctcctgctgctcgcgctgtgcggtgcaggcaccaccgccgcggagctcagttacagcttgcgtggcaactggagcatctgcaatgggaacggctcgctggagctgcccggggcggtccctggctgcgtgcacagcgccttgttccagcagggcctgatccagagtctcactctgtcgcccaggttggagtgaagtggcatcatcttcctcactgcattctctgcctcccaggttcaagcgattctcatggtctcaccgtgttgctcaagctggtctcgatctcctgagctcaggcaatccgcccacctcggcctgtcaaagtgctgggattacaggattcttactacagatttaatgaccttaactacagatgggtctctttggataactggacctatagcaaagaatttaaaatcccctttgaaattagcaaatggcaaaaagtaaatttgattcttgagggagtggatacggtttcaaaaatcctgttcaatgaagtcactattggggaaacagacaatatg

SEQ ID NO: 151542 - DNA, 2577 bp, Homo sapiens
  Payload ID: 9832
  Gene Symbol: MANBA
  Gene Name: mannosidase, beta A, lysosomal
  ENST ID: ENST00000505239
  CDS Start-End: 40-2508
tttcgatctctccacatctcggtggcgcgggatctcaagatgcgcctccacctgctcctgctgctcgcgctgtgcggtgcaggcaccaccgccgcggagctcagttacagcttgcgtggcaactggagcatctgcaatgggaacggctcgctggagctgcccggggcggtccctggctgcgtgcacagcgccttgttccagcagggcctgatccaggattcttactacagatttaatgaccttaactacagatgggtctctttggataactggacctatagcaaagaatttaaaatcccctttgaaattagcaaatggcaaaaagtaaatttgattcttgagggagtggatacggtttcaaaaatcctgttcaatgaagtcactattggggaaacagacaatatgttcaatagatatgagcaatgttcctttagttgggactgggggccttcctttcctacccagggaatctggaaagatgttagaattgaagcctataatatttgtcacctgaactacttcacattttccccaatatatgataagagtgcccaggagtggaatctggaaatagagtctacatttgatgttgtcagctcaaagccagttggtggtcaagtgatcgtagccatccctaagttgcaaacacaacagacatacagcattgaacttcaacctgggaaaaggattgttgagctatttgtgaacattagcaagaatattactgtagaaacttggtggcctcatggacatggaaaccagactgggtacaacatgactgttctttttgaactggatggaggcttaaatattgaaaaatcagctaaggtttattttaggacagtggaacttatagaagagcctataaaagggtctcctggtttgagtttctatttcaaaattaatggatttcccatatttctaaaaggctcaaactggatcccagcagattcattccaggaccgagtaacctctgagttgttacggctccttttacagtctgttgtggatgctaatatgaatactcttcgggtttggggaggaggaatttatgagcaggatgaattctatgaactctgtgatgaactaggaataatggtatggcaggattttatgtttgcctgtgccctttatccaactgatcagggcttcctggattcagtgacagcagaagttgcctaccagatcaagagactgaaatctcatccttctatcatcatatggagtggcaataatgaaaatgaggaggcgctgatgatgaattggtatcatatcagtttcactgaccggccaatctacatcaaggactatgtgacactctatgtgaaaaacatcagagagctcgtactggcaggagacaagagtcgtccttttattacgtccagtcctacaaatggggctgaaactgttgcagaagcctgggtctctcaaaaccctaatagcaattattttggtgatgtacatttttatgactatatcagtgattgctggaactggaaagttttcccaaaagctcgatttgcatctgaatatggatatcagtcctggccgtccttcagtacattagaaaaggtctcgtctacagaggactggtctttcaatagcaagttttcacttcatcgacaacatcacgaaggtggtaacaaacaaatgctttatcaggctggacttcatttcaaactcccccaaagcacagatccattacgcacatttaaagataccatctaccttactcaggtgatgcaggcccagtgtgtcaaaacagaaactgaattctaccgccgtagtcgcagcgagatagtggatcagcaagggcacacgatgggggcactttattggcagttgaatgacatctggcaagctccttcctgggcttctcttgagtacggaggaaagtggaaaatgcttcattactttgctcagaatttctttgctccactgttgccagtaggctttgagaatgaaaacacgttctatatctatggtgtgtcagatcttcactcggattattcgatgacactcagtgtgagagtccatacatggagctccctggagcccgtgtgctctcgtgtgactgaacgttttgtgatgaaaggaggagaggctgtctgcctttatgaggagccagtgtctgaattgctgaggagatgtgggaattgcacacgggaaagctgtgtggtttccttttacctttcagctgaccatgaactcctgagcccgaccaactaccacttcttgtcctcaccgaaggaggccgtggggctctgcaaggcgcagatcactgccatcatctctcagcaaggtgacatatttgtttttgacctggagacctcagctgtcgctccctttgtttggttggatgtaggaagcatcccagggagatttagtgacaatggtttcctcatgactgagaagacacgaactatattattttacccttgggagcccaccagcaagaatgagttggagcaatcttttcatgtgacctccttaacagatatttactgaaggaatctaggttgtattttcagtggacaatgggaataaagcatttctaaagcaccgactggagaggaa

SEQ ID NO: 151543 - DNA, 1915 bp, Homo sapiens
  Payload ID: 9833
  Gene Symbol: MANBAL
  Gene Name: mannosidase, beta A, lysosomal-like
  Uniprot ID: Q9NQG1
  ENST ID: ENST00000373605
  CDS Start-End: 813-1070
tttgtcctctgcttcccaactcttgccctatctttctattgtaccactccaaatatttcttatcacaatgttgctgttagtagtaacactagtaaatctgagtatttataagctcataaagcttgttacagccttaagcaaaaagcttggggccaagggcgttttaaaaaatgcacactttatgaggtgcaactgcggagaaatgaggacgcgttcttaagctttggtattcacatggtggtggtgctggtagaggctgttacatttcttccagtgaagctgttcttgcagccgccttggaattcacttcagggccagtttatgagccaccccaagtaatctgcttggagtctgagcatcataccttgtatttgaccaaaaatggtattcctgagctcagtgccacctgattcactgcacttggaaccagatgatgttgggctctttccagaagtcaaatccttcctgggaggatgaagatctgccagctctgaggattctggctgggaagaaaaagagcctcaagctttgaaggccattcccatggtagacagagctgatgtgaaaagtggccatcctgttgccccaggcacatgaccttctgaagtgaccaggctgaaagggaagcaatactcgtgtgatctctcaccccgtcactcagggtggcgcaatcacgactcattggctcactgcagcctagacctcccagctggagcaattctcctgcctcagccttctgagtagctgggactacagttggttctaaagagtggtgagtcagaagagacgtcaggcagcaagcgacttgggccatggcctctgacctagacttctcacctccggaggtgcccgagcccactttcctggagaacctgctacggtacggactcttcctgggagccatcttccagctcatctgtgtgctggccatcatcgtacccattcccaagtcccacgaggcggaggctgaaccgtctgagcccagaagtgctgaggtgacgaggaagcccaaggctgctgttccttctgtgaacaagaggcccaagaaagagactaagaagaagcggtagaagaggaggcctgaggagctgggcgggcagggagagggtcttggggacagccctcctgggaatctacattgtgttcccccgcattccaggctcagggtctgaggaggctgtgacgccctatgaccgcagagatctagacagtcgtaacagtccccaggctccagctgggcaatccaccacttcctcttccttctgcttctgtgacggtttagagtcaagggggctgaaacacactgtgagcatagactgtattaggtttgttcagaagccgggtcagctcacagagtcacattttcttgcttagtcatgtgtccctccttgagttgccccctccttgtgggtttacactacatttgggagtcattgtctaatgctgacaagcacaccctctcccattatttgtgcactacagatctcctcctgatcagtcacctttgttgctgctgtgtagacagagccaggcctcacctgtttgtttaggccaagatgccatggacatgcagcgttagtgatcccactagctgtgacagccaggcccagaaaatgcctggcgtgagagccagcagacagccaggccagggtaggcagtgcctgcttctgctccatcaggtgcaggggatttggctgaaggcgtgcatatttcctgggcacaaacttcctgagcctctgaaatgggaggctcgtcaatttcagaccaacctcttttcaacccatcatagcacgttcaaggtgtgccttttacttctacctgtacatcccccatcccttcaattctttcattccctgaccagtgagagggttcctgggggaagtatggtgaataaactgacatgcatgcttcagaa

SEQ ID NO: 151544 - DNA, 1208 bp, Homo sapiens
  Payload ID: 9833
  Gene Symbol: MANBAL
  Gene Name: mannosidase, beta A, lysosomal-like
  Uniprot ID: Q9NQG1
  ENST ID: ENST00000373606
  CDS Start-End: 106-363
cagggtcgcagggaactacttccgggggagcggcgcggcggcgcgggagttggttctaaagagtggtgagtcagaagagacgtcaggcagcaagcgacttgggccatggcctctgacctagacttctcacctccggaggtgcccgagcccactttcctggagaacctgctacggtacggactcttcctgggagccatcttccagctcatctgtgtgctggccatcatcgtacccattcccaagtcccacgaggcggaggctgaaccgtctgagcccagaagtgctgaggtgacgaggaagcccaaggctgctgttccttctgtgaacaagaggcccaagaaagagactaagaagaagcggtagaagaggaggcctgaggagctgggcgggcagggagagggtcttggggacagccctcctgggaatctacattgtgttcccccgcattccaggctcagggtctgaggaggctgtgacgccctatgaccgcagagatctagacagtcgtaacagtccccaggctccagctgggcaatccaccacttcctcttccttctgcttctgtgacggtttagagtcaagggggctgaaacacactgtgagcatagactgtattaggtttgttcagaagccgggtcagctcacagagtcacattttcttgcttagtcatgtgtccctccttgagttgccccctccttgtgggtttacactacatttgggagtcattgtctaatgctgacaagcacaccctctcccattatttgtgcactacagatctcctcctgatcagtcacctttgttgctgctgtgtagacagagccaggcctcacctgtttgtttaggccaagatgccatggacatgcagcgttagtgatcccactagctgtgacagccaggcccagaaaatgcctggcgtgagagccagcagacagccaggccagggtaggcagtgcctgcttctgctccatcaggtgcaggggatttggctgaaggcgtgcatatttcctgggcacaaacttcctgagcctctgaaatgggaggctcgtcaatttcagaccaacctcttttcaacccatcatagcacgttcaaggtgtgccttttacttctacctgtacatcccccatcccttcaattctttcattccctgaccagtgagagggttcctgggggaagtatggtgaataaactgacatgcatgcttcagaa

SEQ ID NO: 151545 - DNA, 620 bp, Homo sapiens
  Payload ID: 9833
  Gene Symbol: MANBAL
  Gene Name: mannosidase, beta A, lysosomal-like
  ENST ID: ENST00000397150
  CDS Start-End: 95-265
ggaactacttccgggggagcggcgcggcggcgcgggagttggttctaaagagtggtgagtcagaagagacgtcaggcagcaagcgacttgggccatggcctctgacctagacttctcacctccggaggtgcccgagcccactttcctggagaacctgctacggtacggactcttcctgggagccatcttccagctcatctgtgtgctggccatcatcgtacccattcccaagtcccacgaggcggagttccatgtagaggcctgattccattccagtcaggttattgggaggctgaaccgtctgagcccagaagtgctgaggtgacgaggaagcccaaggctgctgttccttctgtgaacaagaggcccaagaaagagactaagaagaagcggtagaagaggaggcctgaggagctgggcgggcagggagagggtcttggggacagccctcctgggaatctacattgtgttcccccgcattccaggctcagggtctgaggaggctgtgacgccctatgaccgcagagatctagacagtcgtaacagtccccaggctccagctgggcaatccaccacttcctcttccttctgcttctgtgacggtttagagtcaagggggc

SEQ ID NO: 151546 - DNA, 1503 bp, Homo sapiens
  Payload ID: 9833
  Gene Symbol: MANBAL
  Gene Name: mannosidase, beta A, lysosomal-like
  Uniprot ID: Q9NQG1
  ENST ID: ENST00000397151
  CDS Start-End: 401-658
agaagtcaaatccttcctgggaggatgaagatctgccagctctgaggattctggctgggaagaaaaagagcctcaagctttgaaggccattcccatggtagacagagctgatgtgaaaagtggccatcctgttgccccaggcacatgaccttctgaagtgaccaggctgaaagggaagcaatactcgtgtgatctctcaccccgtcactcagggtggcgcaatcacgactcattggctcactgcagcctagacctcccagctggagcaattctcctgcctcagccttctgagtagctgggactacagttacagaaatatgacactgaccctttgcatttacaagttggttctaaagagtggtgagtcagaagagacgtcaggcagcaagcgacttgggccatggcctctgacctagacttctcacctccggaggtgcccgagcccactttcctggagaacctgctacggtacggactcttcctgggagccatcttccagctcatctgtgtgctggccatcatcgtacccattcccaagtcccacgaggcggaggctgaaccgtctgagcccagaagtgctgaggtgacgaggaagcccaaggctgctgttccttctgtgaacaagaggcccaagaaagagactaagaagaagcggtagaagaggaggcctgaggagctgggcgggcagggagagggtcttggggacagccctcctgggaatctacattgtgttcccccgcattccaggctcagggtctgaggaggctgtgacgccctatgaccgcagagatctagacagtcgtaacagtccccaggctccagctgggcaatccaccacttcctcttccttctgcttctgtgacggtttagagtcaagggggctgaaacacactgtgagcatagactgtattaggtttgttcagaagccgggtcagctcacagagtcacattttcttgcttagtcatgtgtccctccttgagttgccccctccttgtgggtttacactacatttgggagtcattgtctaatgctgacaagcacaccctctcccattatttgtgcactacagatctcctcctgatcagtcacctttgttgctgctgtgtagacagagccaggcctcacctgtttgtttaggccaagatgccatggacatgcagcgttagtgatcccactagctgtgacagccaggcccagaaaatgcctggcgtgagagccagcagacagccaggccagggtaggcagtgcctgcttctgctccatcaggtgcaggggatttggctgaaggcgtgcatatttcctgggcacaaacttcctgagcctctgaaatgggaggctcgtcaatttcagaccaacctcttttcaacccatcatagcacgttcaaggtgtgccttttacttctacctgtacatcccccatcccttcaattctttcattccctgaccagtgagagggttcctgggggaagtatggtgaataaactgacatgcatgcttcagaa

SEQ ID NO: 151547 - DNA, 1539 bp, Homo sapiens
  Payload ID: 9833
  Gene Symbol: MANBAL
  Gene Name: mannosidase, beta A, lysosomal-like
  Uniprot ID: Q9NQG1
  ENST ID: ENST00000397152
  CDS Start-End: 437-694
gggagcggcgcggcggcgcgggagtgccacctgattcactgcacttggaaccagatgatgttgggctctttccagaagtcaaatccttcctgggaggatgaagatctgccagctctgaggattctggctgggaagaaaaagagcctcaagctttgaaggccattcccatggtagacagagctgatgtgaaaagtggccatcctgttgccccaggcacatgaccttctgaagtgaccaggctgaaagggaagcaatactcgtgtgatctctcaccccgtcactcagggtggcgcaatcacgactcattggctcactgcagcctagacctcccagctggagcaattctcctgcctcagccttctgagtagctgggactacagttggttctaaagagtggtgagtcagaagagacgtcaggcagcaagcgacttgggccatggcctctgacctagacttctcacctccggaggtgcccgagcccactttcctggagaacctgctacggtacggactcttcctgggagccatcttccagctcatctgtgtgctggccatcatcgtacccattcccaagtcccacgaggcggaggctgaaccgtctgagcccagaagtgctgaggtgacgaggaagcccaaggctgctgttccttctgtgaacaagaggcccaagaaagagactaagaagaagcggtagaagaggaggcctgaggagctgggcgggcagggagagggtcttggggacagccctcctgggaatctacattgtgttcccccgcattccaggctcagggtctgaggaggctgtgacgccctatgaccgcagagatctagacagtcgtaacagtccccaggctccagctgggcaatccaccacttcctcttccttctgcttctgtgacggtttagagtcaagggggctgaaacacactgtgagcatagactgtattaggtttgttcagaagccgggtcagctcacagagtcacattttcttgcttagtcatgtgtccctccttgagttgccccctccttgtgggtttacactacatttgggagtcattgtctaatgctgacaagcacaccctctcccattatttgtgcactacagatctcctcctgatcagtcacctttgttgctgctgtgtagacagagccaggcctcacctgtttgtttaggccaagatgccatggacatgcagcgttagtgatcccactagctgtgacagccaggcccagaaaatgcctggcgtgagagccagcagacagccaggccagggtaggcagtgcctgcttctgctccatcaggtgcaggggatttggctgaaggcgtgcatatttcctgggcacaaacttcctgagcctctgaaatgggaggctcgtcaatttcagaccaacctcttttcaacccatcatagcacgttcaaggtgtgccttttacttctacctgtacatcccccatcccttcaattctttcattccctgaccagtgagagggttcctgggggaagtatggtgaataaactgacatgcatgcttcagaa

SEQ ID NO: 151548 - DNA, 4575 bp, Homo sapiens
  Payload ID: 9834
  Gene Symbol: MANEA
  Gene Name: mannosidase, endo-alpha
  Uniprot ID: Q5SRI9
  ENST ID: ENST00000358812
  CDS Start-End: 135-1523
gtctgggctcggggcgcggcggcagtcagctctatgttcgcggtcttaacctctcctctggccgagtccttgcaagaagtgaattacccgaccctgcaaaacacttactattttggagtttaaagtatgtcatcatggcaaagtttcggagaaggacttgcatcattttggcactttttattctatttattttctctctgatgatgggtttaaaaatgctgagaccaaatacagctacttttggagctccttttggacttgaccttcttccagaacttcatcaacgaactattcatttggggaaaaattttgatttccaaaagagtgacagaatcaacagtgaaacaaataccaagaatttaaaaagtgttgaaatcactatgaaaccttccaaagcctctgaacttaacttggatgaactaccacctctgaacaattatctacatgtattttattacagttggtatggaaatccacaatttgatggtaaatatatacattggaatcatccagtgttagagcattgggaccctagaatagccaagaattatccacaagggagacacaaccctccagatgacattggctccagcttttatcctgaattgggaagttacagttctcgggatccttctgtcatagaaactcacatgagacaaatgcgctcagcttcaattggtgtactagccctctcttggtacccacctgatgtaaatgatgaaaatggagaacctactgataacttggtacccactattttggataaagctcataaatataacctaaaggttacttttcacatagaaccatatagcaatcgagatgatcaaaacatgtacaaaaatgtcaagtatattatagacaaatatggaaatcatccggccttttacaggtacaagacgaagactggcaatgctcttcctatgttttatgtctatgattcctatattaccaagcctgaaaaatgggccaatctgttaaccacctcagggtctcggagtattcgcaattctccttatgatggactgtttattgcccttctggtagaagaaaaacataagtatgatattcttcaaagtggttttgatggaatttacacatattttgccacaaatggctttacttatggctcatcacatcagaattgggctagcctaaaattattttgtgataaatacaacttaatatttatcccaagtgtgggcccaggatacatagataccagcatccgtccatggaacacgcaaaacactcggaaccgaatcaatgggaagtattatgaaattggtctgagtgccgcacttcagacacgccccagcttaatttctatcacctcttttaatgagtggcatgaaggaactcagattgaaaaagctgttcccaaaagaaccagtaatacagtgtacctagattaccgtcctcataaaccaggtctttacctagaactgactcgcaagtggtctgaaaaatacagtaaggaaagagcaacttatgcattagatcgccagctgcctgtttcttaatgcattgattaaagtttaatagttatcaaaatcacctaatttttaaaaatagctttcgttttgagttctggaaagaaaactgtcaaaatcagtatatactattagttatatttaaaaatatttttttaaattctttacagataatattatacttgttacccttcacaataccacatgagaaaatatctgagacaaaatgtatacaaatatattccttatggcataatttattgcatttctgactgaaatcaaaattctgatttgatggcaattgaattttcattttacaatagataaatgcttgtgctacctaaagcacttagcacacagttaaattatatttacatcctagacccaaataaataggattgtgtgtatatttgggatatctattgaagaaaaaaagaaaaccccttaaagataatgtacatgcttcatgtcatgtctttaaaataatttaatcaactttattgtcttagtatttagactctggataactctacaataatgaggaaattcttaagaataacaaaatcactgtaccttcctctcaattttgctgtgaacctgaaatggctttaaattaatactcttattttttatttaatttaattacataaattaaaccttaccatgaccaaattgtgttaggacggcctgctatctacagcacagtgtgtcatttgcagatttgtggttacctataccacgctaggtgttttgacatgtttagtgtttctgctttacagtgctgaattccatattttagaagctatgaaagtccttttatgaaaaagttactgattgcttctcagttattaggaaaacagttgtttcacaattattatgtagatatgatgcccaaatatcatttttagtatatcttgtcgatctttaagttgttactattgtgttattcatgtctttaaatcagataccaaatattttttaggaaagaaaaatgttattactgtcattaggttgtcttttaatactttaagttattttgacgaaaagtaatagagaaaatttacttagcattttagattctagagacatggaaatgaaaattattttatgtctagagtaggtcctgaagtttggctttacattaagtttagcactgtatcagaatgaagaaactaatattttacataaaaactaatactttcaattttttatatagtaatatccccattttgtaaatgttagacttttatcatacctgtaagttaaaatacttgttatcaataacttgtcatgttgtgacaaattgatcacttgtgtacgaaaaataaatctccttaaaaactaaataaaatgcactgtattcttacagttaatgtttataactatagtaaaaaattaatatatatcctattacataaatgttatttcttaggtgttccattaagaagagcaatagaataatgctaaaaaataatgcctataaatcttcagagtataaagacatccattcagaaacaaaaattagcactaaattttttataaaatagaccagatgacaaaatttattttatttttaaacagtggttttgacacaaattatgttattgaaaagcattattaatgtttaatttatttaaaattttggaatttgccatttctcagagaatgatcaggccttaggaaattaatacagtagtagtaatcattttctaggggaaaataaaagaataaatcactatactgatattttgatacaagcaagcacttacatggtaatcactatatagatccaacctgtggattttcttcttatgtccatttaactagaatatattattttaggtataatttacaaatgtcacacctaataatcttttataatataccatatttcattaaagttttgttagagaagtatctaccacagaggagtttttgtcattgtgtacgttgtgtatttgaacccaccatgacagaaagtaaattttaggaaatagttatgagattaagggaaaatctataaaaacaaggttagcatattctcaacacagataccaccactttctttttcccattatagacatggtgaatccacacagcatacttcatctctgagctttgttgtgattcctcaacacattaccctaaccagccagcagtaacagatttcagagtaagataaagcagattctgtcttcattgcaaaaagttattctcaatggaagaatggcatctgatctcataattactagtttatattaatatagtttttttctccctttttaataaaataattacagtcatccctcagtgtctgtgggggattggttccagttacccctatagataccaaaatctgcagatgctcaagtccctgatataaactggcatagtagttgcatataatctatgcacatcctcctgtatacattaagtcatctctagattatttataacacttaatacaatgtaaatgctatgtagttgttataccatactggttagtgaataattacatgaaaaaaaagagtctgtacatcttcagagtttcagtcggcaatttcttggccatggatgtagaacctacagataaggtgagccaactgcattaggaaataactctaataattctgttaattcttagagaggaaaactttcaaaatcttcctcaggtatttattacaactgcctttaccattttagttgtaacacagtttaaattgttatgataacaagtaaataagagcaaagaatgtatttcttaattcaaaactatacgtttgaattcaatatggtataacttaaagtggtataatacatacaatgcatgaatcataatggattcttttataagttattaatttttatggtttaatcagtctaattgttttgactgttatagaaaccaaatattttactgtttcttttaaggactaatattgtcaaaaactgctgttattaacttcacttgagttgtttaacttccttctgttttaagattgtaattaaaaattactattttgttatatggaatggttaatttttacctaataaaaacatagatgaaatacattgtatttta

SEQ ID NO: 151549 - DNA, 1076 bp, Homo sapiens
  Payload ID: 9834
  Gene Symbol: MANEA
  Gene Name: mannosidase, endo-alpha
  ENST ID: ENST00000369293
  CDS Start-End: 135-731
gtctgggctcggggcgcggcggcagtcagctctatgttcgcggtcttaacctctcctctggccgagtccttgcaagaagtgaattacccgaccctgcaaaacacttactattttggagtttaaagtatgtcatcatggcaaagtttcggagaaggacttgcatcattttggcactttttattctatttattttctctctgatgatgggtttaaaaatgctgagaccaaatacagctacttttggagctccttttggacttgaccttcttccagaacttcatcaacgaactattcatttggggaaaaattttgatttccaaaagagtgacagaatcaacagtgaaacaaataccaagaatttaaaaagtgttgaaatcactatgaaaccttccaaagcctctgaacttaacttggatgaactaccacctctgaacaattatctacatgtattttattacagttggtatggaaatccacaatttgatggtaaatatatacattggaatcatccagtgttagagcattgggaccctagaatagccaagaattatccacaagggagacacaaccctccagatgacattggctccagcttttatcctgaattgggaagttacagttctcgggatccttctgtcatagaaactcacatgagacaaatgcgctcagcttcaattggtaattattgtatatatatatatgtgtgtttgtgtctgtatatatgcatataaatgattttttgtgtaactttactagttaattttctcattattattaattatattgttaagctcatacctccaaattaaactgtatgtatgatcttaaacatccaggcaaccacattttaacactgcccttagtgtatattgtttaatttttacattttggagcatttctggatatattgttgatttctaatttaattcactttctcaattttattaaattatgatttacataaaatacaatgaatttcccactttaagtttatagctcattgatgttactcaaaagtatatacctgtttgaataccaccccaatcaagaagtaaaatatttctatagcccaaaaa

SEQ ID NO: 151550 - DNA, 1069 bp, Homo sapiens
  Payload ID: 9834
  Gene Symbol: MANEA
  Gene Name: mannosidase, endo-alpha
  ENST ID: ENST00000612218
  CDS Start-End: 135-758
gtctgggctcggggcgcggcggcagtcagctctatgttcgcggtcttaacctctcctctggccgagtccttgcaagaagtgaattacccgaccctgcaaaacacttactattttggagtttaaagtatgtcatcatggcaaagtttcggagaaggacttgcatcattttggcactttttattctatttattttctctctgatgatgggtttaaaaatgctgagaccaaatacagctacttttggagctccttttggacttgaccttcttccagaacttcatcaacgaactattcatttggggaaaaattttgatttccaaaagagtgacagaatcaacagtgaaacaaataccaagaatttaaaaagtgttgaaatcactatgaaaccttccaaagcctctgaacttaacttggatgaactaccacctctgaacaattatctacatgtattttattacagttggtatggaaatccacaatttgatggtaaatatatacattggaatcatccagtgttagagcattgggaccctagaatagccaagaattatccacaagggagacacaaccctccagatgacattggctccagcttttatcctgaattgggaagttacagttctcgggatccttctgtcatagaaactcacatgagacaaatgcgctcagcttcaattggtaattattgtatatatatatgtgtgtttgtgtctgtatatatgcatataaatgattttttgtgtaactttactagttaattttctcattattattaattatattgttaagctcatacctccaaattaaactgtatgtatgatcttaaacatccaggcaaccacattttaacactgcccttagtgtatattgtttaatttttacattttggagcatttctggatatattgttgatttctaatttaattcactttctcaattttattaaattatgatttacataaaatacaatgaatttcccactttaagtttatagctcattgatgttactcaaaagtatatacctgtttgaataccaccccaatcaagaagtaaaatatttctatagccc

SEQ ID NO: 151551 - DNA, 1930 bp, Homo sapiens
  Payload ID: 9835
  Gene Symbol: MANEAL
  Gene Name: mannosidase, endo-alpha-like
  Uniprot ID: Q5VSG8
  ENST ID: ENST00000329006
  CDS Start-End: 289-996
agtctaaagcctggctcccttccggcctggcgcgctacggttcccgcaggcgctccgcttcagcaccgcgggcgtggacagctccggggcgcgaggctctgggactcatctgcaggaagtgaacctggcaggaggcttgcttcaggtttttaggaaccatttttgcaattggagatgtttgtgaggaaaaaaatctctgttgaggggggtactgtgtgtctctgaagtggcctctgtgttgcgtctcaggcgtcctggtcctgtcctggtacccacctggcatggctgatgataacggggagccctcagatgacctggtgcccgccattctggacaccgcccatcagtacagcatccaggtatggctcccatggtgcattttaccgctataagaacagcatgggcaagagcctcccactcttttatatctacgactcatacctgacgtcccctgaggcctgggcccacctcctgacaccaaacgggccccattcgatccgcaacacgccctacgatggggtcttcatagcgctgctggtggaggagggccacacccacgatatcctggccgccggatttgacggcatgtacacctactttgcctccaatggtttctcctttggttcttcccatcagaactggaaagctgtgaagaacttttgtgatgccaacaacctcatgttcatccccagtgtggggcctggctacatagacaccagcattcggccctggaacaaccacaatacgcgcaacagggtcaatggcaagtactatgagacggccctgcaggcggccctgacagtgaggcccgagatcgtttccattacctccttcaatgagtggcacgagggcacccagattgagaaggccattcccaagaagacacccacccgcctgtatttggactacctgcctcaccagcccagcctgtacctggagctgacacgccgctgggcggagcacttcatcaaagagaaggagcagtggctcatgtgaggggcctgtaaatgggcgtgaggtgctgatgtccttgccttgctggaagatgtcaccatgtggggttcagctgaggttgtagccactcactcgttcccaggtcagaggtcagcagatgggtgtttctgggtgggccgtcaggcatgggcctgtgcaacacagagcccgttcctcaggcgagtggtgctgaggtgctctgtggtgatgggaacggcagaggctggcaggtgactgaacttagcccagggcagctccacatcctgggaacactttcatgtaaccccttctagttttgaactctgcagcaggctggtgctgtgtagtggccacccagtcaccacccttggaagggtgtcagggtctgggctcgcatgcaccctgctcccttctgccagcctgcatcctctcctcaggcctccttcccacatcatctgtcttctctaagttagggaaccatatttgagactttcaaaaagggaacttctaggtttaagctcctcccagtagattcctgaacccaattatcaggaaatcatcctgagcactcacaggttcatttaacactcactcatcaagcaccttcctatgtgctaggtgctggggaaaacttgaccaaggaagagttcctgtcctgaagcttccaggacccagctttccttttctggtgtggccttgtagctagtgcctgggcacaggtgtttttctttttgcagttttacctagtgctgggagttcagttctttttcctctagaaaaatacctctgtgctccagagcctaatttttcccagatgcatatttagctctagggagaggactaggaggaaatccccctccctttagctgcctgaactgactgaggcccactcactagagccatgttcagtgctactgtgattagtagtaattaaatatgaactggtattctcaagtaa

SEQ ID NO: 151552 - DNA, 2685 bp, Homo sapiens
  Payload ID: 9835
  Gene Symbol: MANEAL
  Gene Name: mannosidase, endo-alpha-like
  Uniprot ID: Q5VSG8
  ENST ID: ENST00000373045
  CDS Start-End: 382-1755
cctctctcccgcgctccggaaggcctgcgtccccgctccccagccaggcgccaccacctgccgcccaggcagccaggcgactcttctttcgcgggtcacgcggcctgactcaggcccctgctcctgtggccccgaaactcgccgttcgctgggccttgcgttgcactcggcgtgcagttccccctcggctcgcggccacttggtccgcgccgcctgcgtcctgtgtgccgagcccgcccgcactgcggggacaggccgggcgccgcccacgccgcgctctgccgggcgcacagtctgcctgggaagcgcgcggccgggcgggcggccatggcgcggcacgctgggaggtagcgcggcggctgcaggagcgcacagtcggccatggcccggcggcggcgccgcgcctgcatcgctctgttcctggtgctgctcttcgccttcggcaccctcatgggtctgcgcacgctcaaggctccggacggactcccggcgctgggcccgggcctggagctggcgccctttgagcgacgcccagagggggcccccgcgcccgctgccagggccccggcagcccctgccgcgccgcccccgccgccgccgccgccccgcaccgcggaccctggcggctcccctgggccggcacccgcggaggccgagcccgcccccgtgcagagcctgcgcgtctactcggacctgcacgccttctactactcgtggtacgggagcccgcggcgcgagggccactacattcactgggaccacgtcatggtgccgcactgggaccccaagatctcggccagctacccccgcggccgccacagccccccagacgacttgggctccagcttctacccggagctggggccctacagctcccgggaccccgaagtgctgcgggagcatatgacccagctcaaggaagccgccatcggcgtcctggtcctgtcctggtacccacctggcatggctgatgataacggggagccctcagatgacctggtgcccgccattctggacaccgcccatcagtacagcatccaggtggccttccacatccaaccctacaagggccgggatgacatcactgtacatgacaacatcaagtacatcattgacacgtatggctcccatggtgcattttaccgctataagaacagcatgggcaagagcctcccactcttttatatctacgactcatacctgacgtcccctgaggcctgggcccacctcctgacaccaaacgggccccattcgatccgcaacacgccctacgatggggtcttcatagcgctgctggtggaggagggccacacccacgatatcctggccgccggatttgacggcatgtacacctactttgcctccaatggtttctcctttggttcttcccatcagaactggaaagctgtgaagaacttttgtgatgccaacaacctcatgttcatccccagtgtggggcctggctacatagacaccagcattcggccctggaacaaccacaatacgcgcaacagggtcaatggcaagtactatgagacggccctgcaggcggccctgacagtgaggcccgagatcgtttccattacctccttcaatgagtggcacgagggcacccagattgagaaggccattcccaagaagacacccacccgcctgtatttggactacctgcctcaccagcccagcctgtacctggagctgacacgccgctgggcggagcacttcatcaaagagaaggagcagtggctcatgtgaggggcctgtaaatgggcgtgaggtgctgatgtccttgccttgctggaagatgtcaccatgtggggttcagctgaggttgtagccactcactcgttcccaggtcagaggtcagcagatgggtgtttctgggtgggccgtcaggcatgggcctgtgcaacacagagcccgttcctcaggcgagtggtgctgaggtgctctgtggtgatgggaacggcagaggctggcaggtgactgaacttagcccagggcagctccacatcctgggaacactttcatgtaaccccttctagttttgaactctgcagcaggctggtgctgtgtagtggccacccagtcaccacccttggaagggtgtcagggtctgggctcgcatgcaccctgctcccttctgccagcctgcatcctctcctcaggcctccttcccacatcatctgtcttctctaagttagggaaccatatttgagactttcaaaaagggaacttctaggtttaagctcctcccagtagattcctgaacccaattatcaggaaatcatcctgagcactcacaggttcatttaacactcactcatcaagcaccttcctatgtgctaggtgctggggaaaacttgaccaaggaagagttcctgtcctgaagcttccaggacccagctttccttttctggtgtggccttgtagctagtgcctgggcacaggtgtttttctttttgcagttttacctagtgctgggagttcagttctttttcctctagaaaaatacctctgtgctccagagcctaatttttcccagatgcatatttagctctagggagaggactaggaggaaatccccctccctttagctgcctgaactgactgaggcccactcactagagccatgttcagtgctactgtgattagtagtaattaaatatgaactggtattctcaa
